United States Patent Application Publication US 2014/0057251 A1 - sequence listing, part 63

SEQ ID NO: 95515 - DNA, 579 bp, Cannabis sativa
aaaatccagtaagtcttcaatttttatcctatattttctttttgttaatttttattgatttttgatacattcttacgttattttcgcatagaacatataagatagttattgttttagtgatccctttctcggaattacttctaaaaaatttttgaattcctaagatattttgttttctgtgaaaagaatatttattattggtttaaaactttggaattcggagtttctagaacatgaaaacctaaaacttcccgccttacttttcataccgcgtctagaacattcaaaaacaatattagaaataaacgatgagatatgtgggtccatttctaaggtcctgcggcatcaagaatgaggaaggatgccgtatttgctcagttgcaccatgcaagttcagttttttccccaactcacctttcgaatgatgaaagttacaacactattgattcttcaaggattagcgcttggagcatcgagcatgttaagaccacatttttgccttgtatataaatattatgtaccaatttcacccaaaaattgtcttattttgagacatcgcccgcacataccttcgcaaag

SEQ ID NO: 95516 - DNA, 888 bp, Cannabis sativa
  modified_base (827)..(833): a, c, t, g, unknown or other
gtggatatcgtgatctgatcaaacatcatggtgagcacaagaagaactcctgtagcagcatcttcatctttagctctccctcaagacccatagattgcatatccaggtaatcgggttacagtcacaactggaactcccatgaatattgtagatgtggtgaatctcgtcaccacaacaggcgcagcaggtttggccaccacagttggccaacctggcacaagcaccccagtggatccaagtggtaggcccacgcctccaattgtagacccaccattggtgcctcccactgaaggaaggacccaggggtgacaggccccctagaataacaactggacctcaactccggttctgcgctggagagacgagcctaagagttggtgagctaacaaattagccagcctcacctggaccttggagaagaccttgggttagccagactcagggaagctgtaggtcgtgaacgcctaactgaagaaacacgcactgttgattgcgatattttcgctgagtagagatcaaaattcttgagatggatggatgaccaggagtacatcctttgatctcaccaagtagaattagatcgccgcaatcgggagtccagtgatctaataagacggttcaaccagagaaccaacagaagaggtcaggatctacttagggatccactttaaggaagagtgtcgctaagttcttcaggaattaagatagatcttcccctgccagaaggagggcagacctttcaacaaaggtcaaacgacaagaacagccagatcttggcaaccaacagcttgtggagtcggctagggtgttgggctttgtgccctaannnnnnntctatttcaatgtaattttttctattcaattattaataaagaaacagatttattt

SEQ ID NO: 95517 - DNA, 2471 bp, Cannabis sativa
atatctataatattttaagtattcaaatttaaatttctttatataaaatatctacttaatttttatttttaaatatatataataatactatatataataatactataaacttaataaagaatattaagttaagtaataatatattccgttagcgtaaaaaataaaaaaatattgttcaatcaataattctattacataactatattttatataaaataaataaatcattattaatttttttaaaaagaaaatattaaatcaaagttataataaaaagactcttaatctattagatatgtggaaaaaaaagtgatttatcattatgtagcatatgctattttgtctactaaaattggccaaaacttattcacttttcttctaagcccaaagtcttctaattctcatctcactaatactattacaccaactcacttgtccaaacaattaatctcttcatctcattactactattacaccaatttacttgcccaaacaaataatctcttctagactttttcttttctccaaattctagctagagtgaaggcttgttgaaaacaaagaaagcaattatgtatcattttattgacaacttacttagacttgttcttactcttcttgtgtcaatgagaactacagtgtagaaaaaagaaagctaaaagcagagcaagaagaagaaaaaaatggtagaatcagcttagcaaaagttgatctaatcagttaaaagactttttatttatacatgagttaatgaaatagagtataattagttacttaaaaaactcattaattaccttaactaattgttaaacaattaactaaaaactaagttaagagaaaactaactagcattagttaatagtgttaacatctcccctcaaactaatagagtttgagccattttcactttggatttaaggtagctaaaatgatcattagacagtggtttggaagcatattagccacttgatcaaaactaggaacataatgtactaacaacttcttttccagaatttggtccctgacaaaatgtaaatcgatcttaatgtgttttgaccaagcatggaaaattgggttgcctgctagagcagtagcattctggttgtcaacccaaataacatggcagtgtggtaagacaacttgttgttcagtaagcaaggagacaatccatcttagttcagttgttgtgcttgctaaagcacaaaattcactttcagtgcttgagcgagcaacaacttgttacttatttgcagaccatgagattagattattacctaaaaacaccacatatcctcctattgatctcttctatcatcaacacagctagcctagtcagcatcagagtatctttctaaagtcatgacaacgacgggtttgagaaataagccatcagagatagcgcctttaagatatcttagcaacctcttgcatgcttcccaatgtaacattgttggagctttgagaaattggcaacatctggtctggtaaaagtaagatattagagagtcccaattgtgcttctataaagagtaggttctccaaatagttctccatcatttaaggacagttttgttgtactgctgataggattagagcaactcctagctccttccatatgaagcttaactagaagatttgtgatgtgcttggtttgagacaataacatcccattagaatctctgaatatttccactctaataaagtagtgaacatcacctaaatctttgagaaaaaattgattgttgagatatgtaactagtttagatataagagtcttgttggggcttgttattagaatatcatcaacatagactaagagtataattaaattgactccagtaccataaataaacaagaatgtgtatgattgggatgctttgaaaccccattgaagtatactagctttaagtttgtcattccaagctcttggagcttgtttaagaccataaagagccttgtgtagaagacatacatgatctggtttggcctgatctacaaacccaggaggttgatgcataaacattgtttcagttaacatccaattgagtgactatccaattcaaagttatagctagagacagtacattcttaaatgtaattggcttaactacgggagaaaaaatctcctcgtagtcaatacctggggcctgcagatagacttttgctacccgtcttgatttgaacttgtccaatgaaccattgacattgagcttgatccgatgaatccacttgttgtcaatgatatgcataccaacttcataaggaaccagtctccatgtgcctaacctttttaaagcatgaacttcagtctgcatagagttaaaccagtttggatgcttgagaggtgcttgaagagatcttagctcagaaagcaataataattctggtaaagggtgcttggtagccaaataaccttttggtttgactatgccatttttggacttggctaccattggatgtgacctgttaac

SEQ ID NO: 95518 - DNA, 1574 bp, Cannabis sativa
ggtttatgagaaatttatgggttgactttttttttaatatttttaaaatatttcaaatatatatctactctatataaaatgtgggtatataacagaattgattaatgtgtgacttttttttttaagttttatattcaaaaacgttaatcatcctacgaattttttttttctgtaaattcttaatcgaaatctcctgaaaaatagaacctcctcaattagttccttttcaattttagaatatgtaaaacggtctatacactaatctaaatccctaattgcaccaccattagcctctacgaattagtatagtcacaacaaatgtaggcagatttacttgtgactgtaatctaggcagatttactaaagtacttttttcttctctccatgatttcaagcatctccgccatatgtgaattcagtgttagctacaaaaagctaatttataacttgaacttagcttctcctctcgcgtaatgctttcatgacattctcagcaaagataggtattctcttctttctctttaagacatttcaatctctcctttttatttcatgccatttatatcaaacatttaagtatttgatttaagttactttctcaattgggttttagctcatttttcgttagttctaatttcgtattagtaatttggttatgtttgttgacataattatttattctattttatattttttttctttggtacttgaaatttgcattttgtgtccatttttgtagacacttttcaatgtagatgcgagaagtgaatatcaaccttcaagagggatttgcttttggctaaggattaaactaaaaaggaagcagaagtaaatgaactgtaatccagagtattatttcatagtggattagtcagagtataaggtatgcttcgtaattaaaaataaacccaaattttagtttagacttttaatattcaaattcatatctgcaaatttcatagtccgtgctctgaatttctataagatcgtgctattaacttttataagaaggtgtgcttggtatttttctttcttaatatttcaaaataaaatgagtaatttttttgacttttaattttttttttttttaattttggcctttggcatggagctcctcaacgtaaaggatttcccagatcacaaggtaaatactaattggtctcttttgaggaataatttttctcagggatatattttctttcaggagtgttttggtatattgattaaagacaataagtggacgtagaagattaattatgatcatcttgaatttgtaattatatgagttttttttttctatgttattatgtctcatatttacatttctaataaaccaagaaatgaattagaaagagattacatgagggatgttataagggaaatggtggagccaccatttgctcaaaggatggtgagtaatcactctaattatcttagtaatgtggacattgttgcatcttgctgcaattaatatcaagaaagtttactgcagatggaagattgtttgcttacgtgccaaagccatgtatagttagttatatttcattggagatggaagatttttaattgcaatt

SEQ ID NO: 95519 - DNA, 680 bp, Cannabis sativa
gaaagggaatagaaaaagtaaagtaatccacttaagcctatgcttttggggttgatgatgtatagggcgatgcagattagggacttgttgatagtatggttcttatctcacacttttgggctcatgtgttgtttgatactgttgcatcacattccattatattattgatgtttgctagtatgttggctttgagttgggaaacttttagtcctgtgttgcatttgagtgtacctatggaaggacacagtgaggtattcaccatatgtaagtcagtttgtattatgttcgagggacacaagctgtctgaaaacttatagtgttgcctatgaggaaattcgatgtaattcttggtatggattggttgtttaaataccaagctattgtagattgttcacgtaaaagagtgactcttttgaccccaagaggtgattccattgtttatcgagccaacatgagtgcagtgagaaaaaatcccatcttaagggcatgcttgggtgggaagaaatttagagtgcatggaactttgtttacgatcgaggatgggtctagggatttagaccagttcccttagatattagtggttagtggttttctgaatatgttcctagaagatttaccagggttaccaagtaatagggagatcgagttttgtattaatttgattcctagagctcaaccag

SEQ ID NO: 95520 - DNA, 1831 bp, Cannabis sativa
gttaaaaggtgttggtattagaacttttgccatcataaaatgaaaaatgctggcaaaaatgacttttctcaacgtgtaaatgcattggtaaaagttagattttagccactgcaaatgtatgctagtaaaactttgatctttttgccaacgcagtttacaaaattctctcttaaatgcaatttgaagtcccaccaccaccgaagcttcaccgtcaacgaataaggccctccaccaccatccctccatctcagtctctctccctccttgctctctctcgtccgctttcactcatccatacaacaaaccaccacggacacatatttagggcttctcgtctctatcactcatctctttcttgtccgaatggcgagccactaccaacccacattttctttacattcgactccaccgattatatttaagatttatatatataaattattgtttaggtatatgtgtaaatcgattcgtgtaaaatttgaaatctatatatatgatcttgttaaaatttgaaattatgtatgaattttttattttttattaatgggttatataaaagctatgtactaaatttgtagcgatgaacactaaatttattaatttaaaatttgaaatcatgtgaaagattttgagaaagtgataaaatataatcagggtaaagaaatataatatacaaagaattaaattagaatattttttacgtggttggtgtgttaaagagtcttagggtacatttttttaagatccagatataaatttcaatgcatatctgaataataagatatcatctgtgaatctgaatattaaaatatttagagtgttttttttttcaaatctgaatttatttttttcttcaatatttttaattttataacgataacattaaagtaaattatatttattttaaaataatttaaatataaaacatgattaacttttaaaaaaggttcaagtattggttaattctttaaaagaaacttatattttataggagtaaaaaaattatttaagactacttgtaaatttttagaaaattctgaggagtttacaatataccagaaataaagtttaaatattttattgcattattagtgttcacaccatgcgttgagctgtcttgtgccccgcctgaacggaggtacggtgattcagcaaaattttggtggcggtggggaagagccttcatacccaagccataaggcttgacaatcaggtgtaccagcgtgtcaaagagacgaggacaaaacttttcagagtgtcccatcaaaccacaaatgaaacaaaaaattggtacatttttataacggaacgtaacgtagcataaaaggagtcaccatcacacttacgaaatttcattcttcttttcagtgggagttcaagggaaagcttaactcgtaccgaaagatattcgtgccacacccccgtaaaattattcgatcggattcgattcaaaaaaggttcccacataattttcagcctgcatcctaagcaactttcatggtcatgaatccagtttacaaatcgtgactttgtatccacaaatcgagagtgttaaggatccgtgttctagggttgtcaccttcctttagggatgatataataatctgttttcgatcataggtccacgggctacccgcgatgacacgatggatatctaactcgtggtaaaattggaacaagaatcggttttaatcaagctacttcgcatacattcctttatcaagtttccagagatctgccattatgttttgaaaaatacgaaattcggagactttccttgtgagaaggcgtccaatgagacaccatctggttgttggaatttattttacca

SEQ ID NO: 95521 - DNA, 659 bp, Cannabis sativa
aaaggtgatgaagttagtctaggggtgtacgcctaaacccctacatcctcatggtctaagaagtttgttctcctacataagacatggcagatatggcatatttattattaatttttctctatgcaaatgtacatatcgatagcaagtatatgctcacaggagtgagacgatcctactttgattgtagttaagtaataataaattaaacttccatatctatttggcaataacaaatttagaagaggaaattaaaatataaagcaatagaataattaaattagaataaaaattaacaatgattagagttatggctatcgatttcaattgtatctatcttatatgacataatataatttaatttctaattactaatttttatgcaatagcatatttactcaagtaatttatagttggctaagatatataaatttcacttacatgtaaattttgtactcttgtgataaatttaaacatgtaaaagacattaagcatgaaaatcctaattgttatccaaaccacataggtactctcgtcctatattgtaatttgtccatatttcactatagcataatcgatactcacttctcaaattttgtatcgaaatcataaacaattaattgatggctaggcaattgaaagaattaagaacgaatgaaata

SEQ ID NO: 95522 - DNA, 547 bp, Cannabis sativa
ccccagccatattttaccaatgatctaccattaccctcctcacagatgcacttcgttttcaaggtgaaaagatgagaactgttcgttgatcacttcaaaaatttaccaagaattctcgaaagtgggcaagtgctgttacctgatgaggacttccagcaccgccttctcattgtaacgcatgctctccagtcttgggctcttctcaaaaataacaagcaagtgctctggcctttgagaaactcatgtcatcagaacataaataatgtaacatgtcaaaattgcaagggaattttcaagaagaaagtgcaagaagttcctttaaaattaccaaatcaggaaaaaaaaaaggctaggagactaaaaaaatgcaattaacatagcaaaagctcaacagcaagtgaaacagagcaaatcactacgaatcaaaacataatgaaaggaaatacctctctcagcatcagtttactaagttcagtctcgaggagtctatgaggttgtagacatgcctttactcaacagatcacaaggtaataagtattttatagtg

SEQ ID NO: 95523 - DNA, 1465 bp, Cannabis sativa
agtgctcgcaactggtacaagttaacataatttgccttcagtaaaatgggaataactctcttaatttttatccaaatgacctagttcaacttgtattggaaagataattttaagatggatcaaagtgtgtctcacaaccatggctcaattctcaagttatcgggtctaaaatgtgctcacaaagcataatagtatattttacttgggaattgtctaatgtggttaagtgagagttgttgaaggacactgccacagcccatgtggcattgtattcgagcactgacactccaaaacacatgcttttagtacttatcaccaatatcatgcctttctaggcatgaggtgacatcccatcactccatttcgaattggtgcatcctcaactgaaaacaaccaattttccaatatttgtgggatataggcctacaaataaggagatttttatagatatttattttcttgtaatattttattcattaaaaagagtggtatatgggattttttagtgagataccccgacatgtgggggatcactaacaaaccctatagcctatatatagataaagtaggaggctgagaaatgggacttttggatcttcctttaggatcatctacgtcaaaaccttctccttgaaaattacttgggcagccaagaacaccacattattgttgagttttatgccctaaataaaactccaatttcaaataaagttttctctatctgcttaggtcgggcagctctctgctgaagccatggcgaaaactcggtcgaagagaggggggaaactgaaatcagatgctaagaaatcgaagaaccagggaaagcgaggtatccaaatggagaggcaatctcaaatcaatcttcctgatgagattgaaccgcttgaacttactgaaagtgaggatgaaccagacgaagttgcccaggggagaaggtgcttgagttcgaatcaggcggacctatttcaagaacctctgtctcctcgaagcttacttagagaaattcaacggcaggaggacgtacaacgcgactttgtgagctttctcaaagcttgagcaatgcaacagtaacctagccaaaggtatgaactctactcctcctattctgagatctgcaactgttgtgagaaatttagaaaattcttttaagaattcacagcaagataggatggtgaagattgaattagaagatatagaagatgaggttaattactggaaaccttcattggtgtgttatgttcttggagccaatccacctttacatgtacttgaaggctttgcaaaacggaaatggaatgacaatgtggataaggtaaaattgttaacatacggagtgttcttgattagatttcactctgttggacagagagatgaagttttgaatgggggttatattttcttcaatcgaaaaccagtcattatgaagccatgggacccgaattcaagcattaagaaagaagatgtg

SEQ ID NO: 95524 - DNA, 1191 bp, Cannabis sativa
acttttagtgtcggttcatgaaaccgacacttattttacagtgacaaaaaataatttttttggtgtctgttcctaaactgaaactattgagcataagtatcggttctaaactaacacttagtgtatgaaatatcattaaaatagcatatgtcaattttacactgacactaaaattaataataataataataaaaaataatacaatatataaccacaaaccattcaagtcagatatgagataaaaactcaaaaataacaaatattcaaatccaaaactccaatatacaatatattcaagctaatgtaatcaaataattagaccaaaactttatacacaataccataaactaatttattgaggctcatattttctcaaaactaaccacaattataaatacatatatacaattatcaattgcctaaagtaaagaacttaagtttctatatctaaatgtgacacaatgatacgtatatacatatatatgtagagaagaccaacaaacatcatgtgcgaacgcttggtgtgtgaacgccgacctgaagaccaaacgaacaacgacggggtgcgaccagggtgacctagtgtgcgagcagcggtgagtgacgatcaatgggacctgttggtgcgaaccagtggtggttgaaggtgctgggaacgggaggtagcgactaagagaaatcgagagagagggatgggaatatagtcgagagagatagagagagataaatgggcttgaaatgtagagtttgtgttaggataatatgtatatatagtagagtttaatgtgggcttttttctttgggattttttttgaaacaattcaatagtctcgatttagaaccgacaccaaaggagctttttgtgtcagttatgaactgacacttatactcaatcagcatgtatattttctttttttaactttttttggtcttagttattattttagtgtcagtttactaaccaacactaaagccattataggtatcagttatgaactgaaaccttagagttagggttgtctttattgttggttttttaataataaaaaaatatccctcgaatcgacaccaaagtctattttgtagtagaggacgcacactgagttacttgttaatgacacttttccatacaaaatacaagtcaatctccatgtgtttggtccaaaaatgcacgatgctgagattatcaca

SEQ ID NO: 95525 - DNA, 796 bp, Cannabis sativa
tggtttagggccctgtaaagcatcaagctgcgtttccactcaggctgaccggcacacttgagcacagaacgaggtaagaatagcataaaacaaagattttttgacattaatacacctagaaaagattcttcttacattgtaagatccaaccaggattttttttctttattattattattattctagctgctgaaatcatttgaggtaaagacgtatacagttctaaaaacaccaaaaacgtaaagggaatctatgtgtcttcgattatttcaaaaaaaaaaaccgaacacacataagtagagtagaatttgataatcctagagaggaggaagacctaggtcttttcaattattatgtaacactacaaaaaattttatttttagtcacaacaaaacttgtgactaaaaataaaaaagtaattgtgactaattattaattattattcttatattgtgactaaaaagtctatggttaaatgtaaagaccgcttaagattaatattttggattatttaataattaaggtttatgcatgagatttaattaatatttataaaatgcatattgtggaaatatatttaaatttatatatgtttattatgctattttatgtaaatatctcaatttctgtgtttgtgttcggaagctgtggaaagtgacgttgggccgttagagactctcgtttggtatattttggtatgtcaatagtgggattttattgttaagttttggaaaagaccaactattactcttttagcttttaaattcaactagggggctaaatggtaatttcatta

SEQ ID NO: 95526 - DNA, 1199 bp, Cannabis sativa
acattagagaaggtaggtgctagacactaatagtactttttagcaattctcatatatttattaggatttttatacacatttctataaaggaaaaaaaaaaattgatttacctcaaatgcattggaaaataattgtagaattttggataagtataatattgtttcatttttaagcaaaatttagcacaattttcaatcaatcaattagaaatggtgttaccactaaatgattatgataatagttattaaatttgaaaattaatatgatactctagatttaattggttttttttttcacattcttcgttaatataacttaaaagtaatgcccattttatttatttttgtgtgatacagaaagtggttcccgataatttaacaattaatggtggagtcatactccaaaaaatcgacggtccactctccacaggacatctacaactaaagaacacaaacccagcagacaacccatcagtgacctttaactactacaaagaagagcaagacttaaataagtgtgttgagggtatgaaaaccattaaaaaggttataatgtcaaaagcattttccaagcttcggtacggacagatacctgttcaagtctacactagcttaatatctgttgttcctctcaatctgaggcccaggcacattggtgattctttctctttggaacaattttgcaaagacactgtaatgaccatatggcattaccatggaggttgtcaagttggtaaagttgttgataatgagtataaggttcttggtgttgatgctttgagggttgttgatggttctacttttctcgcatctcctggaactaatcctcaagctactgttatgatgttaggaaggtaatcaatataatcttactatatataaatatagcattgatattagccaccagtgctgcctagcactttctcgacctgtcgcgttgcgattagctagagatagtctctaaaaactattatattaaattataagggacccgatacttagttggactaagtaatattaacacataagagggtgctaaactccactgatgccttttaaaatatctcatatatatctgcagtgtctttgagaaaaatgtatctgtgtattattgtcatttaaataggagtattaacactgtgtcttctaaatagttaatgatttattataatactcattaaattaaattatttaaaattt

SEQ ID NO: 95527 - DNA, 648 bp, Cannabis sativa
atgaatccttttgccttgaaccgagtcgttgacggaggtcaggcttcttcaggttcagatgttctcgtagatcactcttgtcatgattgtggttggatcttgcccttcttctcaatatttgactcacctttttcttcatacaagggtttgcatgagtttcattctcatgagcctgaattgtgggttgtcgattttcgtccaatgttccacgtatctcaggctgtgtctccaggttttcctcagttccctcaggttgcatttcctgagggtcctgagtatatctctgggttatcttctgccccttggtctgtgagccgtgaggtttgccctgtgaatttcttttcccaaggtcaggtagattttgggtatcatctcccagcgctacctttacggcagctatttcacgctccaacttggcataatgttagtttacttcctccaattgacgcctaagatggcaattttctaattccacgattgatatgtatctggttgggtcgtaagcgccatcctcatcaacctagttagggagtgaccgattgtttctcttccaaggtccgtcaagccaggggccctaatactaggtcttcctggggcttgcattctgttcatgcgatgactcgacctgagaactcaatggttcttttg

SEQ ID NO: 95528 - DNA, 546 bp, Cannabis sativa
attatttatagatagaaaattaaaagagaagaggcacttcataaatgatgccacatcaccttgaaactaacaaaaatcttttagcgtagataaagcctttgctttaaagtttataattaacatctccctatatgataggatttattttttttttttatgagaaacccctatatgataggatttgaagatgattgatatatataaatatatatatatatatttttctgttggcataaggatatataaattaagtaaagtattgaagagtctcaaatgtgggatgataatgaagagtctcatatctctaacaatatatgaaattagttatagtaattgagtgtatataacttacatgaaatgaacgtaattaaatacaccatataaataatatattagtaattaagctaataggttacctatgaacataataaataatattgtcattacaaatttttaagttacttattaaaattattattatttatagatagaaaattaaaggagaagaagcacttcataaatgatgccacatcaccttgaaactaa

SEQ ID NO: 95529 - DNA, 631 bp, Cannabis sativa
ttggaagaaagaattattcttaagatggcgttccattagaggtaatgaaatggaatagaatagaaatgaaataattttcattctattattttgtttggttgcatttaaaattattggaataccattatgatggagtgacctttccatcattttggtgaaatgactattttattttgaaataaaaaaaaaaatcattctactgcaagatttgaaaaaaaattaataattttttttatgcattttaaattttattctattcctttcttattccaattcccattcttatttatatttatatgttttcattctttctaaattttttaaaaaatcactattagattcataactaaaaaaaaataaaaaaaaaaataataagacaattaatggagttgggtgggaggcgtctctttctatattcattaagcattatctgattatttatttattgaaaaatgcattatctgataattccgatgcttgtttttctctcatgtccctttcaagaaatatcaaatcatctcatctcatctgcctactgcctttatacaaacttttatgaaaccccaagtatcaaatgagtgagtattactattagtttgatcactttgttgtaatagtaattgttaagata

SEQ ID NO: 95530 - DNA, 1300 bp, Cannabis sativa
taagataccaatactaacaccattgatttctttggcattaaacttatagatcttgtatttttcaatttcagtaaagtcaaggacctttgttagatctgttttcttgcagatgttgtcaggtaagattgtggaatcaacttatattagattgatgaactgaactgtttacccatgatgttaacattgtgtaactacaaaaatgtgtttccagaaaatgagtgggcctttgacttgctctattgtgtggctttcatggttatggacaagcaatggcttgaaagaaatgccacatacatggagtttaatgtgagaagccaagtttttgccattctcttttacttcttaataataattcattgagtacttattttaatctgtacatattttgttgtaggaggttttaaaatctactcgggcacaattagagagggagcttttaatggatgatgttatgcgaatcgaagacatgccatcttacagccttctttcttgattcataaacaactaaactgtcaaactaagactatgcagagttttccattttgaaatctaccaatgtccctggaattatacaatcacaccttctcttcacatatggcggcttcccacttggttgattcactataaactcaccctataactccttatattgttctaatttgagggagacactacacaatgtttcaaccacaaatgggaaaattgagtatctatgagcatagcagagtttgtttccaacagatgaggacaggaaagtcattggcgatttgtaacgctttcagattgtaatgaagtatatacgagtagccaaatgttactcgggtacagaagtgatttatcagaccggagcaacaattaaattatgtactgtgcactgcttaattgaaaagcaagatacctaaattataaagaaatctttgcctaccataactggtgtctaatgcattgtatgtggagtcgaaacacaattagttgcaaatatagagaagagtgctgagaaaagaagaaagtaacactaatctctttctgaattggtattacttggtccatttgatatgtgcatacatttgaagggttttaccacaagattcactgctcactattatataaaatgctaatgacttatcataacaatgggtttgtaaatgaatgaaacagtatgaaaggtaagtgccaaacttaggaaaaaatgatcaacttctggatattaaaaatatttgatcacttctgcattaagcacgtggttttagctgaggaactaaaatatttaacaaaaaaatttagactatttctcgatttg

SEQ ID NO: 95531 - DNA, 1408 bp, Cannabis sativa
accattgagtagtcacccatatatctttatctttatatattaaaagtggctatgtaacgacaattcttagtttaacgattattttctttttatttgttaaacttaatagtaagttaatcctaccgttatattaaaaccctaactctatagcatataaaaattggtcttatcaagatctttcgcctctccaaaactctcaaatcccaatctaaattcaaattgatttagggcctgtttggcatggctttagaagagcttttgaagtctcaaatctacttttagatatatctggataaaatatgagaagagcttttttaaattaaaagagctttctagagaagcaatgactcaccagcttttttaggaagggcttttaaaaaaaaacacgggaagctattttttctagtttaatgaatcttttataatacctaatttaccctttttttcaaaaaaaaaaataattaaatcacattcttgattattatattacgacagattatttcatttcttctcataatgaaaacctaatagtcttcagcctaaaaaaatcatagtagccatttttattgaagaaagaaaaaatagaattattgctttgtcaaaacaattgaaggttagtattctttaatttttctattctcattataatctattcaatatatttcatataaaaagaacatcgaaggttagtattctcgatatatgatgccgattatgattgtctttttttttttttttaaataagagtctctccatatataatggattgcttttatcatccattcaattactttttaattagcaaaataaatattgttagtattatatatgcagaatgtgattgattacataattcatttttttagcttttttattcttttttctttcttgttattacgctagaatctattttttttttttttttgaaaagcattataatctcattgtttgttaattaatgtaacaaataaagactccccaacattgtatacgttaatttcaaaaataaaattaaaaaaaaaagataataaaacatatttttaatattaattaactttgtaatcattttaatatatttatatacactaattaacaagtttatatacatagaatccaattctttaatatttctttcataatgataaaattttcttacatttccttcataatgataattatacattaaatttgattgagctaaaaataacatgattgagataaaagttttatatatatgttattcaattgtcatatattctttcgtttacaacgatgattaaaatctctatattattgtggtgttcatatttaaatatttttctatttaaattgttaccatgtttgtttaatattttacattcttattttgtaattttttttttcttttaaatggttaatcattaataat

SEQ ID NO: 95532 - DNA, 634 bp, Cannabis sativa
atcaaatgaagaaccagggcggacgtaccttatacattataggggccatggccctcctacaatatatatatatatatatatgcttattatatatgtaaattgagtttttttaataattattgtatggaactaaaatttataaatataaacttcttttgtctatatgtatttactttatttatatattttatatgaaaaatttatctgtttctttttctttttttttttctttaaagcatttattatttcttctataataatattgatttgcttagcaagacatactattttttatttatttcttctttaataatgtatattaatttgcttagcaagatatattatttttttttttttgaggtaccacttaaaattgtgtataaagagataactcttataactacacttttataactactataaaatgatctttttcaattatgaatatagtaaaaactacacttcgcaacaagataaaaagtgaatatttaagtagtcgtttgccaatattatatattaaaaaagaaaaattatcaaaagaaaattagtatagattaacttatagataacttttatgatatggttctacattttaatttacattataaaattaataaaatattttaaaaatatt

SEQ ID NO: 95533 - DNA, 3016 bp, Cannabis sativa
tggatgttatgggtacttatatttgtgtttttatattaaatatgtatgtaatggatgatatttctctttaatatatatattttcaagtttatatatgattgagtttttaactgttgttttattatttttataataaaaaaataaaaaatataaattgttcaaatattattacacagatcattgtcaacaatttttaatagtaatagaaaaacaataaaactgatatgaaaattattttcattagtatcctatgctcaaatgtgaaattgagtcttcatcaactattattaataaacgatttgatgttttggatcacattcttggtgttttagttgtttgataattttttatgttcttgttgaaacaatggtgttggtcttttttccttttttttctgtgctttctgaaaattgtgtaagattgctatatttctattttcttattcttcatgttaatcatgttcctgttggattatttaccctcgattttatatatttttgtttcttgtttttttgtcattattttatgattgttttaaggctatttttaccgttgtttacccatatcaatttatcacgttctttaacatcctggttttgcttaatttttaaacattgatagtatcatttaattaaaaaaccaaccacaattaatcaaatcattcatatctcaatttccacacagtatccaagtagtttgaaaatcctatagagtatgtaaatagatcattgacatctcttttaatagtaatagaaaaataatgaaacttgtatgcaaattcttttctttagtatcttatgctcaaatgtatgtttagtttttccgctgttgttccactgctgtacttaagttgttcttgtttgatgtcttctactctatgttctcttattgtgccccaactccccacatttaatgcacttattatgttgaatcttatcctagctagcttccatcctcatttttttttttgtctttcagatttcaccctttcaactggaggcaagactattacgtctttcatattttgtggtacatcccactcactttagtgtcatattgggtactttgtttcttcataagttgctagctaatttttctttgtgtagtaatttgagaagtacttgtatgggtccatgttcatctccttcaacacagccacaacatgtccataaagcatttcatcgatttagaatctgtttctcgtgcatgttctctctttgaggtctagtgtccacgatttttttattttggttacctcaaataaataatcagtggttgcttttacctatgttatttgaaaccaacatttattatacatagagaacaacagtgggacaaccctaaaaaaaatactagtaaaaccataatagccctagaatgattttgtttaacaacttaaattacataatctagatctcacctccaggttcaatgagtatgtgtagcttttcaatagcatctgttctccaagtggtgccaatttaattaatatgttttgtgcttttatcctattactatgtgtccattgttgcattaatctctcaagcattccaataatattgtaattggaagatctctttttgccaaatttgctgagtttagtgattctactatgttttaggtcatggtggaatatctcttatttttgttgtgaatccttgaccatttatcataactgagtttttgcaagtacgttcttatgcgtttgtccaagccatctagtttttccatgtggtactcaaattgtctttctatgtacgctttcactgctccaaagaatggcaggttgtacttagcagcatgtgttttgaaagttgttttaaggttgttcatcaggtgatatccacagtatgcatgtgtatatttctcttattgttttgattaggctctcatttctgtctaaaattagacactatttttctctcacgccatatacttcttttaattttttgaaaaaatatttccaagagttgtcattttcagaattggtaacacagaatgcacgcagaaatatgtgacatgttgcatcttgtgtgcatgcagacagcaatgttgctccgtaagctgctttcaggaatgtactatcgaccattattatcggcctgcatgttttccacccttttatcgaagcatccaaagccttaaaaataaacaaaaaactgttgtcttatgctgttttcaaatccataaatgatgctaggttgtttgtttttgcaccatgtgcaagaaacttggtatcaagctgtatgatttcttagtatttcctcataagtaattaacaacatgctctttacttctccaagctttcatgtagttcatcttgatttcatacatgtgtttcaattctccttttatatctagtggtgttgcttttgtctttatgttcagaaactttgatttgatgcattcccctatggattttgttgttgcttgcctttgatcttcatatctaacatttattgggcaggtgtgtatgtttgagaacctcctgattatgaatgtatttgttggctcatttttttatgctcgtagagacaaattacaactttcataaacacactttagactgtattcttgagagcacgacctccatgccttgaattggaagttgtttttgattacgaagtagcacagtaccctcttgaatgtttctttgtatttgtatgcctgtcctttttcaacttaagggttgaatttatctgttatgaactttgcattgttgatgtcaacctgtggatctacttttttacagttgttttccagttttctaccatttcttcagcaataagatttgcatagtcaactatgtcgaattggttgttgtcaccttttgctgttttggtttctccttcttcttttgctggttgttctagtgtgcatgattcaaatgttggcatgtttttctcaagcattcccacgttttgttgatcttgtgttgttttttatgtgaacattggtattgcagctgttgttgtgctgttgttctgtatgttgacgttgttgggttttatgccct

SEQ ID NO: 95534 - DNA, 508 bp, Cannabis sativa
taattgtcctatgcatcctctcacaatgtctctaaattttgttttaaacttaaatgttccaaactatttgtgtgaatttatgacagggaaagcttgaaataaaagattttgatatcaaaaaagaggcaggtgcagtccctcttcgagcagttcagaaggaatttaaggctcgagtttcacaaaactaccttgaaattcatctttattgggctggaaaaggaacttgttgcataccagctcgaagtacttatggaccttctatttcagcaatcagtgctactccaagtaaaattaagcataatttaatatgacaaattctagaagcaaatgcaatgtggcttgacacttggtttaatgttgtttcaatacagatttcaaacctactgtcagtaacattcttccaaggcaaaacaagaatcatactagtatgattgcggggatcattgttggggctgtcattttaatcctcttgtttgttttcgtagccttctatgttgttcaaagaaga

SEQ ID NO: 95535 - DNA, 862 bp, Cannabis sativa
  modified_base (804)..(822): a, c, t, g, unknown or other
taagatcctcgtaaaataaattccaacagaggtatcctgtaaggactgtatcttgcgagcagatacccagagtcgattccacgtgtcaccactgtgtgatgccacgtcagagtgaaaaaattgggataatatttgcccccaagtctgaacgggacttctgaagttgcgtgtggactttatccaagctgcctttgcatttggatgggtgacacgtgtcaggcacgtctgttcgcgactcgatgtgaagctgactgggcgtcccttccgtttttgactaataaatgctctaacatagttaatattttgaaatccaattttctcttaccacggttgatggctgcacttgattgcttttgatttcccatattcactttttggggggaatcgaggcgtctgaggttcttttgaaatgattacccattttcgttgcttgcctataaataccagtgagcctttgtccacaaactcatttttaccaaccttccttgctaagtaagtttagagtgataagagaggtttcttttagcttcaagtttgctgaagtgctttcacccgaattgctcgtttagctcagcgtaacctgaatccatactttcgattcttgagtaagttcccgatttcttgtacttttacattgcacatttactctctgaatgcaacttcaatcttgctgtagaagatatgtaggaaaccttaagttaaagaaactctgcgattttcttttgtgacgattcatgcagtttcatcgttcataatgcttgctttttgaactgaatgatgcatgtgttggaaatttattttacnnnnnnnnnnnnnnnnnnnacaagtatgtttattaacacactaaatatgaactttctaa

SEQ ID NO: 95536 - DNA, 562 bp, Cannabis sativa
gaatgctaatcatttcaatgaagttgatatttcattttcaaaaaaaaaaaaaaatagaaaagattatattaaaattgagttttatttagggcacaaagcccaacaggatcttgattgcaaatttgaatattttccatttcttccatgggctccaataccttatctgcccccacacgcggatttagctcgtcctctttgtattgttgttccctatcctttccctaatcagctactaggattgatgattttgtagctacattatagaatttcttagcctcagcttagttttcgtggatggttcccacttctatgacctaggttggaaatttgagacataagtatcagattgaggtcacgaccccaaattccactgaggctggttgtccaaagatggcattataggcagttgtgcaatcaacaatgacaaaagtacaatacttgaaggtgctttgtgggggtgtcttgacacagcatgatggccagtcgtatcttcaccattgagatcaagaagtctctagtgaatcttgtaagttgtgaaccactgggggacaggtcttgattc

SEQ ID NO: 95537 - DNA, 1588 bp, Cannabis sativa
attgatttatacaccaccgatggatctatattttccatcaataccaccatcaccatattacatcctctacgagctaccaaaagtctctctccaagctcatccttcaaattttgtgttgttggttctaaacatggtacaaactcatatcatgtcaatcttgaggacattcatgatggaaactttcgagtggtcatgcatgatgcttattatgggcgtcaaccactcattgatgtggggtatatttgaggtaagttctctctttttgtttttattatcacattggggataatgtgaatctttaatttgggggaggggcttataattttaattttttttagttagttatttttttattgttgtgttagtgtttgtttgtaagccattatttttatctatattgcattgtttttgcctgtaaaaagtaaattgctaatgactgtgtgcttggttcaactgtttttgagattaatttaaaaagttcttatgagaaatttttagtatatttcataaatgcaatattttggattttattatatatgcttgattagggttgaaggtatgactttttgaatttgatagaacttgaattatttgacctttgagacgaaatccttcatgacttatgctttaaaaaaaatgatttaggaaatttctttggaacgtttgtgcctttcaagctaacatgttttgtaattatccctagtttaacccttttaagccttaaacggaattgttttctataatacacactagttgagctaattttttttttttttacccatttactattttcccttgtcctaactattccatgactttgcacataagtttaggggaaaattataattgggtattgtattttgagaacacttaaaaagagtgagagagaatgttttaatttgttgtaatcattttctttgattctttatattcttctcttacaaagaaaaaaaagaacaagaaaaaagaagaataaaagaaaagagaataaaaaaagaaatatatataaataaatctcagtgttgattgcaacaatataaatctctttagtgtattatattaagtggagaatgggatagttctgtaataaaattgaggtggttggaatgtaaaaagtttatggtatagttgagcctaaataatttttttatctacccttacctaagcctaacggtgtaacattttaaagcccttttaatttcaaagcatttgttgtcgacattagtggagcaggttaaatagtgtaagcatataaaaaatttggattgtggttttgtttggtatgagttgagcatatatggtggagttcaaattattgtggtcatttgtgaaacctatccgttgaactttaaagttgatctttcaggcagttgagctgaaaatctggttaaaacttgcaattaagattttatgaaaaaggcaatctaatgtagataacaatggtggcatacttgtgtgtttgtttttattttctttttttgttagtttcacttggtctttactcgagggtacgtaaagtttaagtttgggagaatttgttagatttattttaatgcattttttatagtctaatttagggtgtgtttta

SEQ ID NO: 95538 - DNA, 526 bp, Cannabis sativa
aacgagttttacgtttggatttaccacacttagctccatccaccctcaccggcatatcaactactaacgcacgatgatccgactcccaccaatcaagaagtgaaacgtccgccccttcaaattgactcaaccactcctccgtacataactctctatccaacctctccatgatccttgaattatgatgttcattacaccaagtcagctcatgtttaaatgaactaaaatcaatgaatcggcaatcgtctatgacttctttaaagccatccattgcccctggtaacctatcacggccaccaactttttcagagagactcacaatttcgttgaaatcaccaatacacaaccacggcccccatacttccttccttaaatcacgtagaagttgccacgaaaacctcctttggctagcttcaggattaccgtagaacccagtaaaaaaccacgaggagaagccaactccagccacagttgcaagaatatgcccaggtgagctagataaaacttgcaatgtgatagcagattt

SEQ ID NO: 95539 - DNA, 533 bp, Cannabis sativa
gctttaggctcaaaacaatcaaacttcactctatgttgtttatatatgacctttataaaatgacaatgttgtttaacttgttttcaatatgattcattagagtcatttcatcggtataccaagttaccaacaatttccaaaagtggtatttttaaaattttaaatcaagaaatataataaactttattaaaagtcctgacaataaattatgtcagcaaatttaatatttcaatcggtagagactacatcatacataacatacaaaaagccttggtttatacatatcgaaatactttatgaatttatagagtaaaatacttatatgaatttatacgtaaattacacacaaatataatgtattatttgtataacaagtgatactttataaatggggtcattttaattgacaaattatttatcatataaatgtgtattgtgtaaattgtgtgtacacctatcattattcggttagtgttaactttatggtatgtatcattacaaaaataaaattctaaataatttcttggtgacaa

SEQ ID NO: 95540 - DNA, 646 bp, Cannabis sativa
aattaatattccaaataaataaaatttataaaaaatttggaatttttttcccttttttttttttgaaaaattacactgtctaaacgacatgtcgttttttacaaaacgcaaaacgacacgacgttttatcaattccgaggggtgctgaaaacatgtaaaaatgacacgtcgttttactcatcaaactgctgcctcacaagacgaaaaatgacatgatgacatgtcgtttttccacaatgtgaaaaacgacatgtcgttttcacacaacgacaactgcaaaaagaaacttgcaaacgacacgtcgtttgtcgtttttcacaaacgacatgtcgtttgcgtcgtcttctccagccaaactgggtcgttttgacctgtttttcagtcatgcgggtccgatggacccgaccctaatccgatcgaaaagtgcgtttccgacgaccaaaagactccaaatcaattctaaatgaatctaaatgaaaaatttaagtcattcatatagattttatgcatcgaaaacacgtaaaataaagactttaatatcaccaaagttttcgggtccgaaaaaatattttccagaaaatttttgagatttctttgtttttcaatgtggattttcatgcttagaacaatctatattaatatatga

SEQ ID NO: 95541 - DNA, 537 bp, Cannabis sativa
acacacatatataaactcacaaaaataaacataattttatacacaaataaactaaaattactatatatacacaaatgaaaactaaaataaataaaatataggttatcttgactgaaatgatgaaaatgtgaagaactattggaggcttgggcagcggttgctggaggtgcggcgacacgtcctcgtcagagtccggtagagattttttatttagaataaaaatgaaaaaaaggaagaaaaagagagaattaatgattcggtagagaaaataaggcctcaggatggtgaaaatggtggttggtggggaagagaggtggctgcccgcggtggggaacggaggaattgtacagaaaacaaagagaagaaagagaaagaaaagagcaaaatgggggagggggttcttccaaggcttttatttagcctggacttttgtcggcacacttaggctcaccgacaaaagtcgaagctgacaaaacaccctttaaacgctgtgtttaaaaaatgtgggaccttatttaggcgggaagttgactgcca

SEQ ID NO: 95542 - DNA, 528 bp, Cannabis sativa
catttaggggaaaaattatagggtatttaaagcatggaatttcaaatttccctatataaactgtttgtcaagtcattctagcgctaattataatctcttaattaacatctacattcaaaatcacatgttagaataattttttttaatttttttcatagcagtattcgttatagttacaatatcactcctgtaaatttttaaaaaatttcgaatagtttacaatactaaaacagaatttctgatattacgttcaaaaaatttcaaacatattttcgacactataaactattcgaaaatttttaaaaatttacaggattgatattgtaaacataacgaatacctttgaaaaaaaaatattttaacatgtgttttcgaatacaaaaattaattaacagattgtaataaaaaattaacatgagccactcctcttctctaaattgcacacacatattccatatgtgtaataagtgttagctctctatatcgtaaattgcggcataaatacttaatgttttagattttatacac

SEQ ID NO: 95543 - DNA, 601 bp, Cannabis sativa
agagagagagagagagagttctatgccttagtgcttctgagctcttaagtgcatgaatgaattaaagtttttatctttttcacgcagggttatggcccttttatatagtgtgaggatttacaagtaacatgacagatagaaaatatctctagaaaatatggcaattacattgtggtgttgaatccctgaaatcgtgggcagtttgaactgatccgaagttgtaggagtgttgaggacgatttggaatcttttggaaggcttatgggaaaaatacaagtgttagaacgtagcatgtgtgcttgggcagacaaccatatttggaggctgcccggtacatggggctgtattccctgaccggccaggatcttaccagtgcttgcatatctctgtctttgttggtgattctgatatcaagatgaacatgcctcagaaccttgaagatgtggatcttgtaagtctccacgtggaggtgccacattaagagggaaaaattggaataatgtgcctttttaatttaacgcttaaatataatttaaccgtgatttttccaataacccctaaatataatttaaccgtaatttttccaaactcatcttaaaat

SEQ ID NO: 95544 - DNA, 666 bp, Cannabis sativa
  modified_base (628)..(639): a, c, t, g, unknown or other
aaactttgatatgtattaaattgtactcccgaacattttaggtcatcgaaaattactctcgaataattgagattgttagattcaagaacttccaactaattttactaacgaatgtctgacgtagatgaaagttcagtggacacgatttgtatatgcgaatgtttgaagaatataatttggtacatattaaagtttgagagcacgatatagtacataaataatcgtcacattagtaaaattaaatgagattagataaaaatcataaaattcaatattctcaatagttggagaataaattttaacaaaagttcattgctaaaaatcttaattaatcatatctaatttctaaagatatttttggagtaatgatgtggagcatttctattagtacgagtgcccaacaccaatgcaagtgttatatgttttagctcggtggatagtttagtcaaaaggttattaatatcaaatattaaattcaatattaaattattactaataacagtataatacttatttttgggtgattctataatgcacccccttaaaatagatgtactgatgcacccttaacttattttgatattcaaaaaaaaattttagtcgaattttttttttcatattcatgtannnnnnnnnnnnttaagatatcctacaaaattttaaaaa

SEQ ID NO: 95545 - DNA, 1313 bp, Cannabis sativa
aatattgatatttaaaatattcatttttttgaacagtaacttattctttatcaaatagatgtagatatacttggagttattcgaagtatattattttttgctcgaaagttattgtaattattacgtgggagtattttggaaatttatgtagtagaggttcccttggtcgtttggtagatttttcaactgttttggtattttttttaaaaattaatttaatattttttttttcatgatcatctatgttgtaattatttaaaattatttgtaaatttttaaaaaattttaaatactttacaatattgaaaattaagtttaaaccgttaccttccacacatataaaaaaaaatagttacctgtgcaatataaatcttatttttggtagtataaactattcagaatattttaaaaatttacagataatcttaaataactataacatatatgattataaaaaaattgaactaaaaatttctcttttatactaaaataaatagagaatctaggaaacactcttttaaaagggaggcttacccaagtatatttatatgtttttttttaaaaaaaaataaaaccaaaacttttacatatatatttaactaatttcttttaactaaaaatgagaccaataactataataattttgataatgattatgtactaaggttaacctacttctaacacatttgccgattcatatatcatcatcatcttatgtgggctcccgcaagacccccacaattggatttttctttgtaatttttgtttttataagtttgttttacagtacaattaatttatgccatactattattcttaattaagtttgtttttccatataaacaaaaagtaagttggacatgagtaagacttttgaccgtgttgagtggtcttacattgcggctgttatgaccaaaatggggttcaacattaagtggatttcacttattatgaattgtttgcatactaacaccttctcttttctgattaatagttcggttactggtacggtcataccataacgagggcttcgtcaaggtgatccactctctccgtatttcttccttatatgatctgaaggtctatctcgtcttcttcaatatgaagagtctgtatggcgccttaaaggattggcaatatctagaagagcaccttccattacgcatctcttctttgctaatgacaacctattgttttgtcaagctaatgatagatgttgttgttgctgaaaatttataaacactacgcaagtatacgcaatcaagtagtaaatctcacacaggtgaggtcgatcccacagggaattggattaa

SEQ ID NO: 95546 - DNA, 635 bp, Cannabis sativa
tagtacatgtctttacgaatttctctctgtcgcactcctttatttatttatgtatatatatatatatatatatatatttaaatacactttctgttcacatttgtgtatgattataagttagctggagaggtaatatgaaacacaaccttaaccctacgaaaacttttgctttgtcttgaaaactaagcgttaattaaaaatgtcatgtatccttttgcctataaggaggttgcgtaatccataatcatgcatgtttatattataagccgaataattatatatatatatatatttgtccctatggtagagatacttttctagcccttgattattagtctaatggtaataaagttgaagaaatatgatagtaatagtggaacctagcttatagtatttgtacatcttttttgtttttacactattgtcttcttcttctctttttttttttaaaaaaaaaattaaatttaatagttattttattttactttttagtacacttaattaataattttgtttttaattttttcatattcttttaaagatatttttttagtatgttgctttcaaaaaaatatttattttaataagcttgttgaggaccctttttaaaatttattttctaaaaattatatttt

SEQ ID NO: 95547 - DNA, 506 bp, Cannabis sativa
gttttaactttgtctttatctactacacatggaaatatatatgagtcaacagactcagtaaaaaaaatataaaacatacaacacatatttgacctgtaattaggcgcccatgcacccaattaccataagtctactacctacgtccaacgcgtataattgagtctcgaacatttttgactatagtacaactgatcataataccagtctatactcagcactctagtcgtactgatgtggtagcatcagtccatactattagtataattaaccatagtatcaaattgtacccagtactctagtcatactagtgttagtagcgttaattagtacttttctatattgccaaatagatatattatcgatattcaggtacaattctatgtacaccaatactgctactactgatatgttatttatgtgccgatcaacctgagtgaaaaattgctcgacgatagaaggatctaagtcgcattagcagtaaactagtaagtgtctattttgaaaca

SEQ ID NO: 95548 - DNA, 583 bp, Cannabis sativa
aaaatatctacttgatttaaatcctagaagtggcattattagttagtgattatttaccaaaacatatacgttgaatcatatgtccaattctgtccaagaagaatctccagcaatagtaattttatcataataataattatatgcactcttatagcagctaaaatcctcccttcattattatattaagattcttgaaagaataaatttccatagttagtatattcatgacctgtaatatataatatatacatataaatatcattgtaagatattttcatttttttctttttccttatcttgaaatgaagatattttcatgtatttgacacgtcaaagttgatcttatgtattagatatctcattatacatattcacttatgtacaagtctatccttaccaagttaaaacatattaccatgcccataatatagtatatgatatacgataatgattacttatttggtgtgagtaaaagagtgagaaacgatattgttgacaatgaagtaaaatagttattattgggtgtgacttgtgagtatatatacactaaatatatatagtaatataggatatgtgggcaaaa

SEQ ID NO: 95549 - DNA, 885 bp, Cannabis sativa
cttttgcaatatttccttgtcaagtttaacaaccattgatgattgtgaaggaacttgctcaatctttttcctttggacaaggcactttggtgttgttgcaattcaccaatttttttaagcatcaaatcaagacaatgtgctgcacatggagtccaatatagatgctttcttttctccattaataatgtgcccgtcgctttgtaggcactagcattatcagtgactacttgaacaattagatgctctcaaatttcttcaatgacatcatccaacattttaaataacttcggtacatccttactaaatgaagaaccatcaatacttttaagaaacacagtgcccttggaattattgactaaaatattgattatgcctcgatttctaatgtctgaccagtacccgacccaatcatcttttcaaaattcatttgactcaaatgctttgccaaagtattttgtttcaagtgctccacaaattcatcctttacttctttgggaacctccggacatggtttaacatcttttctagtttgagtaaggtgttgtttcaatcttgtcacaccacccttaataatttgcttgcaatagttacactcaagataaacataagttttcttcttttttttttttttcagcatctcctcctgaaatatcaaccttcttaccatgtttccaagcttgatcttttctattttcatggctgtcattccctctactagtagtattaacattacctctcccattattaccactagttcctccaacacaactctttttcgatcttttaaccattctactatctatagaacacaaatataactaaaataataaatacatattaaaatttatgcatctaactgttggaaattattttaccagaatctta

SEQ ID NO: 95550 - DNA, 870 bp, Cannabis sativa
atttcaccaagtcatgttgcacaagatgaaggttgatgttgaggcggatttgcacatgcggttttacattggtcaaaaggagctcagatttagagtggttgaatttgcgctcattacaggcgtgaacttctcctcggggccaacgatagaggagaaggctgcacaggttgcccgctcgggaccagactgattgatcaataaatatttcaaccggtctgatagtgtgaagacagaagcactccaatataggttcacaatctgtcagaactcagaagacttgtacaagcttggcttgtgcttgtttgttgaggtagtaatactgggtcgtgaggctaacacgttgattacggctgacatacttagatatgtcgaagatctcgagttcttgttctggattccttagaggaagcactcattcgctagacttatgcactcgctccagaagaacatgttgaaacaaaaggccaactatgagaagaagttgagtttggaagtacaacatgagtgtaaataatagcttatggcttcgcacctgcagaacaatattggacgttgagactattttagaagttgggaagaggtatggcacgaatcatgggattcgatttcccagaatgcttagctggacgagcaaatgtgatatagtgaagaaggaccttagtgcattattttctagacgggtatgaatttctcttatgttcatagtaattatttaagataaatgcttgtaataaatgctacatcatttttctctttttttttgaatctcaaacatcttaaagtgatgaaggggtctaaaatttgatatggggtattttattatggttgaatagtgaaatttcccattataaattccagctcatgttctag

SEQ ID NO: 95551 - DNA, 523 bp, Cannabis sativa
cattaaatagtaagctaaactcaggagttcgaatgcatgccatgataagttgaatgaattttgagggaaaattcaaggcattcagtatccacgaagtcccgttctagagaatcacaagtcttcctgagatccaacttgatcatacaattcgatcttgcattttttattttaccataatgtttaactaaatcttggcaaatcattatattgtaggctataaattttccttgaatgaacccactttaattttgagcaacaatctctggtagcacactctcttaatctcatacagataatttttgttatcaccttatatatgacatttacaacaggctattggtcaaaaaccgctaacatcttttggacacttcattttagggatgaaagttaaggtcgtggaattcaattctttcaacaatgtcaaaattataatttaataaatatttgcattagctttatgggtggcacaaatccgattaaataaactctttcattataattaataactagtactatataaaga

SEQ ID NO: 95552 - DNA, 556 bp, Cannabis sativa
tatagactaattcagtatctgaagaaggtgtgtggacattgattgaaacagaattacaatatttgggttctgttctatgtttgttgagttgattattgttgattctagtattgtctgaaatcagactggcatcgtcagcagcaggaaagcctgaaaaccatcatgtctccggctataatcattttctattgcctcaacagatgtttagataaatttcaaagtgatgagctcggatgggcagtgctgtattacctgtatgtttatctaaccttaagaccattttatgtgtagagcttatttggtggtatgccctgtttaattttccttttcccttttatttgcattttgaggatgttgaaaagctgagagtaatgcaggtttgtagatcattgtgtaaaaagttggacttgtatatttttttgccatgttttccttttcggctaatggtagtgagatatagtaatgtcttgtcctggactagtggactcatttgcaattacggtaacaaggtccactacaggactataagataatacttctttctttcttagcaaaa

SEQ ID NO: 95553 - DNA, 815 bp, Cannabis sativa
cccataaacacaaagcacgcccataacatgctgcaaactagctcagtcttgatcttagcctacgcccatgcataatgtctatttacaacttgcaataatcatgcaagtcttcgcagtgaacaacccatctcttgtagtatttccctctggattcacacaccaaaactaaacaagtaccttgattcttcaaagatatgaattagtgggatccccccttcaacttgggaaaaacctctctcttagaggaatacctttaaaggtatagctcgcaagctaactacatactcatatatggtccctccattccaaatgtcactttgatgaagatgttaaactaatacctcagtcattttgactcttcgcctctcggcatttcaatgttaccttagtaccttactcctactgactttcgccttaggcaaacattgacatggtgttattatagtacctatgtcttgtatactttcaccctagataactggcactgcctgtgtcccgagtcttcttgactttacatcctaaacaaagtccatctccatgatacttatcttgatgcttgtgatgaatctctagtttgatgagtgaaccgtgagggtctctcccccacttcatctgatggcatcctcgacaacatggccacatgcaaattcctgactgcccaactcttcatgcacaccatgccatctaaaagtgcatcccgcgggatgtgactctcgaatcaactatatcatatagcacccctatcaatttctatatgcatgcactgtccactaaaccatctaattgattcccacttgaatcacgcccttccaggc

SEQ ID NO: 95554 - DNA, 610 bp, Cannabis sativa
gccaaaactgaacctgaaggaaacccggaaaatttcccctgcaagcaaccggtcgaccggttctggcagaccaggaacaaaagtttcgcttctccaatttcgacctaaaactcctccaaacctaaccaaactttccagaactgtataatagcataaatatagcataacccaagctgcaaattacagtagttcaatctctaacttaaaatcatatactcaagtgaagaaaactaagttcttttagcttcctcactcacaaaccaatcccgacagccatgaattcaatttaaacatacaccaacagacctaattcaactaagataacatacttaaacctcatctaaacctacaaccctgaaaactttcaaaaagaataacaaaacctagcttagaaacctagaaatgcaccaaaacataaggaggaacttaccttaaggttcaaggttggcttgaggtttgagtttagctctgaaaagagaagattgctgaagaaaaatagtccccctaatggctggttgcagctgctcgaaggaagaggagaaagaaaggcttgaaatgggaagttaacttaactcacaagtaacttaaataggaattttttttttttttt

SEQ ID NO: 95555 - DNA, 770 bp, Cannabis sativa
gacagttacctcgtaccctcatcacccataaagtcactggttcattaatgaaatatcctttgcgtgacagtggtgtcatttgcttacgaaatagatttcatggttgtgtttacctttggaacccaataataaaaaaccataagaaactcccaccatctccatatgattcatctccatatagaatgtatggacttgggtaccaaccattggccaatgatttcaaagtggtggatgcaaaaagtattgggcaattttcaatctataatatggtgtcagttaatgttagttgctcaatttattagtcaatttctatttgtcgtagtcaaagtcatctaactgatgatggtgtagttgcttttgatttgagtagtgaggaatgtaagctcattgaacccccttcatctttaaaagataaaggcttttccattacgggtatttcaaacttgtgtggctgcctatgtctgatgacttcaccattattacaaaatttatcagcaagactatcatgtattgagatatgggtgatgaaggaatatggtgtgtgtgattcttggagtaaatatgtttatttggacttgcttaaccaacttgagcccacaaatatctgtaaatactggccattcggtgtatcacataatggtaacctcttacttgaatcaaatcgttgtgctgatgaaccctggtaatatagtctgtcattttatgatcccaaggccaagagtaagatggtctacaacaagggcgaacctcttaccttggtacttatgcac

SEQ ID NO: 95556 - DNA, 1288 bp, Cannabis sativa
aaaattgaaaagtgaaaacatttttattgaacttgtatttggaaaatatttttaaacagttttattaaacaaataagaaactgattaaaaaagtgtaactgcaccaagtaagttcgctgtgtttactgaaaacactagtatcatgtggatacagaagaaggtatgatttgtactgaacaatacatcatatctatatttatatgcattgaaagctaaatttgtggttctattttacatataagaagaacctttgattgtgtttttttttcttttgtttaacaaacattgattgtgttttaaaacatgcttaaagatgaaaatattatctgcaacgtattaaaggtggcaataattcgtagggatttgatgctcatgtgtagttgtgctcacaataagaaaaactgagggactgagattggtgctgtaatattgtaatactgtgctagtagtgactttggtctggggctttagtcttttccttaggcatcccaattataaggtgatgatttcattgtttggccacacttgctcagacattacccgatatggtttttctgttagtgttagtgttagtgttagagcgacgaaaggaattttgcataatgcatatcttataaaaatcctgttgtacttttctgtattttcaaaatttcactatgaattccatatagaagaataataactcacaaactgatgcacagtagttttggttatgtttgtggggtctgcatagatgtgaatagaagtagtgaactgagagtaaccaactcattcattggtgatgcagtttttcgaccgttatcgaggcagacgggtgcctgtgtgagctgggaacttggaatgctgcaattctgtgggcaggcccacttgtaagtctttgtaaaaaatactattgggttggacagacgactttcctttcttttgaatttcagttgacagtagaaagtgatctcttattacatgtttttctatcttctaagatgaaaacgattggaaaaaaaaaacagaaaaatggaaaagagctccattgtgttagaagtgcggctacctgcattttcactttgccgatcaatatttggtggtcgtggtgttttttggattagtcataatgaatacgtgaaactgattggagatcgacttactagaataacaaatagcctaattttgtgttttaattcagactttgttacctaccagaaaagaaaatatatgatttttgttgttgttgttgttgcttgttatcatttcaattttagaattggtttccgtttcttctatattgattgtt

SEQ ID NO: 95557 - DNA, 524 bp, Cannabis sativa
aatcattctatgattgcaacacctagcatagcagtcacaacgtcacaagttgtacgaagcaataagcataacatacacttttaaattgaaattttttgcttaatggaatataagtaaatcaatcaatcttgaggtatggcttcagctaggagttagttccctagactgcgtcagttttgactgggcacaggtcattttaatatgtacacatatctgggaaaaatatcaagtgttttgtgttgcttttttgtcagattatgtaaaatagttcggtgggaaaaatatcttcccctgaatcatatacttgtttaattaaacctaagaaaaatagaaggataagggaagatggtaggatgagatacaagcaggagtcagctaaaactattctacaaggagaacgtaaagcttgaacctcttttggttatgaaccagaacagcttaataaggccataataaatacagccaaaagaaagcaaatacaagaagtgattaaaaaaaattaccttttctgtatattgtcagat

SEQ ID NO: 95558 - DNA, 945 bp, Cannabis sativa
  modified_base (29)..(35): a, c, t, g, unknown or other
tccacgtgtccctgtctggttggtccacnnnnnnngggcaaaatcaggggcaacaacgtgttattaaaaaagtttaaaagttaataattgttattagttattgatcttgaatatgtattattgaaaatttaaaagttattaattgttattggttatggatcttggtcatgtgttcttgataaacttagcaagaaggggtaaaaatttaatttttataaaataatagagttttgttgtaaatattataattaaatggcttaactgttaaaaaaattataattgagacttcaatataaaaataaaattattaatattaatatctaaaaagggtcttattaaatattcaaattaaagatgaattattttaagaaattagttaattatagttaatttaattctcaagaatttttacatgttggtaacccactattataagtcaacaaaaatgtaaccatcatagttataataaaaatataaccattaaatagtcacctatattattttatatataaactgatgataacattaataataataatataatattattaaaaattttattattaatagttattttattatttcttagctactaagaaatctttaattctaggatatttggtcaactttgagtaccctaaaatactttggtatttctagaattaatttatctcaataatctcatcaatattactaactaaaactattgtgacatttttggcctccaatcgggtctccagggtcgtcgaacctaaaaatatttttatttcacaaaattacacttatttatccacttatagaaaaaatttataatttatgttaaattaggttagtaggatcataatcatacacagtattacctaattaatccataatatataataaaccttaatttttataattaggttttcgggatattacagtaggtatgggactacacagttg

SEQ ID NO: 95559 - DNA, 502 bp, Cannabis sativa
acaagctaaattgcttactagtccaatcactaaggaggatgtcaagaaagttgtttttgagatctccgggaataaagccccaggtccagatggcttttcaagttttttcttccaagataactgggacctggttggagaggatgtgtactgggcagtttcctcatttctctcttctggtaagattctcaaagagataaactcaacatttctcacaatggtacctaaagtaaagtgtcctaacactgtcaaagattttaggccaatagcttgttgcaatgttatttataagattgcaactaagatattgtgctctagaatcaaatggattctccctgatctgatctcaacatctcaaggaggattcatttaaggcaggtttatagggcacaatattatgatctgtcaggatattgtgaggcactatgggaggaaatcgaacaaggcaaactgcatgttcaaactggatcttcagaaagcgtatgatacagtggaatgggagttt

SEQ ID NO: 95560 - DNA, 545 bp, Cannabis sativa
gccttttctgtaataccatctcgttagaaataaaaactcaaagtagacgtagctccattactgtcgcgatacagggagtgaactatgaatttattgtatttctcttataattacttaacaaatattttattctcgccaactccttgtcggatgattttctttaacaagttgggtttaaaagtgtggtctccacggaaaccttcatggatctcatggataactgctctgatctccgttctgacaatacacttcaaatatgtatctaacaattctttttagtacaatcatccatccagaataacatatctaggagcctaatattaaatattcctagcgataaccctatccgttggtagctcttcaaaattgagaaattggtaaatcatgcccatctaggagatggagtggtcaatgacatttacgcttagtacttaggtacttaggacttccagatgcccaatggccacgacttcgtattgctcaatctctgaatctattgctaactttgctaacatgtacgggaaggctttctgatccctggggac

SEQ ID NO: 95561 - DNA, 581 bp, Cannabis sativa
ctgaagaggtccttgttcgcttctagataaagaagaagaggttgacgcagtgttggaggagcgcaggggccctcgtcttccaccccatgttgattaaactggtcgtttaccaccattactatcattttctcttctctttttctttgttacgtatttaatccttctcccttcttcaagataatttattttctttttcttaaggggagacacgtatggcccgtcctcaagcccttttttatctttttgaagcttttctttgggatccaaacaacttatatttatatttgaatacatatttagctcttaaatttgttaaatttggtctgtatacatttgtccgtgtgatatgcccccctgagtgacatgaaaataaatttttaggtccctcagtcttacaaaattaagttaaaggttgcatatatttttccggtacaaatttacttaacagaatataaactttattttccaactattggtaatactttcggaggtcatcgacattccaggccctaggcaccatggttgtctattcttttcagcttataggtcccggaacagattttgtcctcaatttcgtacgg

SEQ ID NO: 95562 - DNA, 1397 bp, Cannabis sativa
ttacgacatcttttaagcatttgcttcatggtaggctcatcagtttgccttttaaacatgcgatttggatggaggttttctttacttctttgagagtaagaattagggaacaaagttggtgctggtatagaggagatgagaggtggtgttgtggttacaatagcatgcatttgagattgaggaggaggtgtgtttgacagggtagtgggaggataggtggcataggggatatgaggagtgacagaagagcaaatatcagggataaatatatggtttaggttggcagtagtggagagattggaaggctttgagagagtactggtagaagagggagggaaattgggtgatgttgaagactcagagatggtcataagggaagcagtagaggtaagggccgagagatgatgagaagaggggatagtagcaggtattgaagtggaagtgtatgatgaggaaatcgaaaaagtattagtgtttggggggaaagtcgatgctggtgtagtgaatgaaagtggaggctgagtaggttggtatattggggcaggtaaagtatgtgtgggaggagtgagagaatgaatgggattcgaagtttcaccatagaaaagcactcttggttggggctgtgatctggtatgaagagttgggattgtggaagtcaacgatttacgggctaaacgagtcaaaagtggccaagcattacccttggcaaagtctgtccgatatttatcatagccagttgtaggtaattttgcccctttcatccaagggccatattcaagaatagatcatcattattaccattgtccatcctttccatgaaagcaacacatttttcaaagggatgtccaacccttccacattcaaaacaaaactcaggcaatcactcataacgaaaatccacccaaaagtcatcccgaatccttggtaaactgatcattcggccacggagaagtggtttgtccacagagattttaactcgaattctcaaaaaagggccccaaccttcatcaacagaatcctcatgaacatcaatgaattcccctatgatgttaccaagtgcagtggcaagagactttgatttgctaaggaatggtaatcggtatacttgaacccaaaatggagtactcactagattgttcattgtgacattttgtagagtacttggtgagcagaagacaattaagtggtttcggaatgccaaggttctttgttcaacacccgaaatttgtctcctgaacatccaaaagaaactttgaacaacccttcaccatattcagaaattatcacatggcatctccccttccaatgaccccccatttgatcaaagaaagtaggcggatgaacatagttctcagtgagaattcttgcaataagaatgtggctgttgttgacattgg

SEQ ID NO: 95563 - DNA, 995 bp, Cannabis sativa
tattattagtaactataatacatgtaaaaaaaattgggcacttctatagtggagacccttaaaagagacacaccaatgaacactccttctcttctcattttattggcggtttaatagatcccatattattatgttgttgctgcacacaccaaatcggtaagaagaaatatttgttcttgttctggactcatcgactgtctcctaatcgctattggtcttcagcaatgaaaggctaaatgtttgaggatttttatttactgattaaatacgaccaaatttatgtttaccattatgagtttattttgagaatatatatttctgtattttcttaaaagagaattgcattccattgtaggcacttttttttattgtttgaatacattttcagactttacctattgattccttgcccactattttctcttttttctttttccattttctttttttaaaaggatccttttccaacttttcattagttaattctggaattttaatttgaaaattgtgggtttttttatcaattgtataggatttctgattttagtagttgaaacatttcagattttgttgttgggatggagtcctaaagatttcaaatggtttcaaggtaaaggttaaaaaatagtaaaatcaatataactagcaacgaaattcaaaacaccaacaaacaagaacatcaacctctaaattaacttgatatgatttaaataaaaatggaatgacaaatagtaacagggtttaaaactttttaaaagaaaatatcgaagcaaaagaagataaacaatgcttcaatcaaggaaacatcgagattcaagaaaatccctccatgaaatatcattttgtcaacaaaacctttatttaattatcaaattaaattatttctaaaaattactgaacacaacatgttccaattaaaacattaattaaaggacacacgggtgtattctttctcagagataaagtaatcacatgtatatgcatccacattaaac

SEQ ID NO: 95564 - DNA, 978 bp, Cannabis sativa
acctctcaattagaatataatttggttgattctaaatatattcttggataaaagttctactgtataatatatttgagtaatgtccacttattatcctagatctaatctttctcttttaattttttttttttgaaacgttccattccaaccattaaaaggaagacctctaagaatggaaggaagacacaaaaaatttgtattcattcattatttgcttcatacgatacaagagaatgatcacaaaaaggatagtgagaccactaaatctggctaacagtagctaataaagtacacttagccaatgtataagttgtcatattacgagttccaagacaatgcactagactcgccgcactaaaattattaaaagacaaactaaaatcgttcaaaacaagtcctaaagaagactccaacaacaaattattattaaatttagacaccaaattaagataattggattcaaaaataacattattaaacttaaataaacaacattgagcacctacatttctaagaggcaaaaattcaatgattttaggtaagaaatctccattcaagaaccaagatgctgaaaccaacacctctccgtgatcatttcttacaatcatgcccaacccacaacacccattagccaagtccaaagcagcaccaaagttggcttttacgaagccaaaaggaggaggactccaatggataaccctctccaatcgcgtcgacaaaaagggacgctgaacagtagcaatcaactcctctccaccaaaaataacaatgactttcctttgataggcaaccaagcaatcataagcccatactatcaccaggtcaagagggatgaatttattattatgaacctatttatttctttgaaaccaaactctccctaagataactgaaattaattcaatgtgatgcttgggaagaaagtcaataaagatgtaatgcttaatagacaacatttagataaagatcctttccatt

SEQ ID NO: 95565 - DNA, 752 bp, Cannabis sativa
cttgaagttttattaggtgcatattaagaatatttgtattgagaattatgaggtttcatctcaaaattaattggtaatgagtgtagtagctcatgtttttgtatatggctcaatacttttacatttaatccatgtgggacaattttctctaatatctcccttaaaatgggggctatttttgctcactaatcttgaatcaccttatcaccttatcataaatactgtcatttgctcgcctattttttttattttgcagttgagaattctatttgctcgctcattcttgtttgtggctgagagtaccattttgctcgcttgcggctagctaactctttaataggtgtggattgaaagcctgctaaaaatatgactctgataccatgaaaatctatgtagaaacagagtgtgattgagcgagagagagaaggaactgtgagtgaaaagaatggaatgatgctcaatgattaattgattggcattgacaagtcctttatttatactgaactttgagtacaagggtagagaaaaaagcataaccaaaataacagatagaacaacttgtcgcaacagtaacaaaaaataacaaactttaactacccttatacactaataatttggaatgaattttatagagtggttttattattgtgtttgattatttttcttgaacctttttttatgttcatctaatataaaaaattttgtctactaccaagactataattaagtgaacatattatttttctattttt

SEQ ID NO: 95566 - DNA, 601 bp, Cannabis sativa
tgagttaggggttggtattatatagtgttttattaccggtgaggcccgccggtgttaataagggttccaccgaaaagaatttttgactaataccggtgaaacccacctctaataatccgctggtattagttatttcaaattttgggcggtcaaaatcccgcccaaagtattagaggcggatttaatttacgccagtaatactctatatccgttggtattaatattattaattaaatatttattttcttaattattaaaaaatattaccggcgaaatatcttttttgccggtaataactccatttataccgacggtttgactccgccggtattgaaccaaattcttgtagtgttaagacttctaagctatttttccaattttttttaatcttgattgaatgatgacttcacttttttttttttgggctgaagaatcatgacatgtaatcgaaatatttgatattcacacaagtaaatacattaatttatcttgcaagtgtaaattgtaatgaatggagtaaagctgtatatataattgcctaattggctcttcaaatgggaaaaccaaacaatatcaaataaataaatcaatattaaaagta

SEQ ID NO: 95567 - DNA, 862 bp, Cannabis sativa
ttttctcttttaaaattatacatttttttttactgattttgaaaaataccacattttttctaacataagggcccaaattttttttctcatgtggcccactttgtttgagggccgaccctgcctccaggttacacatgacatcaatctggacactgggtgagtggaaaaacgtgatgaggatgtattttttgatggctaagtaatattttgatatcacttagtcaattcctttgttctattaaagttgcaccagttctcagatatgtggttgtttcgtggaatcgggaaactcgaaactactcaatttttatattgaattttttctaaagttcaaacaccaaaatgtcttatttatattatactagctagttaatcaataaaaaataaaaataaataacaatatcaaaagataataaatgttgaataatactgcgtgaagtgcgacttaattccctaatttattaatatataaatttaaaatttaaatacaattaaatatttatgattaaaataaataatatattaaataataaaatgtaggactagtgtaacaatatttaggattgcttcatgttagagtacttttagaagtaaaattgtaagtaatgtatgtaagaaagaattaacattttatattttaagatgaattggaaattattgataccaaatcaagccgatgcattgttgatgctcaaatagactcttttagaatagagaaatgctaaaagatattagtagtgcttagtattttgttatgtataaatatcgctactagtccaactaagtatcgagtctcatatagtctaatataaaaaaaatactacaagtctatacgtctaaaaggtactaaacaccattagta

SEQ ID NO: 95568 - DNA, 1184 bp, Cannabis sativa
aaataaaaaagttagaaatttcaatatttatgtaaaaatccaaaattttataatatttattaaaaacctaattagatatactatttatttattttggtattctgaaaagttttttaatttattttattttttataattaggtaacaatatagttattttatgtatgtcgttggttgaaccgataggggctctggcaaaagataccccacggcctcgtaagccctcgaggcaaggcgaaaaggatccgttgagaacgaaatagtgtttgtgtccaaagggccgctggcggcctaaaatcaaaggcgcttttaaatatttatttatttatttttaagagatattttatatattatttggattttacgttggtatactttttattaattttattaacttatttctataatgatatttgtggtagtcataatagattctttaaatatttttataaactctccaaataatttagcatgtttaagttatggttcaaacaatttgttgtatacatacttattattttgtagaagagtagaaaaataattgcattgaatcttaagttcgatactataaattatttaaattttttaaaatttttagtggagacatattatttttacaattaataccattataaaaaatctaaaaaatatatttaaatattttaattaaagttacatttgtgatatatttcattagcgcatatacttatgtaaatgtgtatgtgtgagttttattccattttttattttatgttataaaattctagaattaaaattacattacaataaatacatatatatatataaagtattttgcttgataattgtggaatataataaaatttatattgtgtaataacattgagtatcttttaaaaatattttttttattattattaaggttttttttattttaattttaaagttttagaaactttttatttgtgtttggtctctaataataattgtgcaataataaaaaacttacatatatttaaaatattttgcttaatatgagtgagaaatttatttattccttaattttcaacgttcaatatattggtcatatggtaagagagttccaattgtacaattaatatataatttacattggttatatttttaattattgaaagtataagaaaagtctcaaatatattattaattgttataaaataatataaa

SEQ ID NO: 95569 - DNA, 715 bp, Cannabis sativa
aaaaatgaaaatttatcatgaatgtatatggtatattgtcataattttttattttattaatttatgttttacttttttggggattattttttaataaatatgttactacattactcaagatgttaattcatgataatttgtcaagtcattgctcaaaaaaaaaatataagtaaatagattacaaagactaatttttgttttacttttaattagttattttattatttcttcgtacaccatttttttcttactttcagcattataagaaaaagttaaagaatattttttttatttattaaccaaatttatttttaaataaaatttaatttaaatatacttctttttattagtattgtatttaaaatattctcacacactcacataactaagacatatataatttcaaatataatagatttgtattctttaaatggatgtgtaagtttgtgagaaagtttaagtaaaattttaattagataaaaatgaaaaatatggtgaagtaaggataaaattgatagaataattaaaataaagaagtaatcataaaagattttgaaaaaaaaaaaaaaaaattaaaaacattaaattaaaagagatatataatgtaatttttttcttacaatttagtcatatcaatataaaatcatttatctaatatcacaatatatttctctcatcatttttattattatcatcacatttctttcacatattt

SEQ ID NO: 95570 - DNA, 569 bp, Cannabis sativa
tgcaagcttctcctacttctctttcggactggggaatgataattcaggaaattcttatgttgcagaaacattttactttcgttcaattttcctttgttcataaagaatgttatgctgtggctaatgccttagctatttggagtcgtaagactcagtcttgtaatttgtggacaattgatttgcccgattgtgctgctacccttttgttggtagagaagcctcttgtggctgtttaataaaagcaattttctcaaaaaaaaataaataaataaattaatgtatttttacgtaccaaatataattgagattattaagaaatacgttctttagttatattttctttttatcaaaagttcaagtatttctttttcaaatacaaacatacagcaaatttcgattatactacactggttagattaggggtctccatcgaacttctcaaatcgctcgtactgtactgcaaacaaaaaatagattgaaattttttgcggtgcggtcgcgatttgaatttttcttaaaccgcgcggtgcagtacggtttgcggattgcgattttaaattgttaatatg

SEQ ID NO: 95571 - DNA, 705 bp, Cannabis sativa
ttagaattgggggttaattgcaaatacctgaccacttaagggggttatgccgcaaataacccaaaaaaaaatacatttcatcactttgatcacaatatatgctcttgaaaaaagagtaatgtcgttttcttataatgtccattgattggcagttctaatcaagaaaattaacaattaattgttgagaaattactacacacagcaccataataaacaacaacaaatcatactcatcttaactaagatcaaacatttaattttaaagtattaacacatacctctagtctgacattgatctccaatagccatactgattacacttttatttataagagtaactgttaaaaattagagaaaaaaaataaaagacaaaaataaaaagtgtacgttgattacacttttttgatctacacataaaaatagagcttgtgtgttctatttttctatcacagccacacttattcaacattaattaattatagactaattgtatctacatgtttaatgtgaaaaaattagtttgtcttggctctaataagttgatcaaagatattttagagcttgtctatgagttccgaaagtgttagtacgaatgtctattctatcttattataacccgatgataatactatacattaccaattatataattatcattatatatattaatactattaatcatgaataaacaacacataattaaat

SEQ ID NO: 95572 - DNA, 737 bp, Cannabis sativa
gttcgtggaacacaggatttgaggaaatctgaggagcagcttgattatcacaccacaactttgttggaatagaagtcttaaacccgaattcagtcaaaaactgaaaaatccatattacctcacacacagattgtgccatagctctatatcctgattcagcactggatctagatacaacattttgtttcttactcttccaagagagattgtccccaataaatacacaatatcctgaagtggatcgtctgtctaccttggagcctgcccaatctgcatcagagaaacactcaatccgggtatgtccatgatccttgaaaactataccatgtcctggtgctcctttcaagtaacataaaatttgctctagcgtcgcccaatgatgaattgttggagaagacataaactgactaatgacactaactgggaatgcaatttctggatgagtcacagatagattattcaactttccaaccaatctgcgatatttctcaggatcttcaaatggttccccgtcacgtgttagatgctcagttggattcattgaagcattacaaggttttgctcccaattttcatgtctcgggtaataaatcaagtacatacttcctttgaaacagaaaaatgccttgttgactccgagtaacttcaatacctaagaaatacttgagctcccctaagtccttcgtgtgaaactgggtatgaatgaaagacttaaagggatgagatgccttcagtatc

SEQ ID NO: 95573 - DNA, 851 bp, Cannabis sativa
gttgggttgggttgggttgtagaagaaagaaaggttttgatatgttaagattcatatataggagagaattaaacatatgtatactataatgtcctatagctagctatgcctaatattgtattggtgatcgcttttgatggacaatccatgcaataattaaggtaatatattatatcttttatataagtttaatggtattttttgatttttttctttaactttaacacaatatattaaaacaaaaattatatgtataatttatataaaaaaaaaattaatctaaatttaaaataattaaaatattgtagatacttttaattacatttttgattttattaatttaattttgaattaaaataagagacaatttcgttcaatcaaatacaataaaaaatgtatacatataaatatatctaaaatgcacgctaatatatctgcaatagcaaaaaaaaaaaatttttttaaaaaaactaattatacatatatagataatatcaacctaatataaatatatatatatatatataaatccacacacaataatatttggcagcctatatataaaatgtaattggaatggattgtaggtatagttaaggtagctatcgttcattttgcagtacaatagatctgatgtgagcacgtgtgcatgtcttgagctggcaatggtaatgacatatatattgcaccataccacttttagttttataccatactatactttattattttggcttccatcggaatgacatgatgagggccctatctatctatctatctatctaacttcattttgagtcttgagttgtgtcaaaaggataaacctagctactatctgtcaaaagggtttg

SEQ ID NO: 95574 - DNA, 528 bp, Cannabis sativa
tccgtaaaaatacaaaaaaaaatgaaaaaaaaaaatgaagtgtaaaaataaaaaaaaaaaaattccttaattttaagtaattataatatgtaccattattgaaaataaaataaaaaaaaataaaataacactctttaaatgagaaaataaataaaatatctactaaaacaatacttgaatgagtgtactatagtcttaccaaaattaattagtgatataaaggtggaaactcatgtatgttagttttttatttcgaaataataataataatgtatttttttttttttgacaatataataataataatgtatgttaattgctttttaacatttttttgctaaaatagttgctttttaaatttatgaagagacacttagcaacttttcaacgatgtgacccaaaccaagaagagagtacaatatcgagattgaggtgcacatgatcataatatataatcttttttcatgcagtaatataccccaaattcattcatacctgttattattttcctcgatttgtaagagagat

SEQ ID NO: 95575 - DNA, 619 bp, Cannabis sativa
agaaaatcgctgaaaatagaatttcagaaaaagtaccccaaaaaatggtaggttgtttctaagcaaacgaccgaccatttttctgggttttttgcctagaaaaatggtaggttgttatactagaaacgacctccctttttacagcatgttttcccaaaaattccaaagttacctcaattcgaatccaaaccttcccaaactttcaaaaacacctaacttaggtccaataatcatatttcaacaaataaaagcatccacaaaactctgaatcaaaattttccataaaaaaaccaagttggagcttgaaagctcaaaccttgcccaagcctaacagcaaccaccaaaaacccattaatcaacataagcaatttagatattacactagaaataaactctaggcaacccaagttcgaacagaagctacaaccccaaaatcacaaattaaacctaactttaaactcaacgaaaatcaaagagaagcaaaaaggatcttaccttgagttgaacctagctctaacgtaacgccctaaataattaggaacactacccaaaatacttttgaaaccctaatcccctaactggaattactaaccaaaatggcacggaatttaaactttta

SEQ ID NO: 95576 - DNA, 1563 bp, Cannabis sativa
aattttctcttcaaatgtcatttagtatatataaaaggatgcataaaattaattaatgttatataattatgtgttaatatgtaagttaattaaatttcatgatgaatttattaattgctctcataatttaataataatcttacatttctggctagctagcttcaattgaaaaacatcatattatacatcagtgttaggtattattcatgtcctttagcatttctcatttactcatatattatagagcattgttatgggataccaaaatatctaatactattacgaggtgacgtcctataatatttaattaattaattaagggttctctataatctttatttaaataaaatatgtgagagactcaatattaaattacacttaataatcatattacatattacaaggatagtaggcatcattgggtgactttagcatttgtccatattatatatatgtttctgttgcttagtagttcgtacacaaacgttccttagtccttacaaggtttggtagtagttaaaagcatgaaatctccaaaaactgtattttattatatatataattaaataaggtaatagaaaatagaaaggatcagttgaaaaaaaaagtaagaaatgaaaatctccaaaaaattgtattatatatatttatattgtggagcaacgtacgtactatttgggagatgattgataatgataatattaacactgtgatcaccaaggtacatttgagaatcagctttccatgcttgatcttctctagaattctctctctcttttcatatatatataaatgttgcaatatgaattaattaaagaagtaggatcatgcgtatatatatatatacccacatgaacatgatgatatgtattttatactacatataaccaaattattggtgacgaaaataatgagcagtacaactggcttctggctctctaataatttgataaatgtagctcaaattaaaaaatttaattggttgtgcatacaggattcccacaaaataaggttgagtacaagtaacagtttcatttattttttttaagtagtgcattagtattattattataaaaaaaataatatcaataattgtgatgaattttgttttgttattttgtatacacatgtctcgtataggaagtttgcttctatcattggtttgtttgttatgagactcatgtggaagtactcatcataatgagtactcctttaattatatattcatatatataaattactagtttttatatgtgttaataaaaggaagaaagttgtataaatggataggataaaactgttgaaactaataagaatgtcttgttgagaatttggatcgatcccaatgtaatgtgcatgataccacaatctgcttagacctgaagattcgccagcttttagttaataaattaaatggccttggatcacgtgatccatatgttttcttctttaatctttacgtaaaatgcacgtgcccacactctttccacatctgaaatctttcttttctttttatttttggtttcatatatatgttgatcgatcacctatatatatatatat

SEQ ID NO: 95577 - DNA, 525 bp, Cannabis sativa
ataggagcaaaggcttttgatagggtagaattactttgaaactctgttttcatggaaaaaatggggtttcacatcaggtggataaaagcaataatgaaatgcttgtccacaactaagctctctcttcttctaaatggcgaaattgttggctttgttactccaacaagaggcttaagggaaggggatccattgtcaccatatttattcttgattttttctgagggtttatcacgattgttacaatatgagaaacaagttagacatctttaaggcttctcactcactcaacgtcctcccctagtaaaatacttattattttttgctgatgataatttgctcctttaccaagtaactagataatcttgccaagctattaaaagagctttagactattatcaccgagtgttgggctagcaacttaataaagacaatcgaaaatgtccttttgttagaaattattttatcagatctagatttactaacacatatgtttgattataatctataatctaacactctaaatat

SEQ ID NO: 95578 - DNA, 996 bp, Cannabis sativa
ttctatttcaatttatgttattttttaactttgcttctcaactttgacatgtattaaattatgccctgaattttttcaagttattaaaaattttgcttcaactattgagattgttggatttaaagacttttatctaattttactaaagtaagtctaacgtagatacactaaaaaaaaaaaaaaaagtctaacgtagatgaacttttaggaagcacaattcggtacatattaaaatttggagcacaatttagtatatggacaattaccatattagcaaaattgaataattagataaaaaattttaaatctagcaatctcaatagtttaaatgagatttttaacgacctaaaaagttcaggggcataatctagtatatgtctaagttcagaggacaaaaatcttgataaatcttctgattatataaaataaaaaaaactgtgcgcctcatcacgagattactactaagagtgtgtataaattgatccaatccaataacaactaactgatccaataataattaactgccaaaaattaaatatccaattgtgatcagatcagattaaatgttattttttaatatccattagatcagatcagatgttagatagatagagcgtctaagaattcaatacatctaaaatttaatcaaactaattaatattattatttagtttgtataaataattaaattttatattgtcattcgtaaaatttatatgcatatacaaaaattaatattaaaatgttatatattttttttattaaataatagacttaaaaaaagtttaaatattagatatattcgatccgattcaaaaaaatattaagtctaaaatattcgataacgttgaattaaattactaactatttacggaatacatccaataaataaaatcgatgcaatataatattattcaattatatcagatggattaaataattaaaattaattagattagatcctataataaaatttaggctaattaataatttttt

SEQ ID NO: 95579 - DNA, 623 bp, Cannabis sativa
gcgacctcgtggggagaaggagcattccatccttgggaagcgtagaggacgaagagggcggataaatacttgaagcttttaggagtaatttgggccgggcagtgaccaaagaagtctgccacatccctgaagtatttttgcaagggcatcagcgctccttgcttgccgtgggcccctgaccaggtgcacatccccttatcagggtttgtggcgcgattgtcatgggcgggaatgtagcagtccagcttgccgagatacccgtcctggtcgagagttcgaaggcgtgcctccgaaatcttggacggaggacttacccacctggcacccaaggcaccctgcctcctatgaggaactgcctcagcaagctcctcactgacgtagtccacaccctcaaccacgacgtctttatcagcatcgactggctggccagcctcgttgtactccttaaagtttaggggttcaacctcttactctccccccgcctcggaaggactgcccggacgcgcctcgtccagctcttcaacttcctggaccgcagcgtccccctcacgatcctcctccatcgggacggccgaatcctgttcggcgtcgggcagagtggcaagccgagccacttgaggatc

SEQ ID NO: 95580 - DNA, 508 bp, Cannabis sativa
ctaagtgcgtgcacaattaattcatgcataatcataatggtcgaaagatttgcatgaatgagggataccttaggaaaattggacagtaaattaataaatacatcaaatagagagcctaaatcattacagaaagaaaacctcttaaaaaaggcagagaacaaatctaaacaatcagctcaaaagaaatgagagagagtctaattcctgcaaccaatccaatgcaaccatcattaaggcaacaacttccacttgaattactctgagaaatccttaagtccatctcaacccaactaagaaagcaagaactgttgctagaaaagttgatacctagaccaaaaatatcaaataaataaatttaattagtaacttaataaataaacgttaaaaatataacaattttaaaattatgacatataaattaatagtatagtaaaatttgaagaaagataattgtaataaaacttatcttttgaagtccttgcatcttcaccaagtgagtaaaataaaa

SEQ ID NO: 95581 - DNA, 681 bp, Cannabis sativa
  modified_base (473)..(479): a, c, t, g, unknown or other
  modified_base (646)..(647): a, c, t, g, unknown or other
tgtttacattttttgtatctgttcgtgttaaaaattttcttcaaaaattaagttcagggtcctatttttatcattttaattataattgaattcactaattaataaaataataattgtttatgattatagaatatatatgtatatatgtgagcttattgttttagtccccaattttttttttataatcatatacatcatagttatttgagaaattttttaaaattttgaaaaatttagaataattttcaatataaaacagtattcaaataatttatttcatacgtgcatggaataaaagaatcatgagtggatcagactatttgaatggcttgttaaatttttttaaatttctcaaaattttacaggatgtcttaatttactacaacgtatacaacaatgaaatgggtaaataccattttggaccttgtattttgcaaaagttaccaattagaccctctgttttgttaaatgannnnnnngaccctatatttttcaaaatgataaaaatagaatactgagctcaattttcaataattttatttttttaacataaccaactataagacaatttttaatacgaacatatacagaaaatcaaattagttatatcataacatctctagatcagattattattaagttttannttgacaaaaaattagttcatggtcctatttgtac

SEQ ID NO: 95582 - DNA, 644 bp, Cannabis sativa
  modified_base (592)..(601): a, c, t, g, unknown or other
aatgcaacaaccagaaggctatgtggaaaagggaaaagaagatcatgtttgcttgctaaaaaggtaattatatgggctaaaacaatctcctaggcagtggtacaaaagattcgatgatttcattaccaaatcagggttcaagaaaagtgcctatgactgttgtgtgtatgtcaaatcatccaatactaagagtactgttttcttactcttatatgtggatgatatgctaatagcaagaaaacacatgagtgagataaaaaaaaagtaaaagacatgctaagctctgaatttgaaatgaaggatctcgggcatgccaagaagattctaggcattgagatactcagagatagacagggaagaaggctgatgctatctcagaaggactacatttcaagggtgctgcagaagtttggtttctcagaagttaaatcagtgagcacacctatgacacacatgacaaagttatctcactcacaagctctaactacataatctgaactcaacaacataagaaacataacctactccaacctggtggaaagtctgatgtacatcatggtgtgcaccagacctgatttgagccaagcagtannnnnnnnnngcaggtttatgggaaacccagggatagaacattggaaggcagc

SEQ ID NO: 95583 - DNA, 697 bp, Cannabis sativa
agtaaattgatagttgagggggttttgccgcaaattactctttaaattaccaattcttagagacaaactaaatctctttaaaacgagtttgaggggttgttaattatcttaattagtttggcaaagccacagaaatagtagatcaatggcagagaaaggcaagaagctaaaatctctgctacttctaaactatttaagaatctcctaaaaattgaaaagcaaaaaatgatggtcgaaccactcaacaactacttacacacatatgttgaagagcctaactttcctcacattacccccaacaaatcacatatcgatataaaaataattttattacacttgatagaataaaaatcagctgctttagtttgttattttttcagcttataaatcatgttgagtataatttaatctctctctctctctctctctctcaacaaaccatatggaataagcaaacacagtaactaaccaaacaagaacaaagaagaatgttgggccatacaattgccttcggcgcatcgaagcttctccacgtccatggcttcctccatttctctcacactgttccatcttcttctattctattttgttgttataatttggaataagaaaggcccagaagatctctattggcccaaaagcccaatcctatgtatctgggccaatgccaaggactgaagccccaattatataggga

SEQ ID NO: 95584 - DNA, 624 bp, Cannabis sativa
aaatgtaataattaatattaatattaatattaatacatataaatttgaaacgtgacacgtgtcagatatctggagggccatgatgatttattgatttaatcacgtaccatcaccaacatcaacaatggaaatgaccttttagcttcctctctctctctctctctactttctctctcctctgctaccaaaccactagtactactactactcatggtggtcagatcatggtctcactcactctactctcagtaatccgccatttttatgcttcttctactctggtaacaacctctcgtaacacgcctttatcttttatcttcatcattgttttccttcaaatttatatattgttattcttattgtttggctcccaagaaaatcatgcttaacactttaatttctcagaatatcatatcattatttcaccacaagcatcttttataatcgatgatcgatcactgtttttttggcagttagagtacgctcttctcattcatctgccatttttatttatgctttttctcttctgctaacgagctttaataagacgcaggcagggcgttgagttgtttggttcgtaagaacatggtgctttacttttcatttctagttttctcggaaaat

SEQ ID NO: 95585 - DNA, 830 bp, Cannabis sativa
aactgttgcagatgtttccttgggttcaatgtattttggaaatgtattatggaattacaagaatttatgactctaatgcatgatttaaggagtagaggatacaccatcagaactgttgcagatgtttccttgggcaacgagtggaatccggagttgattttacaaatctttggcacagaaatgggtaatcgtatcttatctataccaagaattccttccccatttaaagaccaggtgttttggaaacaatctcagaatggccacttctctgtaaagacagcttataatgtggatcaatcttggaggttcgaacctgtcaaagaaatttggaaatggatttgggggagtggtattcatcctagaaattcagttctgctttggaggattctaaatgatgcgataccaacaaaaagtcgactgcacttcttgcctgacaaagtttgcgacttgtgtgatgctggtattgagaaccctttgcacctgttttgtaggtgtaatttctctaggtccatatggtttggaggcagtaagcacattaggataggggatatccttggagaaacattatcggaagtcttggaaaatctgatgctccactgcaaagatttaccagatggaaggaatagagttgagatacttaattatactggttgtattttctctgcaatttggcatcagcggaacaatttctacattcaaaatgtggttgtcaatcctgagatggccttggcaaaggctgaaaaggagtttttggagatgaagttggtgtctcggcttaacaagagaggtcaggagatgggaattcaatccgagggaggactgactaggga

SEQ ID NO: 95586 - DNA, 522 bp, Cannabis sativa
taatacaatcaagaaataatatatcaagaggtctcaagattcaagtaatgaaataagcagtaaaacaggaaaaaaaaaataacatcaaatttaacgagtacgatgttcaagctatgtgcaatgcaatacatctcggttggaacatcaacaaccatatttatagctataaatagatttacaatgttaccaaaaatatctcttaaatcattgtggcacatttataccgctttaaatgatccaattcattaccagcaacaaaaaattcacttcatcttcaaatatgcatttttagtacgaacaatttgaaagctctataagcacacaagccttccaaatacgtacaagatttcattctcagatgaaccttcaagactggcagtaaactgtttgggagtgtacctccggattaataacaagctatctaggagagacattccgtacaaggtataaacttatctggaagtaccttccgaattctaccagatcttctgcacatgactttctggatccacactaagtttt

SEQ ID NO: 95587 - DNA, 649 bp, Cannabis sativa
tttaatcttcttctcagtggtttcatgatgtcgagagtgattctcatcctaagataatccctccaaactccaataaaattcttaggatcactttcaaggaacttacctatagtattgcccactccacgaactgtcgaatctgtcatacaccctggttgaacatcatggatttgaacccaaatatcaagagtattcaactccaatgtcttaggatcccctccaactggcaatctttcaatgattaattgcatccgatcataagtccatggactcccctcaatgactcttttgatgtccaattcatggtaaaattgaaaaagaaatctatttgcatcaagttgtttaacgaacattcccattcctggctgccaaagagacgctagtatattctgcattttatcataatcgatgattcggttagataaaaatctcccaactaagtaccacctatcatctatacattcattgtctccttccccactcacggcaaaggcttccaactcttcctcttcaatctggaaatcaaaaacatctcctactgcctcccccgtatttccactgctagatgccataacactcgacagaaaaaaaaactgatttgaacgaacttttaagaaaatcaaacactcataacactcaaaccatgtca

SEQ ID NO: 95588 - DNA, 702 bp, Cannabis sativa
ctcgctcaattaatatccaaattaatatccaaaaaaaaaaaatatccaaaaaaaaaaaatatccaaaaaaaaaaaaattaaatactattttaatctggatattacatgggcgcatcatttttgttcctaatggtaggacgtttctagcgtttaaataaattataattaaaatatttttatatgaatgtgtatattaaggttatagaagatattctacttattaaaaaaaatagaataatttatagtatcgaaataaagtttaaacattcaattgtacttgcacgtgtgcaaaaaagaaataaacatgtgtgaaattgaatgtttgaactctattttcgagagtataaactattaataaatttttaaaaaaaaataaataaataggaaacttacaataactagatcatcatatgaaaaaatattaaattataatatcttcaaatactaaaaacataaataaattggtaacctagctactatagtcttgtaccatattctttaggatctcacccaaaaattatgtaaataatttttcttagagtgaaaaagaatttgtgttggtagaagagaaaataaagatgaaaagaaggaagtaaaaatagacaagaccacaataaattaaagaaaaaattattttaccaaaatatacttatcaccaaagatattaaatattatttctaaattttatattttaattattat

SEQ ID NO: 95589 - DNA, 829 bp, Cannabis sativa
cctagtgatgtaagaagaaatcacattcgatatcactgggtcaaagttcatgatgtagttcgtgatgctctcaaatcagttacctcggaaaggaattggtttcctctgtctaagtatgcaaagaatggagaattgcctaaaggtgacctcaaagatgttgttgcaatttcgttacgtaatgattttacagagaagcttcttgacaaattggcatgcccagaacttgtttcattcattgatgactttagagatgaaaaatgccttatggatagcttttttgaagacacaaaaatactaagagttctgaagttaacaaatgttgatctgcactcaccaccttcatcctttagttgtctacttgagagtctcgaaactttttgtctaaactattgtgacttagaagacacaacatttctcggaagtttcaagaaattaaaatgtctagatctttcacggtctagatttaaatcattgtcaaaacaggtgggtcagctaactcatctacaattgttaaatttgaatgattgcaaagatcttaaggtgattgaacctgatgttatctcaagcttgaaaaatttagaagagttgaacatgagagatgtgaagatagcatgggaggttgaaaaagtcagcagtgaaagaagtaatgtcagtcttgcagagctaaagaatttgccctggctgaacacattatatttggaaatccaaaatgatacttgtttgtcaaaagatttcatctctagaaacatgaagaggtatcaaataactgtaggtgaacttcacttttacttcacttacaattacccatatccaagagtcctgatgttgg

SEQ ID NO: 95590 - DNA, 2111 bp, Cannabis sativa
tccccccaaactttatggactctttgagttgtgggagcttacagtcctcttctaactctcaaaaataagtttacaacacatggacggatatattccgggagctgtcattaattaaagaaccaaaaaatgaaggtacaatgggtgtggcacacatgcgacacctttaatgctttcgttgataacaggcacatgtaggagcacgtagttttaatgatggcaggtcaattgaaatgatccttatttaatacatgcggtactcgaggtgggcaatgatgaaaaataaacactctaagcatgttttaaatgccatattttcaacttcccatccgtcagatcacatcaagttttttggagagagaatccagaccattcatttcaagttgcaaggattcagtcgaagtataaatacacttatcaaacccattttctctttttttacaacctcagactttttgaatactttgtcttcaaactcaaagccagagctcttgttctacagaaaacctttaatcttgctaccatttccaatggtgaatgcaagaagttttcgattacctgattccatatttcttaaaagttcatttagcttgatttctagatgcaaagttggtaagccccaaaatactccaccccagctggacgaggactttgacgttcaagtggatatcgatcgcgtgattgactggatacacaacttttgggcagattttcagaataacctttcattttccactcacaaaacaagtaagtatccaaacgctttgttgaatctcactattctattacatatatatgataggatagaatagaaatacttagttcaagctaggtctaagatatatgtggatgataaaatggtctctatagaatttacatttctaggatagaatcatgttaaaattatttctccaggggagtgctggtattgtccatagttagggtatgaccgctgaactttatagacttttgcatgcagttagggttctgaatttagggtttgaacaaggaatgatgaactttatagacttttgtatgcagttggggttctgaatttagggttctggtaatttttcttctgggttctcgatcatttagtttgagtcgccaggcgagaaaatgcttttggaataaggaatcattgaggactactccaagaaatttttgtggcggccttcctcgatacaaagattgtcattttgatattgggtgtctaattgctttgtttttcttttcgcttcgtttttctagtgatggatttgaatgtggatttcaatcttagtgcggtgaacattaaggaaaacccgatagtttcccttggagaaggagtggcttctgaagaaatttcggcagatgctggagaattagaataggacactggaagctatactagaggttgctccatctgggatagttgcaaaaacaaaaggaaagaggaaagccaaaaccttgcctcctatgcctatatttaatccttccatctgggagatagatcaaaaaatcaatagctttcataagttattgtgaagatgtttgccaccaaagtaggattgcaaaacaatccaaggctgatgttgcataggttatctgtcgcagaagaatcgtcttccatgagcacagacgggttcaacgcttggagcggggcccatatttggagtgaggcaaaccaccccttaagggcctacttcgtagagttcattgcacaaattgggatagtacccttcctatttatacctctggcttacaagctcctaggtggatggtacatcttctacaagatcaataagttggacgtgcctacaccggaggaaattctatacttttattgtgtgaagccccacccaaagtgcaccaactgcaagaaggttaggttttacaagcaggaaaagtacatatatgcacattgccccactagctacagttaacgctcccatgaccttcaagaatatatgttcatttcccctggttttccagtgaagaaggtgccttccctccaactaagcttccaaattccaggtaaatatttttttttttttgataaatcaggacattatattgcacaaacattatttacaaactaaaggcacccaaatcgggcccaatcaatctataca

SEQ ID NO: 95591 - DNA, 503 bp, Cannabis sativa
ctggtaacaaaaccaccataataataagaccaaccaaggtagtactgcatagtgtaaaggaccccatttattttcttatatatatatgatgattttctacacaaaacaaattgaagatgataatataaatgagagcacaaggaataaggttataggtggaagagtttatgaatttggagttggttgatagaaaaagatagaagtaacatgtatttatagtagaaagagagaaagagatagtaattaataataggctttggtgggatggtgtgaggtggctgctatacagaacttcataactaattaaaagggcttagacggctcaacattagattagagtggtgatgtgtacgtccacttgtacacataattattcgtagaccatttctattgggcaccatgcccaacactttttaattagccatattatttttaaaaactattttattaaggtaccgtttggtaacacttttttaatcagttttctgtttttaaaagtagaa

SEQ ID NO: 95592 - DNA, 1967 bp, Cannabis sativa
agatgaagaaagtcgacatatttaggtatttttccttcataattttactccacaagcaattgttgtcaatcgagaccttctattcccacttgacaagaaaggatttgttcatggtttcaattttcttcagcctaagacctttttcaacttttggctaacataggatatgccaagcaatcgaatgtaattttcttttacctagttcgtctccccaccaaaagtttctcagagcttgatcaatcttcttcatggtaaagctcaggatggcatcagaggataagacatagttagccagcgaggagcccacaggttgaatcaaataaatgtgcccaaccttagataggaattttgtcttccaaacatgcattcttcttaaaacacagtcaattaaatagttggtgtaacgactctattgttgggatttataccctaaaagtaagtaattagtgggtaatatattagagaatatatgaaatgtaaaatataattaataaatatctaaaaatttcttgttcatatggagaatgtataatcttgtaaggatgtacaagagaattaagattatacgatatgaataaaacaagtcagtagtgtattaaactaatggaaatctttagtatggaactgctagtgtcattgatgaaagaagacaagtgataaaactagaaaaatgtctaacaatctcaacaacactagctccaacttccttccaatggttgatgtaaaacgcgacatgcatcccacctgggccaagggccttatcacaacccataaagttgatggacttccgaatttcatcatcatttggtagctcatttaacagattttcttgtagatccgaaagagtataaggaaaggacaatcctgagggaataggtgtatgattggcttgtctcttcaaagtactggagaacctttctaaaaaaaggaagtttatttcctaagaagaatttatccaccttctatcagcatctttgaaaaattagataagattcctacgacatcttataacagtggatgccataataaattttgagcacctattcccatgttgaagccatgagactttggatttttgcctccaatgtatctcttctttaagtaaagcttcatcgagatgcgctttagcaagctcaatatcagacctattaaattgatcttcaatttcacattcaacagattttccttagcaacttgcacttgcttagagacatccaaaaaaatgatgcttattctatttggataaagccactttaattttcctcaatttttggtgaaattaagcatgggatctcaatgaagatgtccaactaaagcttgtttcaccacccagtagcatgtttggtcacgagcccacatatttttatatttaaaggagccattgcctctaattccacttgtagtatccaaaaaaataggtttgtggtctgaaactgtagagactaagtgcttgacaatagcacggggaaggagcattcgctagtccattgaagctaaagctctatctagttcagttatttttaaagaaggggacgacccttgtcctcttgcattcttgcaccaagtaacttttggacctaaaaaactgagatcaatcaatcccacctgattcaccatttgacgaagatcaaaataatacctagaagtgttgcctaagttggaatagttaatacattcatcatctcttaaggtaccattcaaatttccaattaaaataattagattggaagattctagacaaagattctccacattattctagaatatttccttattactgcccaggggaggtccataagaggcaaaaatatgccatgaattttctagagggtctgattagacagtttgaatgatcaaatttttagaaatattcttgatagagcattttacctcaatttctcaacatagaccaaagccccaagagagattaattgggggacaataagcatagtcataaaaataaagtt

SEQ ID NO: 95593 - DNA, 762 bp, Cannabis sativa
gtaaatgactgactctgtctgtgtctctgtgtgtgtggatgaagatgacgataacgaagtggtgattggactgcttatccttctccactctcctcttttgcctattattttttataaaataattaaaaatagtcatcttattatacatcttatttatttattttttaattttaaaaaaatgttaaaataaaataaaattatatatgaactaatttcataaatacttaaaataattaaaaaaaaattagaaaaatatggctacacagaattttaaatatttttttattttttaaattttatttataaaaaatataaacttttatgttttcataaaatttttgcgtgtattcttattattattgcttttattattatttgtatattatttttagagtaatttgcagcataaatacataagtttaactctcgattgtaaataaatacctaagtttaatttttgacggtagtaataagtctgcaagtacctgaccgttaaatgttaagtcattatccacgtgtcattttcttattgatatatataaattaatttttttaagaaataaaaattcatgacttagaccaatcaatgatacaatttacttatcatttaacaaatgagtacctacatgagttacgaaaatataacttaattgccgccaaatattaaacttagatatatatttgtaattaggagttaaacttaagtatttatacccagtggcggacccagaatttaattggagggtgggcgtaaattttttt

SEQ ID NO: 95594 - DNA, 547 bp, Cannabis sativa
caaagaaatgaaaagaaagctcatggaagatgccatgtcatcatgcctaacaatagaattgtataaatatataaatatatatgattaaagatgtaactagattaataatcttctataataaatttctaacatttaaatattttatatttagaataaaattagttataataagtatataattaaaataaattaatttttcaattaatgttttttaataaaactctttcaataattaatatttataataatttttttttatataagtccctactataattgttttatcagaaagaatatttaattataatatttacaataaaaattcttattttatttatagaagttaaacttataccctttgtaaataaatttattaaataattaattaattttcaaaaatatatttagctaagtagaaaaaaaaataatatcccaataaggttttagtaaaggataattacataaggcactattttttgtaaaaaaattatatttttacgtttaaagaatttgttttacatttttacggttttctatagaaacaaca

SEQ ID NO: 95595 - DNA, 2220 bp, Cannabis sativa
ttatatttatatattgtagttttacttatagtgtcaagcaccacaataaaatatcgttatatagagggtcggctcaaaaaaaatatgtatattttttaaatgatattttttttatttgagctcctaaaatgagtgggctctaagtgcatcctggttatataattagttaacaattttatgatatttattaaagtaaaataattaagacccaatattaaattgtacgaataacaatattataccttatcaaaatactaacacccttattggttaccctttagcatttatgttatgtatttaataatgaaatatgaattcaaatatcctcggtcgcacggacttgtgagaatgatccagtgtggtcgggtatcactctgcccaatggggtcggtcactgtggattctttaactgtttttggtatgctgacgtggcgagtgttaattgggtgggtgagggatatgataattctgtggaccatttttgtttatttttaatttaaaggtccaatgtttaagggaaggcagttggtatagaaagaaagattcgagcaagcaatattgaagggatgttaagttatgttgttggattgagtaaagtgcatatataaaatatagggtaattatcatcactattcaatttttttggtttcatatgaagatcacatgttataaattaatgggtaattttgtagtacatgatctttgaaagggtagttagttttgatacatttatttgttctagtatttaggaatatatctaattaaacaaatctctcaattttagattatataaattgaagttgtttcatcaatttaaataaaaaaattaagaaagaaaactttccgaaaaaaaaataaaaaaataaaagttaaattttacttaagtattttgtgtataaatatatttttgatatagtgtaaaaagaaacatcttttgatttttttttaatttaaatagctacattaagtataaaaattcaaatttcttttttattattgatcaaaatttaatagtttaatatttttgaaattaatatttattttaaacttgtttagtaaccattaatgagtaaaattcattgagaagtatttcatacatataattatctatgttttgaggccagttgtaaattttcaaaaaaaaaaaatattttaaaatttgtaccagttcagtagtttaaaagatgttaatgccaaaatttgagtttaaaaaattaaatacaattaaaatgataatttaaagagtttaactgccaaataaatattaaccaaattggcattcagtttttagtaggtaaaataatacttaatttatttctatggcaacaaaagtatttaaattattatgttttcaatactttagtatttttttagacattcagctgtattatattagtaattttttattataattattaaattaaaatatgtaaaatttaatatttaattacatcaaaactaacatgatactttattgtggtattaaacaccacatataccatttatcatttttctacgtgatttcaaatttgcttaaaacttaaataaaaatctaaatattcttctcattaaaaaaaataaataaagtacactactaaacataaaatttaaacacttttaccacaaatatcttataatttatgttaataagtcatcacattatttcacaagttcaagatagccaaaattaataatgtccttgtcatcacaactattttcttgacacatatagaaagctttatgtatttattattatatagtccatgtgtgatgctacaccttgagtgataaagccatgtgagaacaatttagagagtaaagtggtccaaatcaacttcatcaattatggtagctaatgataatgaaatgcctaaaacacatgatgaagatgacaagaatcaatttaaacttatgatttttcttatgtatatataggaaaattctgctatacatgattaaaaaaatattcatatatttgagaattgagaatcatgaactgtgaggcattaatgcaataatttgatatttaaaaaggtgtttgctttcgtttgcggtgttagaaagagtcttgaagtatgatagtcaagtccggaaaagagtttttggatgtctatcatgtccattccgggtccattattcaagatagctagcccttttttggaaaggagttccagctggctagttattcctcctggaatgacagtttcggatagtctactt

SEQ ID NO: 95596 - DNA, 1063 bp, Cannabis sativa
atgaattttgtaacatctctcgattgtgtgtcctaagatgttgcagtgagtacagaagggtctgtttcttttaggaggttgattctttgggatttgattgtctgttttctgccctgtgttcttattgtcttgaaaggcaaaagccatggcagggttaggattattggagttaaaaccagtacctttctgatgttcttcttgggtgacgaggtgaaacacacggttcacttcaggtagtggatccattaatagaatgctgcctctgacttgagaaaatgaatcagaaagtcctattaaaaacgacatgatgtgttccatatggtaatgatcttgaagtcttttgactccaccacaagtgcacccattgcaagtacaagatggcctgaaattggttagttcttcccatatagttttaagttttgtaaaatacatcccaacagattggttgtcttgcttgagattcatcaaatcttttcttaaattgtatatatgggggccatttctttggtggaatctgaccttgaggtcattccaaatggcagaggcattttcatcgtataaaatgcttgatgatatttctttggacacggaattcagaatccatgaaataacaatattgttatttcttatccaggcattataaagaattgaatcagagggagaaggtttagaaatagaaccgtccaagaatccaatcttgttctttactgagatggcgagttgcatagccctgctccaagatacatagttgtcctgtccagtgagtggctgagagacgagagtgtgccctggattgtctccatggtgaaggaagtaagggttagcagggtcttcgagaggatttcttgaagcagagatttgcagagatggattctggttatctccgatgttggttccaagcgtagactcatcttgagctccttggttcgattgactggaatctgaagacattgcagaacttcaatcgagaagaatacgattgagattaggtaagaaagaagaggaagatgcagcggaggaatgcacagcttcgtcggagaagaagaacacgactatggctggg

SEQ ID NO: 95597 - DNA, 1134 bp, Cannabis sativa
aaagcttattttatgtgtatagatatcacttttatttataaatatatgttgtaactaactaaaatgcatatatatttttttctcgattttttttttcagggtaggcgactatcacctcgcctctatctgagttcgcccctgctcttaaacatgtaaaagatagaaaaatataagaggagtgctcttaatttttttttttctaatagagagaaagagtgataagaaaataagatatcaaaatatagacttattttatatatatatttatatatacaaagataaaaatatgtataaaaaaaaaatagagggaagaaaaaaaataaaataaaagctaacaactgacttaaaaaaaaaaagctgaccaaaaatatattaaaaagaggaaaaagaaaaacttttttgaagatttaatatatataaaaaacagtaaaaaaaaaatattaagtagggaaaataaaaataggaaaaatttattctataaatgtaaggtttagaaaaaaaagttagaagttgtttggttgtgttctcagttttcagaattgtgtttttaaaagtgagaacagaaaacaatttattatcatttcaaaaatttaatggtatttggttcacattttttaaaactctttttacattttttttttactaaaaaaaaaaacaatagtctacatcataccatgatatggtctgtctgggtccggggtctggggttcggggtcgggtcaagtccggggctcgaggtccagggtccgattcgggttggggtcaggggtttggggtatgagttctaggatttggggtttggggtttggggtccgagatcccgcgttcgggttcggagtccaaagtctggggtctaggatctcgagtgtaggattcgaggtctgggatcccagatctggggtccggatatgtgagtaaaaatgtaaaatataataaaaattaaaaactacattttgatgttttttattttttaattttttaaaacttaattttttttttaaaaaaattacttttaaaaattttgactaaacgactcctattaatttttcaaagttattttcaattttttaaaagaggaaattagaatctataccctctttatattgtcctcttttatttttaccctctttttta

SEQ ID NO: 95598 - DNA, 909 bp, Cannabis sativa
atgtttgaggttcaaaatttgagtgttttggcccaatcaccgcgactagacttatggtggtcgcgatgaggctttacctaaaacaagggatagcccctccctagtttggttgcgaagaccacatgtttggccgcggcgacaattagtcttggcaactctgaggcgacggtttgatttttcttattttgttttagtcgtaatttttgactccaaactctgttttgaacgttctttatatcgttagaaagcttgttacgagctttattacttggtccgtgaatattaagttatgagattggagattaaccctattgtgtttttacacctagggttgtgactaggataatcgatgcttgctcaagatcacttgtgaatttgaaattctcctcatacttaggaattcaggtaagaaagtgaacactgcacttatagcatagcgcagtggcacacttatatattaagtggatggttggatataaatgtgagttagggttattattctaaagtttctatatttgagcatgtgtaaattgaattgtatgtatatatatatatattaagaattgtgttagccatatctggattagacctaataaataccatcagcataaatttttgtgagagcgtaatgtatgaattatgcatatatgataagagttgtgcaatcaatgtataactaggttagactcggtgaccaaaactaagagaaaccctgataaggctttatatagcaaatagacgtgtgagtgtaacacgtggcgtctacacaatagagacttcggatgtggtggcatcattatttgcgcggtggcgtgttatattagtgtggcggcacagttatcaatgcagtgacatattaaatgtgatatgtatgctatatgttatatttaggttagttaatgctttctt

SEQ ID NO: 95599 - DNA, 769 bp, Cannabis sativa
ccttttttgtttattttttcttaacaagataaaaatgtaaattttgggcctaaaaaatctattaaggaaaaaatcccaaaagactatacgtatatatgtataatttttaacatggaaataatataccccaatcaaatatatctatatctcaaacttaaactaagattctacatttttttttaatatactatatcacataaaagtgatatactttacagcaatataaatataccacaaaactaatattagtgatgcacttaattttttcatttcctttatgatatactaaatcacggaaaatagatataccaatctttttaattaatataccaattaattaataagtttttttattctttcccttaatattcataaaagacctataccatttttttatttttattttttattcatataaaaatatataccactcttatataccacaatttaaagtagatatatcacattttttttaacgtaatcacattcaaaaattaatataacatcatagtgagaaataaaattccaaaaatttagtttaatattaataaaaataccaaaaatttagtttaatattccacaatttttttcctttcattttttcatataccataaaaaatgaaaatatatgccccaatgaatataaccatacctcaaacgtaaactactatttcatattttttccttctttcgttcttcatataccaaccaacataagaataatataccacattattaatgtaatatactcgaatatgaatatactgta

SEQ ID NO: 95600 - DNA, 1145 bp, Cannabis sativa
gaaaaatgtaaagtaacttccatttgctgaagcatgactatccaagttacaattacattagtcaatttgcaaggatacaattccaaaaggtctctttatctaagcctaataatttcttgcttgcaaggttgtgggctatatcattgttatttctaaaaacattagaaaataaagataaagatttatacaccaattgaatcatatcagaaaaagaatatctatcttttcatttatggttgatcttgttgactaaagttttgcaatttccaccacttcaattgggaagttcacaaaccaggaaagatctgtataaaaagccttgacctcagcatagatagagatagagatacctgtcatggaagagcataatcctacaacaacgttcccattgctaccaaaaactgccacttccatacaagttcttcttgcccttgcatcaaaggaagcatccacacacaacttaaaagtcccaagagaggggaaactgcaaccagcattgcatccccgatcattaccagtactagaagaggcttgattcaaagaagtgtggttcagataatggacttgagccttcttataatcctgcacatattcaacacaaaattttccacatccacaaagttaagaaaggacttcttaaacacagaattattccttggttacttataatgattaaattcattaaattaagttattttcattgagtgatccctatcatatatgttgagtttttattattgtttatgtactgcaaacatcatccgacactattattttttcttagatttgtcatcatatactattgttatacttgtaactacttcttaatcagtattagtttttaatgtataataaataaatttaactatatatataaattttaaaagtattaaaccattaaattttagtctgataacgaataataaaagagaaatttaaatttccatgcttaatttaatttagctacttaattaaaaaaaaataaaaaaatacatctttttacaatatatcaaaaatatgtttatataaaaaaataatttagtcaaatcaactttttttatcattttttgccgaaaaacttttttcttattttttttagttgatggaccaatcccaacccatatataatgtaaaaataagaattt

SEQ ID NO: 95601 - DNA, 525 bp, Cannabis sativa
ctaaccaagctatatattaaaatgctaataagattccttatatattttaaaatgattgaattatataatttatatcaaattatttgaaagtgaaaaatgaacaatatcttataattttatagatcaccgttctcatagcatttggatttgtgacgagtgcatttaatctagaagataaattatatatatgtggagagataatgacctgagaaagtaataatcaaccccaaagatgtagggaacctacatttctagatcatatcttaaaattaatatatgtgcctaaacaacccaataatctacatcaattattatacttggtttttcttttgtaattaataataatattttatagatatatatagtgagttattaaacgagaaattaaatttcttcccgacatatacacacggccatgtcaccgagtttcttactttaaagcatttatctttcttgtaagctgtactcatcattttttatatatttattataaattataaatgtatttgtatacgtataagtata

SEQ ID NO: 95602 - DNA, 698 bp, Cannabis sativa
tgaaattcaccttcaccaagttaccaagtttcaaagtttcatagaccttgcttgggaattttcttgtggaactacctgttgtactcatgtggaactgaaaaaagaataattttaagaagttaatcttgttagcaagttgtttagacacaataatttgagcataaacattgttttttattcattaattggtttttgttgctgtgaaacttacataaattgaatctacaagcttacataacaaagttttgcttctagatatcaaaagctacccctgcttcgcttgcatagcagaggccgccgttgaagacgaggggaggcgacgccaaaagaggccgtgggtactagcttttttacactctaatgttgagttcgtagaactgctactgtagagtagtgtttagtaagctggcaactgatagtttttgcaaaggtgctctccattccaatatcttggtaggagaacgagctccatactctcattgtaccttctacaacttctatctacaaaattgcttaaggatgggccacacagtgaagcttttgatgatgccatgtctattacagaaatcagtgaacatgttactatcaaacaactttccattgcttgacacaatattctatggaagttcgaatcaacatatgatgttcttgaaaacaatgtcaaggaatttttggacgtgattgtttccaggggttca

SEQ ID NO: 95603 - DNA, 653 bp, Cannabis sativa
cattcttgaaataaaaaaaaaatcttagtgtatctaagtttactttagaatacaatgtgtattttgaatttcatattaaccactgtttggttaaggaccatatgagtaaagctattttgctagtggggaagcacaggaatgttctgtgttcttttgactccaaagaaatttagatggttaacggtgtctctaatgatctcctctctgtcaacctagtatcttgtctgaaaaactactatcagtccccatattgcactactcaatctaaagatgactctatcactaataagagttttgttgctcatttttgtaataattataacaataattttcttactgaagttgatatcagccacaacaaattagcacatcccttagaaagaaatgttaacacagttcttaactcttaaaatgtttcaatcaattaaacatctcacaatgtttgttctgtctactatcttggtaaaatttacatgctaccttttacatcagatttatggggcccctcacatactgtatcttcaaatggttataaatattatatcaactttttttatgcatattcaagattcgcatggttctatttacttaaaaaaattgatgctttcgaggtgttcatacagttaagacagaattagaactacaattgggta

SEQ ID NO: 95604 - DNA, 685 bp, Cannabis sativa
aaaagttaagaccactttaatttttcatataaagtgatgaggtatctttaagatactaaatattatattcatgcgtattttattgagattgactaacattctagaaacatagttaaccaattaggttccaacatactttaatggctatattgattcacataaatcaacctttgattacattcttaagattatcactaagttgtatcgtggagaaccttaattgttatttctattataaaagtcaaatttatatactgtttttgaggatacaactagtatggtatattatagagtttcatactaggcctagagtttagaattatattttaggccattaaaaattttttgtgacaaatgcagctacagtatttatggctaagaactataataagagtgctggtcgaagctagtatatttatattaagaatttaactgtaaagaggcatgataagtgctcattaagtatgcaatactgaattgggtgattgtatatccttgactaaaggcaggccgcaacacaattcaaggatcataaagtaaatatagaattcagttacccctatgcattttttggtttttcaactaaaattattcaatgaaactctaatttcgatattttctcatatttatgtgcaccttaatttcgtctgagaaaattatcataagaggaccagaataaacataa

SEQ ID NO: 95605 - DNA, 602 bp, Cannabis sativa
tattttattgtataaaatatcgtcaatttttatgtatcaatatagacacgtataccgagagacatctctctattattttactttatttttttttgacgtattctcttagttttattagtgattaactttatatatataatatatatatttttttacatattttactttttttaatgtcaaaaaactttaaaaaaaatttctggttatactggtaattatttggtcttaaaagctgcaccataacgatctacattttaagatgatcattttaatatgtgggaagtatatattttttcgctatcacttaagaagataatagcaataagtaactttatagtttcttttctatttaattatccaataaataaatatttttataaattaaacaaaactcattaattagttttataagttactaaaaagtattttattatttaatatttaaaagataataaattgtattttacatagtttttatttttatttttttttatatatagaataatttttacaagtttttaaaataatttaccacatagtatcttaaaaattaatacaaaccccataaattactctaaaatttttgttattttttacttaaa

SEQ ID NO: 95606 - DNA, 534 bp, Cannabis sativa
tatatataaaggagagatataagacggtgacatggcactttagaattattctaaatgtatttttctattctctccttaattttctcatttatctaattttttaattataactaaattgacaaattaattattacttattattttttataaaactaaacattagcatttttctaatgatttttttattttaaaaaaatgaaaattaaaaaatccaccacgtaactatttttttatttatatatttttatatattaaaagtgcctatctaacagcaattcttggtttaacagaatctactttaaaataaaagaatattctgttaactttaacgtagaagaaccaaaatacatttgcgattcctctttcttctttaacaaaaccctactgcgatttgagagaaagttagatcaaccgaaaatgtcaagaagaggaataggaggaaagggtttgggaaagggaggagccaagaggcatcgcaaggttctcagggacaacatccagggcatcactaagccggcgattcgccgtttggcc

SEQ ID NO: 95607 - DNA, 1343 bp, Cannabis sativa
attcccgaatataagagttctattttatagtgttgaaatctcacttatttatgtttttacagagaggagacaagtgtatatcttacaattttgattcagtgcataattttaagttaaacaatagcattatagtatgtaaagattgtgtttatgatttactttctcatctgaataccacaggtgaataaaattgaagtccaatatgacaaaacttctaaacaagttgacgtccaggctctgaaggaaactttatgggaccaattacaagaatctcatcgagcacctattcaggtatgctcatagctacctctggttaaataaaggtgtcttgtattctaatttattccttgagagatgtctatgaaccaaaatatactctcatatcatttaataaggtgaattctgactatgaaattctcatctttgaataacaggaggaagaagacccattatccttcaagaaaatcttgggcacatttcctagtgactcaaaagctgcggcaaccatcaatgacgtctcacctcacttgtgtttcatatgcttgttacatttagcaaatgagcatggattgaccatccgtggacacacagacatggacgatctttcaatacttattccacgtcctagtggagcagtgtagactagagctttatctcattggttcgttcttgtacccaacccacccttctataaggctttttgtgttccttaacatcttgtaccatgaaaaatttgtgaatcataaaatactaaatcttcaactctctatttggtacagtagatagagatagaaaatctgtcttgtcttaaatcgttcactctgaaaagttgggtacaatttgacgtggcatatccaccatgatcttttcttagtaggggtaagtgtctacacgaattaatttctttggggaacacatgtaaagataaaattggattttgttagataatgtggggttgacaaggattggggtatatcaataattcaatgtgaaactaatttctatttaatatgagccagtgacttgtcctacttagtaaaaagtgatttataatcatcattatatgtgcacaatattatttctattttttttttgaaacggaagatcatttttaatttgtaatgtaaaaataacccatttaaatttatgtatctacaaaattttaaaaaaaattattactaaatatgttataaacaaatcccacattatatgcatcaattattacaatttaagggtgaaaatgccattgggaatcatggatgtgtacttaaaatcttataatcatggatgtgtacttattcgatattttgtattttattttttagtaatctatcatatcaata

SEQ ID NO: 95608 - DNA, 716 bp, Cannabis sativa
attcatttatcagaaaatcaattatttatttacttccttaaatagaaatttatttcctttaatataaaaatattcttataccaatttccaaaatccctggggttagtccaaggcaggatctcggttcgaagcccccacctactcatggaaacttcatttaaggttaattaaaaggtaagagccctaccagtctagtgaaaaaacagcaatctcatagcaagaagacaattgtcagctaaccacactgattcaaaaagagcaaaaagctcaaggtttatgcaggagcataaagagggataaaaaaatctaaaaaaggcataccgccaatgctactaaggacaaaaggtgcacatcacgagtagagctaacaaagctaataaaacaaaccaagcataaacataaaaaaaaaaaaaaaaagcttcagtggtcaccccctaatgcaaaggaagcgatacgaaagaccaaaacaagtccaacaaaagcagaggagcactgccatcttccgacgagaaaagtccactctcattctcccaaagtggttctgaacggtgaaggtgttgggacaagggatgcacatccctttgggtaaaacccgaattcccccttatacatcaacaacactctgaaagctaactaaaagtcaatgtgcatcagaggtagaacgcctgaatgaaaacccacgagcacccactgagatcgaaaaaaaaaaaaaaaaa

SEQ ID NO: 95609 - DNA, 782 bp, Cannabis sativa
acacgaagcaccatgttgtttacaacattgagccaagacgaagcaagtctgaaggagcctagcccagatctgaccgatctcgacctagatccaaccgaattcatcctaaatttgttcgacccctacccagatccgaccggtctctttccagattcgaccatcgcctacaagaagtaaagaagatgatgaagaaaaagcaaaagaagaagaaaatataaaaataatttaggggagagatttttttttttttgataatctagtgtagagataatatttacgggaaagatgtatatttttttttaataattttaattattttagttatttttttcatttaattatttcctttattttttttttatgatatttatatatggataattatatgaaccaatataaacacgacatatgtatatttgtttacatgtgagataattcatgctgacacataatcactcttatagatagtacctttaatttatcaataaaagtagaggttgttgagttttaccaatttaatttaagcttagaaaattaagtacaattaaaatgatagttaagagaatttaatcgcaaaaaactcttacaaaaacaaagtatatttgctttttaaccatttttttttctacttacactcaactcaaagcaaacttgaatattaattatggcaaagcaaacttgaatattaattatggctttaaaatatatatttattaaatatgatttaagagtcctcaattttgatttatttataattagcaccaccatcatgtgtatattaa

SEQ ID NO: 95610 - DNA, 974 bp, Cannabis sativa
gtatcgtggataactttccatcctgagttacccgtgaaactttggtcgcttccatcatgaatctattgatgtatgcccggagaggctcgcctggtcgttgctttacctcgaccaagtctcccaaatgcaatgggagttggcgtgaggaggagaattgtgcatggaattacgaagagaaggttttccatgaactaaactttttaggagccaacttgaaataccattgctgagcagcttttgacagagtggcgaggaagattctgcagcatacatctcctcgtaccacttgcaaatccattttcatttcgaagtacttgagatgggaaaggggatcttctcttccagtgtacatcttccagtcggcattttaaatttgtggggcaacagcaggagattgatctctggcgagatgggagtttttcgtgctcggtctagctcaagatcattgtttctttatccagccatgtcgtgaaacatatttttcaattcgtctagctaagcatgtacggctgggctaacctgctcgacattctggtcaatttgaattacatcaacatctttctgagcgggaatttgagtacgggttctgggctgcgagattgtcataacattctgatcgtctactcccctcctactgtttagataattccttaggtcatgggtcgctcccaacctttcaaatacagaagtgcttggctgcctcatcgattgattcgcttggttgactggtggaatggcaccatttatctggttggaaccatcaggtatgacttctcctgatgaattactaggtaaggtctccccgcctaccgcttggccaacgagttgaactcttgaccggggattaggcagctgaccatttgcagtctgagaagtattcatcgttggatcttcgtccgtctcacccaggcaaatgacgtttggcggctgctgacctacagtttggtaggcttttcatatcagcacggtagcct

SEQ ID NO: 95611 - DNA, 594 bp, Cannabis sativa
ggttaaaaccattcatatggagtaaccaaaaagttttctattacaaggacaagataggaaatttttgaaaataagtctattcaatggacttaacaaatattcctgttcctagtattgtatgtttaagtttatctaaacctagagcttatggtatgcctggtactttacttactctggtgcaagcaacttactttagtaagatgctggagcattttgataatggcaatctatataagcttctcgacttctagatatatattttatttatcttaggaaaagtttcaactattccaggaaagataaagactactgaaaaaattccataggatcaatagtgggaggtctcagatttgctttgttatgcattagaccagacacctactgttgagtgggagtaatgagttggtatcagattaatccaggtaaggaacattggaagataatcgactaaatcttaagatcaagaagaggaactatatattggtcgataagggtggtaattttaatactcttagactacaccaaatcaagtttctaaacttgcattagtgcaagaaagtctactgatgagatggtgattactctaggggtaga

SEQ ID NO: 95612 - DNA, 630 bp, Cannabis sativa
ccctaatgctaaggcacgctacagtgctttgagatctaggttcaaatcttgttattactctatgacataaaggaacaagggttagatatctgaacggaaggagtcgtaacattctgctgccaccaatgtaaggtttcctagaaatttatatgtgtttatttcattgttttaggaaattcatgtttagggtgttagattataggaaattcatggccgggcagaggtgcccttctagggtgctggcctgccatgagtgtgacaattgggggcgttgtagtgccagagattcatggtcggccccctaggccagttgttgccaggatctagctattcttcccattagaccttcgtaggaaggcatgtcctcctttgagtaaaggaaggtctgtcctagttcttgaagaacctggttggtcagcttgctgatagatcctccccaatctagcaactagtcttccttggagtggatctctgatgagatcttggcctcttccactggttctctgattgaaccgccttataaggtcactggcttctctattgcggcaattcagctctgcttggtgagatcgaaggatgtactcttggccgtccatccatttcagaaattcacgtctctacagagtgaat

SEQ ID NO: 95613 - DNA, 514 bp, Cannabis sativa
attatattaaaaagtattcttaaatagaagttttactgtatataagaattaattaattggtgggctgttaatggtaaaaaaaaactgcagtagtagtatctatctactatagtctatagtaattaataatggaaatatatattaataatgagaagtgtttaattaatattaatttgcatactgaaaaaataaataagatgaacacaataagattaaatggggtattcattggattacattcattaaatttatccagatccaatccaattgtatattatatgttaaattttactatctataatctaatctagttaattttagtcatttttttttttttttgaaatgattttagtcatttatttgattcaatattcactggatatattttatcaattgatttaattcgagtttattcaatattttagtcctagtatttttttagatcggatcagactcatttaatatttagatcattggattgaattagatgcatcccattaaaaaaacgagtaaa

SEQ ID NO: 95614 - DNA, 1298 bp, Cannabis sativa
ggaccatagagcactttctgttgtgctcaatttctctactcagcaaattgttgaaaggagaaagtcaagatttcggtttgaaaggatgtggttaaattctcctgaatgttcaagattaatagccgattcttggatggcaaatgggacggatggggactgtattgatactttgactgttagtttggctgattgtgctaagaatttgcagcagtggcataacacaactttcggccatatgaagagggatattaaggatgctcaaactcgagttcaacagttacataacaaccccacgcaaggcagtgatttttcttaaaatatcatctcggctgaagccattttggatgagcttttggctaatgaggaacaatactggcagcagcgttctagggtggaatggctcacttcaggagatcgaaacacgaaattttttcatgccaaggcatcttcaaggaaatccaataattatatcagaagtatacaagatgataatggtcagactttgcattctaaggatgatattacttctgttataacaaactattttgaaactctttttaaggcttctgaggaggatcattgggctcttaatcatgttctctctacgattcccaccacaattacagatgctcataatgattttcttcttcatgagtttactaaggatgatgttttttctgctttacaatctatgggagccgataagagtcctggtatggatgatatgtctactatgttttatcaacacaactgggaggttgttggttctttggttacacaagtcattttgaatgtcttaaatcatggagccaacccagcagctatcaataagactctaattactctcattccaaaaatgaagaaaccgaaaacaatgaaggactataggccaattagtctttgtaatatcatttacaagttggtttctaagatgattgcccttcgactaaagcatgtgctaccaaatcttatctcccagactcaaagtgctttcctgcccaatagacaaattacagataatgttttagtggcatttgaaatagtgcatagtctgaagcatagaacaagagggaataaaggttatgctgctttaaaactcgatatgagtaaagcttttgatcgagttgaatggtcttacatcgcagctgtgatgggtaaaatggggttcaatattcgctggattactcttgttatgacttgccttcacactacttcgttttctttccttgtcaatggtgaagttaaagggtcggttattccagagcgtggcctatgtcaaggtgatcctttatcacctt

SEQ ID NO: 95615 - DNA, 1020 bp, Cannabis sativa
ccggcctgccctaagctttgttgatggctttcggccggccacttctagataaggtgactggtcttggtcagctagccctatgctaggtagggcctggccgcccgttatcccccgattggctggtacagccagtatattgatagggggtagatcgcaccagttgctagagttatgtggatttagatatctgaagtgacttgactcacttctcaagttgttattttgggtgtttctacccattcctagacccacccgattaaagattggcctctagcttacttgctcttagaggccttgggatgggaatccaccgtgctggtcggctaggggtgtaccttcaaggggctaactggccaggggctgcccaagtgggggtgttataaagcttgaaatccctggccagcctctcagaccgttgtttactgggaactaattattcttgcgacaagacctttgtcctcttttgggtagggaaaggtttatcctagtttctaaggaacatggttggatagttttccggttgccggtagaccctccccgatttgtcgactagtctccctttgagagaatctctgatgagatcctaacctcttccagcagttgtcttattgaactgccttatttggtcgatagcttctctgttacgcgggttcagctcatcctggtgagatcagaggatgtactcttggtcatccatctatcgtagaaatttgcgtctctattgttcaaatacatcgcaattaacagcgtgtggttctttagtttagccgacttgacaaacgacctctctatgtctggctaacttgaaatcttctcccaagtctaattccgaggaccaaatctggcataattctgaggaacaaatctggttgtggtgtttgggggatgctccacgtgggcccttccttcaatgggagaggccaatggaaggtcctcccttagaggcatgggttgattgttcagatccatagggatggttgtgtcgacctggccagctgtggtggccatgtttgtggtgcc

SEQ ID NO: 95616 - DNA, 657 bp, Cannabis sativa
  modified_base (506)..(522): a, c, t, g, unknown or other
cctgaagttcccaacaaagaatggggtagggtgtcttagagggaaccaggaatctgctcgggaatgttacaagcttggagtggccaaggctacgaaggaaatatcctccagccagagcccagacaagggaaaaaacattcccaagtaggaaacttcccaaggccaggatgaagatgtggatcctcgacatggggacccaaacaacactgttggacctgtggaagaattagaagagatctagatcgttccagctatcccggctagaaagttaaaaattggaaagggtttgttgctcgatgtaaaatcagagttgataaaatttctaagagcaaacctagatgttttttcctggacacatgcaaatatggtcggaatcgacccttctattatttcacacgtcctgaatatcgatcctaacatctggccagttcagcaaaaacgaagactgctggataaagaacgagcagtagccctgaaagatgaagttgaaaagctatgcaacaacnnnnnnnnnnnnnnnnntttttatccagcttgggtcgcgaagcctgtacttgtgcccaagccgaattagaaatggcgagtctatattgattacacaaacctcaacaaagcatgccctaaagactgttttccacttccaaggattgatcagct

SEQ ID NO: 95617 - DNA, 907 bp, Cannabis sativa
ttcattattaggtgaatgaacttcctggggaagtttaaaccttctagcatttcttccaagaactcccattcaatggtgtcatatgccttttgaagatcaagcttgatcatacaactcggtttgttagctttcctattatagtgtctcaccaagtcttgacatatcatgatgttatgccctataaatctccccttaataaatcctccttgagaatgagaaattatttcaggaagaatgtctcgaattctagcactcaaaagcttagttgcaatcttataaataacattgcaacaagcaattggcctaaaatctttgacagtgttagggcatttattttttggaaccaaggtaataattgttgagttattttcttctagtattttacctgaatccaaaaatgaaattacatcttcacatatgtcatccccaatagtctcccaattgtcttggacctggagatttgtttccaggaatgcttaagactgccttcttcacttcctctttagagaactcctgaaccagcatttttgagaatccattttttttatattaagctaaaactatctaaaacaaacatttatacttctataagaaaaaaaataaacatttatactttcataacaaaaaaaaaaataacatttatactatttaatatttacaaaaatactattcataaatttattaagggataattgcggtttattaagggataattgcggcaaaagtccccaaaaacttgaggttgatgccgattagtcctcaacctcaaaaattggcggtaaaaattcctaaggtcacactttctagaagtccgttggtccctcaatctaactgatccgttaaactcaaataaaatgctacatgtcaacaaattattggtacaaatcatatttttaatttaaaaaaa

SEQ ID NO: 95618 - DNA, 1004 bp, Cannabis sativa
aatcaacaactccagcgagttaagtgccaatacaacacttgtgcacttatcgccttaaaccctaactcatctatttaccccatataaataaacactgaatcatatagaatttaaagcatgccatcacataacacatatatactctagatgcttgcatacctcctaaaatggaaagcggtaaacagatgatcacataaacagtaaagtatttactctcaatacttactgcaccatgagtcgagcttgtctctgacggtgaatgtacatgttcgcccagtctgcaggaagtttaaaaaccttggcgctttgataccgaattgtaacaccctaaataattaggcacgctacccaataatcttatgaaaccctaatcccctaatcgggattactagtaaaataagcgcgaaaattaaactttattaataaacagaatgaaaataacttgtaataatttaaaccttataatttaaaagttacaaaacttgggatcccaaatgtatttacaaaacactattacaagttcttttcctttggccgacctaagcggcaaaacagagtcttaaaatagatcactggtaggccccaacccgcttggtctagtgtggcctgaatatgtacattcttcgttcagttcccatactcattgttgatcagaaataactttaccctttccggcacagtagagcacccgtgagccaagcccagcaagagagtataaaataatgataaacatatttatcacaatatataatcagtaatgccattgtcaaatgtctgtatcacacaaacctatatgttagctcacatgcctatttatgtctacgtagcgtagacctacgtgttgcgctcacacgtctaaatagaatgaggccttagaatggttcctctcggtttcgattaccgagtccaacctgattatgccttgaacacataatccttaaatctcaatatattcatacacatagcatggcatagcatttatacaacttatatcactagggtaa

SEQ ID NO: 95619 - DNA, 552 bp, Cannabis sativa
gtaaagaaattttttattattagataaagagttaaacctttgatatatgcttgaatgttaaattattaatatttagtattcaatgatttatattcaatatcagaaaatgccttattcatatataaggttatgacttgtagctgtatagagaactgaggccacttatctatgtataaaacagtcagcaacatattaaagtttgggaatctttaatcaatggttgctagtatagttcactgatgccggttcttcggtgcaagtaatcttggttcgaattacggatgtagtataacatcaatgtgaaggtgtcgtacataatagaaattatatatgacaaagaccaatatgaatgaagttgtctttattaacacatcagttactatagagacctaattcatatcattatgatgatcaatattagatcgacctaaatattgagtaatcataaactcctgttcatgtattaatttctttgattcactcgttaaagtttttcagagaagataattcttacaacttttgttttcaaaatctaataatatggatggttgg

SEQ ID NO: 95620 - DNA, 1118 bp, Cannabis sativa
  modified_base (54)..(61): a, c, t, g, unknown or other
aaattaaaagtcacccataaatttctcaaaaaccaagaattttagttatatagnnnnnnnntatatagaatagatatatatagaaaactactgtggtggccgaaaggtttttttttttgaacaaattaaagattatagaaataattcatgttcaaatttccaacaaatttagttttctttatttctttttatttataaaaattatatactttattagcaatgatatcacatcctcactcattataagcacaattaaaatttgcggtgagttatacatttgtgtattaattagaccatttataggaaaaattatggaacaggatataaaagtttcgccctcttttagtgctctgtggcagttaagtttttttccttcagttaagcagtttttgctggtttttcatggtgtttattcgcatattctaccaacttcccttgaataactgcattttcactcctgtactgatctccacactatctctgtttggtctgattttgtatctccatggatccttacactagcaagtcgaaagaacctatgaaactaaccgaggatgaggaatttgtctttgatttttctgatttggcttttgttgacaactctggtgtttctgatcatatattgtatgccaaagttctcaccaataagaaagtgtggctctctacttttaagaatcaaatggcacaacactggaatgggaggttccctgtcacgattactgaatcgtctgagatgttctcactgagttttggttgtgcaggggacaaagcaaaggttctactaagggaactttttcattttcaaaaccatcatattattctgcattcacctatgcctggtcaaagtgttcactgtgattctctcatatttacacctttttgggttcaaatatataggcttccttttcttagcaaaactaaaggcatggcgaaagcacttggtaatatcattggtgagtatgtagatgtttatgaagattctctcaataaggggtggggaccttttctgcttgtcctttgatgatagtcattgatccctttgtcaatttgattgtacctgcctcaattttgctaacaacaccaagatcatcaagtacactaatagaaattaagtttct

SEQ ID NO: 95621 - DNA, 778 bp, Cannabis sativa
tccaatgccaactctgtcttcgacttggccacactgtaattgactgctattacagatttgataagagtttcataggggccaacaataactccaatcatcaatccaaaccacaggccaacatagctcatcaatccataaatcaagactcaaattggtatcccgactcaggcgcaaccaatcattgcactcccgatgctcagaatctcatgacaagaaccagctacaatggggcagacaatctttatgttggagatggcacgggtttgtctattgaatccattggtcaatcttactttctttctaactccaatcatcctttaatcctaaacaatctgcttcatgtaccaaaaattaccaaaaacctactcagtgtctctaagtttggcagagataacaatgtgtattttgtgttttaccctgatgtttgtcatgttaaggatcaggtgacccacaacacactcctgactggtgttcacaagaatggcctgtattcttttgatgaattacaggtccaacttcagccttcaagtgtcattcccaacacagaaatcacagccactacccaaactgctcctgctcaagcttttgtctccttagcagaaaataaagacaacctttccaacaccaattctcactactgattgtggcacaatcgactaaggcatcctagtgaaaaagttgtaaaaactgtcctacaaggctgtaatatacctgttagcaataaagaacagttttccccttgtaatgcttgctgtctaggaaagattcataagcttcc

SEQ ID NO: 95622 - DNA, 566 bp, Cannabis sativa
gaagtctacccctaagcaaagcaggttggggtacttctacttctctcagccagatttcaagtggctgacgaacactgtggacaaggatgttagcaagatcgagggttttgttgaggagtattacctcgtggaaggcatggataccacctatactcggttttaacagatcacgatatattactgtccacccctcgcattgacatttagggatagggctcaaaagattgtccaactgctagatgctgctcggaatatcaatttgttgacctcagaggacatctttgtgaagtacatgctttatccggaaaactttatgccctagcctatgaaggggaagaagaagaagtccagggctggccaggctgcgggagcccaacaagagaaggagctcagtcaacttaagtgtgaggctatgttgaagggtgatgctggagccaagcagtatgctcacgaatattctgagcaggagaaggatgctcaagaatattataagcaggagaggccgctcaagaagaagaaaaccctcccaaccaggcaaaggcccatcgaacaaactattcagatca

SEQ ID NO: 95623 - DNA, 735 bp, Cannabis sativa
cacatggtcaagcttctcataaataaaattagatgttctcccactgcaccaagtgaatgcattcccatttgaggcaatttcccgtaaatgacaatccgaaatggcttgtctaaaaattttcataagatattcgggtttcggacctcctccattattttcctttgtacttaatatttcattgaaatcgcctccacaaaaccaagcattgttaaacattgtctttagcctatataataacttccaactctccaatctcccacctggatccgagcttccatagaagccagtaaaacggcaaacaaaccccgtatcgttctcaaccaaagcgtcaatgtgagagactgtaaaggatttgatttgaaccataaaatcattagaccacagaagcgccaaacccccgcttttacctctagcatccaccgtaaaacagccagcgaaacccaatttcacccgaaccaactccataccactgctatttaaccgagtttcagacaaaaatatcatcccagatgataatcattgacatgggacttcaaggtattcaatgtccaagggttcccaagaccttggacattccaaaacatggccatcgtggctctcggcgacctagatcaactaggttcgccgcttccattgtagcgtcaaggatcaaatccaattcattagaaaatccccttgaattacccctacttccttagccatctccgattaattgatctctgcctgacccgcttt

SEQ ID NO: 95624 - DNA, 758 bp, Cannabis sativa
tgtgtgctatattgaaattcatatacaacttttgtttttaattattattatttataacaccctaaaatgaaagcatgtattaaaataatggtagacttattttatttttagtagttgaaaaaattaattaggcattttcttatataacaatatatgttagtaaatattaaagtaatgaattgcagctttgcctaatccaccatgatgaaaaagggtcaagaaagtgaccattattaggagttatacatacatctgagtctgataataataacagaaccatagaacagatgttatgttcaaaattatactagtatggaattaattcaaaccacattaataatttaacataatcaaagttcaaaattcaagcacaaacaccagagagtcaaaccaaggggtttcctttggttattgagtctattaattactattatattatagtgattaaagaggtgaaaataaaaagtacttattgttattaaattatttcgttgcaggtttttatttagttttttaggtagaagcagttgttttactaggaggtttgcagtgagcacgagatgtgggactaccagttgaaaggttttttcaaattcactatctctcgtctcagctttggagagtcagacactgtagaatgaattaggggttattttttctgatattaaagttttattgtctagctttcttggatcatctctctcatgtcagccgcaactttaatgtagaggtttatagattggctaagcatgctctta

SEQ ID NO: 95625 - DNA, 563 bp, Cannabis sativa
ttctttcccactctttttactgggttcagccaaatttgaaatagaaataggcaaagtagcaggcgactttccctctaccagagtacgactaggaacttccttacccagaacggcaacgataggcatgctcgaaccaggggactctttgggaacccactccctgatgcatcccaacatgcatatatataattagacttaaagatatatgtcttacataaatgatatgaatctaatatttaagttgaaaagtgtagtcaatttgttaggttcacaccaatgatcattagggtcatatttctcactaattaattttctgccctttaaaatttgttttgtagtctatttttttttaactgtcctttgtgtcttatgaagtatttgaactcaaaagaacaacgaatggaaaacaatcgaaacctcaataaatattaggttaattagtaattttttctccttaactttgacatgtattaaatcgtatagggaacttttttagccgttaaaaattctccccgaactattgagattattaaatttaaagacttttatctaattttagtaaa

SEQ ID NO: 95626 - DNA, 849 bp, Cannabis sativa
attttatttttttgatagcagtgtcgtacgacatgtcgtcgggtgaagaaaggacattccgcagggtccaaatgacccgtcgttcgcggcaaaatcgggctctctttatgtgctatacgacatgtcgtttttttccaaacgacgtgtcgtttcagcaaacaaaaacgacgatcgcaggcgtgaactacatgtcgtttggcgcaggtcatccctgaccttggaaccgggtgcacgggtcgacgaaccgagttaacatgacccaaaatcaaacccgcctgaaaacgacgcatccaacaaccggtttcgtcaaattttgtgggggttttcttccatttctaaccctctatcaatttccaacatccatttcatccatttttcacaaaaaaaaaaataaaacattacccataaacacacaaatccgaaaatgggttttcaccattgataaactcaatgaaaaacttgcaatcttacaataaaccatacaataatcatctgaagaacaagataaacccattctaaaacatttaaactcatattatctgaaaataaaaaaaatattcagatttgaaaataataaataaatgggttacttcaaatattatggaactctaaaatcaaatattctagctctgattaccaattgttaaacattcacataaattatgagttatccaaacacacattaaacagcattgctaataatcattaaatccaagaccagtactttatttagagcatcacaaaataagaaaacacatacctcccatattagcattttccattgttgctatgacaccaaaatccttcaatgtatctccaagaaagtagaagagagcttatgaaagcaaa

SEQ ID NO: 95627 - DNA, 1144 bp, Cannabis sativa
aatcttaatagttcaggaggaatttttaattgccaaaaaaatttagggatataatttgatacatttaaaagttcggggagaaaaaatcctaattagcctaaataaaaagcaattcaatatgttttcaaaaagaaaatgcaattcaatataatactatacaataggtgtaataaggcataccaaaggaaccctaaatgttcaaaatacagcaagaaaaccatttaacgtctcaaattcaactcaaaactactgatacactaactctggaagaaaaattcaatgttcggaaaacacaaccaatggtctgaaactatgttgtgtaaaagaatttcattgaaactatcaacgaaacgttcaaaaaatacagaaagaaatcattcaacgtcttaaattgaactgaaaactactgatccacaaactctcggagaaaaattcaaatgactaaatgttaaaacgaaaaatattgagaaactctaaccaatgatgtagcttccaatagcaaccgcaaccagagcttgatggggatgaaaagtggcggcgtgaggctgcaatggtttaagaccacgccccacatggcgtagatccagatgctgcaccgtcgtccactccataactcctcctttaagatctcaccagcctatacaacagaaaatcacacctgaatcagagacccattttcaacatatgtatttccatagattttagacctaatatggatcagaattgccatggaaatggttagatcgagcaagaaagtgacagtataaaggaggggaaagcagatcttacttgtaatgggaataattgtagggaattgaaagtattacctgaagattatggggtcaaaccgaagctcatttcaatggagaattgaatatgagaagaattatgaggaaagaagcagagacagaacgataggaaagcagaaactcgaaagaaagactcagaattgcaatggaaatggaatgaatgaagaactcgaatattgggcgcccagttttttattgggcctaaaattaccaaaactttctggcgcctatattgggccttagagtgtgctctgtctatatggggcctggagatggtccattatcaaaagtgtctgcaaggctttcccaacaaactattgagcacttttcttttc

SEQ ID NO: 95628 - DNA, 655 bp, Cannabis sativa
attttgctatacttggccaggtgagtctttggatctatgcgcccaccatataactcaaattaaggaattttgaagttctccaggagtggagcttccatgatcctcctgatgcacgactttgggtcctcatctttagtgtgaatgagggccccactttgcttctggattaactttgttagagtagtgatttgctcttctagtctcttggtgtcactgtctgggagatctcgtccactaaatttgtcattaaatggtttttgaggtcattaccacgtgttctctccttctcacttttatctttttcatacttagcgctaagacgccttcagagatttattatggaccaactatcatttgaatattgttcactggtcccacaatcttagtttatagaattactagggtggtttttccttcccctaggcttcaattctttcgtaccagtcccttttggttggtgcaacaaggcctttctaaagtagaagggcatctgagcccgaaggcgtcagtggccttctgtgcctgagaaggcctattagcaggatttgtgttttttgaatgaggtatgggagaagtagggttctgagggtcacctaccttagcttttcccttgtcttgtttcagtgttagcagggtgttccttgttatttccttc

SEQ ID NO: 95629 - DNA, 3389 bp, Cannabis sativa
atacaattcaatacaatacaatacaatacgatctaatacaatgttccaaacgagccctataagaattttttattttaaatttttttataattgtataccataattatttaagacccacggtaaaattttaaaaaattcgaaataatttataatataaaaattaatatttaaaccatctattttatacacatataaaataaaaaaatcaaacgtgtaacagactctttgaacactgttttcaatgtgtttagattttttcgaattttttaaaattttgccaaatatcttacataagtataatgtatacgaccataaaaaaaattgaactaaatattttttttagataccgaaataaataaaagtacatcaacacactcattttacccattttaaaggagtgtattgtaaaattttcctattttagtaaatcaacaataaaatgtattttaatacacctccacaacttaatatacttaatcatataccaactggatcttgttgctccgggcaacaaacatgcaagaaccatttcaccaaatatgtgtccggatagcccaaattaactgatgttttacaggcttgaatttatttatttttgtcaaaactgcttgtaacgattttaccaatattgtgactttagcaaaaattattattaaaaaaaatatgattttcttattcaaaacttaaacataagttaattcttaataacattatagacaattttatgaaaggtttatttagaatgcagtgtgtagagaaagagttacttaaattaaatcaataaacatactctaaagatgtgaaaaggatataatctttgaaaaaaagcatttctcatatatataagaaccaaggaacaataaatcggagggtggggagttcttgttgaaactatttcattaaagggattccataaagcttcaaactttacccttaacattcagcatcattaaatcccatcatctgagaatccagacatattcccccactgaattatgggttaatatgtgtgtatatatataaacaaatttacatacatatactctgtgtttataagtcaatgtccagatggggaagctattctctccccacttgctctcttatttgggataacaacaaatcataatcatcattcactaactggtacctgaaaatattactggtgcaaaaagcatctcatcctcagcatgacatgtttggagaaaagtgttcacctgaaaatcccacaatttcggttctgagcatttggagtgatattgagaaatgagctaatttcaatctcatattctatgttaaatggaatatggaaatatattacgtatcattcaaaacatcaacaaattagttgcaatttgttggttttggtattgaagtggaacgtttaatgggaattcttgttcctaattgattttgtattttaagatgaaaataaaacaagtgaaaagcatgattcacaactgaccttaaaaatttgaaatgctgagaatagatgctcttgctgaaacaatttaacagctcaacgggaagtcgaacttgcagcacaactagctggtgtgttgctttcattcatcaagctttctccacgagtgtctgcattgctccggttggtttctgtattagaacggttggccaagttagtagcaacagcaccttgaccggttgaatcattttctctggtttcaagacgctccatcatcctagagatgttagcaattcctgcatttacttcacttcgaacttccgaaccaacatctgatatagaatttcctcgagagaacagcctctctttccaccctcttgtgctctttgaaaatgattctttgtatctaatacacaacaagccaaacgtacagataggaatgagataaaaaaccacaaaacccaatcaagtatatctagtatgaaaatggcttctacatatatcatacctcattgacatagcattgaattttgatttcagagaatcagaaaatgactggagttctgatggtcctgctccatcttgatttggtagtgaggaatgactaacagagttccaacagaagatgagaagtaatcacctaaatagaaacatgtattttctctacaagcacataaataataaaatgtaaacgtataggctaccggttcataagcgaaattccttgacgatttgttggaagtaaattggatccagatgctgaagaagaattttgatcagtttgagcataaggtaagtgtggattctgcggtgaatgttcatctcgaccagattgaagaggggtagatggaatagctactgaaactgcagttggttccgggtcctcttctaaagcagaaccagaagaaggtatgctaggatgagtggaaaacaccaagtattgcgggcgaccatgagaagatgatcgacccctctggctttcccttctacgaatgtggtgggcccttcccatcgcagcagcagcagccaagtgctggattattctctcttcaagttcagcatcatttgcaccaacaggtaactgttcatatggagcaattaatataagataaatttaatagacaaacaaattcagtagcaacgaagaaaaaggtagtcagagaacgaacatgctgcaactcaaaatcaccaagggtgggatgatgaaatatagtgccatttcttgatggagcggctctgaagtttctctctcgttctactgcctcaagtaattcttgactgtcaatatgcacatcagataagtcattgaaggttattgatggtgtgtcaacactcaatgaaaaagaaatagaaaaacctgtcaggatctttcaggctaatgggttgccaacacatgggacactgggaacttctctggcacctagaagattaagctgagtgtcagatttcaagtctattcacccaataattgctcaaccaggttaaacttatacacgattttcacaacatataaattatcgatgaacaaaggatgactcatagaaagttcaaaaacgaatcataaataggaacattgaattaccattcaagaatgcactggaggtgaaactcgtgcttgcaaatagtcacctgtaggccaaggacaagaggttaattgccttatacataagtaaaaataatagcaggacagaaattcctttgtagagtaatatgtaattagatatatagccacaataggcattagcttgcacgaattaggaaaaacaaagtacaattacaagatgtattaccgaggacggttcactttcacaaaattcctccaggcatatgctgcaagtgtcctcacagggatcttgtactcccccatcaacaaatgcagcaggtgatgtcaaatgactctcaacattctttcctacttccatctcctgaaccttcaaaaagaaaatgcaatatacatcaacagatataa

SEQ ID NO: 95630 - DNA, 666 bp, Cannabis sativa
gctaaatcacaactggggacttaggttttaaaccaaaaacttatctactgtaacttaacatggaactaccataaactagcagggaattaacaacccaaagctctgaaaccaacacgaatcgacaacacgaattttttggggaacccagcagcaaatccgggtaaccggttttacaagtcctataaaaccggttaaccggtttacaccagaaaacccaaaaaaattctaaaacctaactaaatctattctaatccttaccaaaccttccagacctgcatattataccccaatagacatattctgagcaacaaaacaactaaccaggctcagaatcaaaaatcacaattaaagagccaagcttgagttctaaaactcaaagcttgctcaactaacaaaacaaccctcaaaataagcttaattcaacatatctaaacatgattcaatctcagaaaacaataataaacaataacagcaaccacaacaccttaaaacccaaatcacacaaaaactcataacttgaaacttaagaaactaaggaggaagttgctagaggctttaccttgacttggatttacttagagctattggaaaaaacttaagatttgctgaagaaaaaaagaaccctagctagttctaggaggctcgaaagagagagagagagagaga

SEQ ID NO: 95631 - DNA, 575 bp, Cannabis sativa
acaaaaaatcgcgtcaacaatatacaattatacataatcataacagcaaacatgcacttaaaaaaatatgataaaaatttgtggttccaatacacacgattttaaaattattgcttattcaagaatttgtgaagtatttttttttttttttttttgaaaactgaatttataaagtattgattgatattttttttttttaaataaaatgctcaagtttaatttttggcccaaggcccccaaaatatttggaccgatctcgaaaacagaataggcatgcatttaggggtgttcattagatcatattaagtagatttaaactcattcgatccgatcagatctaatccaattttttattagatattagattttgtcaaccggcccaatcaaatcgaattaactcaatcgattcgatttgatccaatagatgaattgaattggattgattctaatcattaaatgcattaagtgattttctattgaactaaattggatccattcaatcttttttagtgatcatttaaattaatttcattaaaaaaataaaatataagaaaacatagtttaaaatgcaattc

SEQ ID NO: 95632 - DNA, 928 bp, Cannabis sativa
  modified_base (615)..(617): a, c, t, g, unknown or other
tatgaggtaacatatatataatttatatgattaaatgaatataaattttattattggtataatggttttattaccaaatatttatatacttatgtttattcgtggcagatgccagtagtaatttagatttcatcttatgaacaatgtgtgatgatttgattcttattgtagataaatgacaatattcgcataatatactatatgattattattattacttttcttgttgagtcattgtgactcatgggtgctatgtggtgcaagtaaaggcgaagaaaatctagatcaaccatgaggtgacagtcttctccaacaatgtacatattgacctcaccaacgtgcatgttgagttgttaggagttgttttgggctggttgtatttgctgtgttttttgattttgtgttagaatggttgtcgtatatatttctttagcaaaactttttataacatggattcctggaacatgctttttatgccgttataatgtccgtttttagtgtttccttttagtcaagtttttaatattttcacgatttttaataattaattaatctattagtattaaattagtttataaaattcacacacttggcgtccctatagattagggcgtnnnaacttggtatcagagcagccatggttttaaaagttctgaagactagtcgaatatgtacatttgctgcgaagacgggtcgacccatggtataggaaatatttatattatttgctattggattaaaactctcacacctttacaaatacataaaatatcaatatactatggtgtaaaacatcaatataccatggtataggattttttaatattacaatgtcaataattgtaattggtaattatgagtatattgtgttttgggaataaaagtgaacaagagttcttcattttatcactttgtcccactttagtat

SEQ ID NO: 95633 - DNA, 761 bp, Cannabis sativa
catagtattagtttaagagaccaatttatgagtttattaagcatggaaattcaaatttccctgcctttatttcttgtatataatgatagtgatggcgatgatcagggatcaaggacagagctacatgaaagtcggggctttagcaccccgaaatattttattatacaatattttcaatgatagttttgtaaagttttcttattttactttaaaaatttattgaatagcccctctcaaattttatttttgcatagtattgcctccttaattataaggtttttctacctctgtcattggtgatgatcatcatgatgatgatcatgatcgagtagagggtagagattggactttgagaaatgatgtaaaaagtgataaggagttgtttggtttaaagcaaggcaattaatgtatgatcaacttctctaaatgttacaaatgtaaccctattattaattgtttaaaataattttcttctggtttttgaatgaaaatacaatttatttctattaaaataaaaaaaaaatcatagttctctttataattctatttatataaatttattatgatatttaattatataaaattataagtgaaatgtgcaactacacatctaaataaaagctaatatatgtagcaagttatataaaaatataactatcataattaactattaaatagtcacctatatatatataatcggaaataaaacaaccaacattattacatatgtataagcacttccaatccttattacacaaact

SEQ ID NO: 95634 - DNA, 973 bp, Cannabis sativa
cacgattattacgagtctgagctccaccaccacgtgccattgaagaatcaaagaatcgatgtaacagaagcaagagaagaacgaagttgagggccaaccaacaatggtggctctgataccatatcagtgattgaaaagcaaagcaaagagaaaaggaagaaaggaactgaaaatgttattcaatgctcaaaatgaatacaagctaagactctgctatatatagcagcagtagttagttacaatgatccaactaactctcaactaactaataactaaccaaacagactctaacaacttgataagtatacatactacattgcgaattgcgtttggtctaaaaaggagagacgtatatatatggagttcatatatattttagagaaatgctaaggggggaggttaaaataggaagcaccacaagtgacatatcttattggtgttcaatatggggtctcacacaatttcattaaataaatattatgggaaacttttagctataattaattgttgaaatattaaacttgatttgacatagttaatttttaaaattttcttgttgctaaaaagtttctagactattcttatatttactaaagtgtctcgagtatttttgtatgtttagtattcttcaactttctagaattatttttcacttgtgtgattagaagatagaattatgtagaacaatgtaaaagctagccatttaataatgtttctagattaattcatagagtcctataaatagagatgtaatcccatcattttataccaattagtcacaaatcacacaagttgagatataaaatatagcttcttccattcaagtattctctccgaaattcttcttattatccaacaaagtgataccacacccaagtttgtgaagaaaaatggcaagtggaggaatgattcactactacaatgtaagcctttagcttcccttttttcaacccaatttataaaaagggaagct

SEQ ID NO: 95635 - DNA, 668 bp, Cannabis sativa
taattttctacctcgggtttaaccagtttaactccattttggcatatttaattgacaaaattattttattatatatttatatattttggctgagttgttttgtgatttatcatatatatcttttatcgatttatttatatatttcggctgagttattttatgcttacacttgtataagtggtatgtcctttctaaaacattagcaaagtaaaattgaatcgaatgtatcggttatacatcggattggtccaatattgatagtggaaatgatgtcataaatttactgttatgtcttttctaagtcgatctcacttagttgattttaggtcaattgatctcaatcctaagatggttaggttctaacttaattgtattgaatgggttctttgacttgttcgttaccagcttacctgtaggactatcccatacttacatcttggaaattcgatagtgcaatttagtgggagtgttaatcataaatatgaaatctataacttccataactatttagaagttaaatgatggtttcctttgagcttggctaaatgcgataaatgataaaatgctcattttagtaattacattagtttattaaaatatcatttacaagtatctaagtgttttaaggataaaatacattgaatgataaaatagtaaatttgtcccta

SEQ ID NO: 95636 - DNA, 547 bp, Cannabis sativa
ggttttgtttacagcttttacttacctgtttacttgtaggtgagcaactatagaaaaaattttgataaataaaaaatatatacatagaaattaatatataactcaattgaatatatcaattaaatatgtgaaaaataaaattaacaaatattattaaattaaaacacttctagtaatataattagtgtttgaataagtctaacaatttcatgccatgtttcccctttatttattttttaatgcttacaatacaataataataataaaaggatgctaacttgattcttagtattttcttgtcttcaagtcgtttatgtgatgtttggtattggagttgggagagctcaggccatttctcagtaaaatcagtttataagttcttacaattgagcaaagagttgggtgcacaggaagataatttcgtcttttggaatactctttagaagttaagtgttcctccaaaagtgaaatacttgttatggcgtgctgccactaactgtctgcctacaaaatctagacttcgttctagacatgtgcctgttgatac

SEQ ID NO: 95637 - DNA, 924 bp, Cannabis sativa
gttacatatacacatgtgtatacagtagtcatccagttgatatttaacggtaatatttaactggtgtgtcaaatttacaaaaaaaataaacacaacggggttttgccactagaaaaaaaaaataagagaattaagtgtataaaaattaaaacataagagggttttgccaaaaaaaaataaagaaattaagtgtataaaaattaaaacataaaaaaatttcgccgcaaattgctctaaataaaatagagatattttggtcaatatattaattattcaactttatttttatactaaaccaaattaaaaaaaaaattaattacaaaatttattagaaaataaaccataataataatcctattactattatcattattattcctattaccattacaattatatttagtaaaccaaaccccaccttaaaaggttaattttaatattaaagaaagaatgaaaccctaaatctcttcttctctcccttagactcacgcacctctctctctcttgctttccctaaatcgtgacgacatcatcagcaatctctccggcgaacgacgtccttctcctctcctcgtcatttgtggtggctgttggtgcagcagcaacattcggctttagttcgcgacaaggcaggtaccttctttcttcataatcatatttgctcaccctctcttagtttctttcatgggtgcttcttagttcttagatcggttcaatactttttttttcttgttgttctttaaactttaaaatctgagcttattttattattccttggtgattttgtgatcttgggaaaaattagaaattagaagaagagaatgagaatagggtatacagtttaatatatcttatataccaaaaacttgttgaatgtattctaattagtttatgttcaaattggttgtgatgaagtgtttggtg

SEQ ID NO: 95638 - DNA, 503 bp, Cannabis sativa
ttaccaaacgccaccttagttttaaatttaaagttattttgcatctcaatttatacaattgggccaattcaaccttggataagctgtgatgagaaattgggcttcctttaggcttgatgtaaagaaagcccaactactgagaaggacatgggtcactaaatttgattgcttttgttactcgaaaataaaaaattaattgagcaatcaagagtattcggacatgagcttaattagaagaagatggaacttgggcccataaatttagagctatttttttttcttgtcacacaaaattacagtatattaaatattttcaatgtaagtatttttattattaaagccataaaaataaataacttaattataaattatttaccaaattaatacttacaactatgcaattttacataataatcaagaacagactgagaggaataggatttgagtagagctgtaaatacatgtgtgtcgtactgacccaacttatattttttgagattttc

SEQ ID NO: 95639 - DNA, 502 bp, Cannabis sativa
taagtattctaataattacacatataattttaaggttttagataacatgttataagaaattattatttatattaaatattaatttacatgaaaaaaaaaatataatccttattattggacttataaggatcaatactttttctaactcctagtcaagtttgctaaagttcttaagtctccttttctgttccaatgatttcgatcattagatgatttctttccccttatgcttatgtatgttatgtcaaaaagttcaattttattattattatagttttagaatttagaggatgatatagtgaaaatgacatatatttattataacaattaaataccactttcataaaatggtatgatgccttcacattacatacttcacaaaccaagtaaaaataatatgatgagtagagtgcattataagttatacacgaataattattattcaaaccactcactaagaaactacttttatgttgttgctactagtggtgatggtatccaa

SEQ ID NO: 95640 - DNA, 594 bp, Cannabis sativa
gagaggggtattcgaacttagaatatcaaatagatgtgaaacctccatacactataactatgaccaccaaaattaatttttcacattttaatttccttagttttaatcatttataaataacaccaaaactaatgtaagatttttctgtaaactagttttataaagaatatataatatatatactgtatatgacaaaaatacgcacatgtaatcatttagatgttgattaattaagttatgtttttcacattataatattaatatatatacaatgaacaaatgatatcagcataagtgaaaaatataataataataataaatatttagaataaattatcacatagaaataaaaaattttcactaagctatgttttttgtacccttaaattattttgcggtaaacgtctccaacagaattacagtgatcattttgaaatgtgccttttttttagtaatgaataattttattgaaaaaaaaatataacatcatataaacattaagttttatgaaatatgaaggagtcttatcaaaccatactagttctcaatccacccaaagagcatgccgagttaatctatgtgcagttttattgg

SEQ ID NO: 95641 - DNA, 617 bp, Cannabis sativa
aattttatttttagtaccataattttttaaaaaaattcttatgtggtcctcaatatttacaaaataaactattatgaaaaaaaaaaagaataattttatttacaacccacaaaatgataaatacaatccaatatttaaaataattaagtttaaaatattttttaaaaatcactcttaatattttttagttaaatttttatctcatattttttttgtgtgttaattttaatatttattttcataatttttttttaaatcatatataaatttttttgataaatatattttttttaagaatatgagtttgatgattttttttttaaaaaaattaatataactaaatatatataagataaaaaagtatattgtacacgcctataagataaaagagtcatgcgtgtaacatactgtttaaatcttatttttgacatgttaaatttttatgaaggtttcaaaattttacaagatatcttaaataattacaacgtatacgattaagaaaaaaattggagtgaaagattattcatgatatcgaaatagataaaggtctatctgtattgaatgtattgataaatttgtagggaactaataaaactaaaaaaaatatatatatattt

SEQ ID NO: 95642 - DNA, 1047 bp, Cannabis sativa
ccctcaaagcaatttctttcaaaatttatgccttggttcttcaaccaatttatagaatctggagcataagaatcacgtaatatgttaaaatctctaaaattaaattgccatatgatgtagtgtttaccatcatttgagagaggcaagtttccttccaaatccgtgagtgtgaaatcgaactggataatatttagtaagtctacattcatttttagtacgtggtatggaataattggcagaagtacttattctctttttacattaagattgtgataaacacatcttggaaattcaacatcgataaatatggtagaatatcgagaaataagtttagctattgtttcaaactctatgtgcaagttatggtgccatacttctctaatcattatggattgttcaagtcggatactcattctctcaaataataatgaattaagattttattaattagtattttacaagctgagattttatgaattagtattttacacgttgatatatatggatatatttatagatgtttttctaataggattagaataaattataggttttcgaatatatataggattagaatttaaaatggattaatctttttaattaaattatttgaagtaatatttatatattttatttgtgttaacttaatcttttttaaataaaacgtaaattgaaattcgtcttttttttttttaattatatacatattttgcatttttttcttttacacgtaatatctctaaatatgagattaaataaattataaaacaactaatattttttttatatatatataataatataatatagtcacatatcccagctaaatatatataaaatcagctcccattcctctttcacccattaatctaattatattaaaagttattattagttttttttttgttcgtaatttatgtttaataaattaataatacataatattcaacaaaaaagattatttgtctatttaatattttctcgaaaagaaataaaactaagaaaataaaaaaacatagagaaagacataacttttcacaaaaggat

SEQ ID NO: 95643 - DNA, 1732 bp, Cannabis sativa
  modified_base (66)..(73): a, c, t, g, unknown or other
aataatttttatagagtatcgctagccaattgcaagtcgacacatttagaaggtgctaggcaccannnnnnnncaatagcaatgctcatataatatatagtacaatctattataatagtatggaccatgtagttttaccaaaatgcccttcttgtattctatgaatgaaaaatgttttgaaaactttttctcatactttttgtgtgcacaattttttttttaatttttaaaaagaaaatgtttttgcagttcattaaaaaaaaaaaaaaaagctttttaagactatccaattggttctttttttttttttgaaaaaaaaaaataataaaaaagggaaaggtcatccaattagagaaaggaatatccaaattatatcaagtaattctaaatattaatattggatggagccaattttttttaatgtttgattttacaaatatggttatttttaaattcaaaaatatatatgtttttttacaaaattgattaatttttcattgatatgaataactacattttaaaaaatgaatgaatttcctctaaattagtacttaatataaacacaacaacaagtttataaaaattttcaatttaaaaataaagtgaaaaagaaataaatataaagaacataaaaataatatgatagcataactacaaaaccatgatcaaccaataagagaatcccaaaaatgaagataccaaaatatttaagagttgactgaaaaaaaatattaaaaatccattcacaaaatgggggaattattgcattttatcactttaaatattcttgatacttttaggtttgaaataataaataataaatggagaattttcttttcctcattgatttataaaattgtattagtggaggaataatattgttttagttatatgcatcaccttagaagtgggggaccctagtgatgattcatgtgtatgcttgatgcacatgataaaatgaaataactttcataatataaataaataaatatatatatatatatattaatatatgtatatattgagagagggtacttatagtagggacatctttatattttacatttaaaaaaattataattttttttataaaaatataaacgacctataacaatattctgttagtatttaaatttttttgaataatttacgatattaataatatattgcacgcatataataaaataaacacatgtgaaattaaatgtctaaatatttgaatattatttttgatacattaattttttatatataaaacacttattgctataactacaatatacaccacttaatataaattggacttataatttctctagttatcaaattcaaaaaggcttcaaccataaagataaaagtgttagcttgcactagatttttttttatacataaattatataaacaaaaaaaattgagtttgggtacatcaagtacacataaagaaattcagcaaaagaaaaagtacaaatacacaaatacacaaaagagttatggtaaaaggttatagagtactatactatatatcatggtcatgctatttcataatgaagtttaattaataataattgttgcccctgaatttgcctaaaatacgtggaccagtcgaatagggacacgtggatcagataacttgtaaatatttgattgatctttgtacgacacaaggaagcaccctgggcataggtcccggaggaggcacctggagtacaaggtactcccggaagctcgcata

SEQ ID NO: 95644 - DNA, 922 bp, Cannabis sativa
taattatgggccataggtattaaagtgtcaagggctaaatgtgtagataccttaagggatatttctaatttattgagggactaaattaaaaatacttaaaagggatattaacggcatgaacagccagaattttacgttttgtaacagttaaccacataaacacaatttttgacggaaaaatgtactaaacccccattcctttttacattttacacttccgttcaaaaactctaattaagtaccagagtactactacaaaaaatagtatttgtgtcggtcaacgctactattcctagcgttgaccgacgtaaatagtgtaacaaaattattgctgtcggttactaaatgaagttataaaataataatttgcctcgttatcaaaatgacgctacaaacacaaccgacgacaaagaaagcaaaaatatcaaaagtgaaaatgttatttccgtcagttcattataatcgaataaaagttttgcgagcttttagaaccgacgaaaaaacaaatgggtaaggttaaaaactgacgaaaaatacatctaaatccctaagtccccaaatcaatcccactgttcacattcatcttcaacatttcaaaagatgaaaaagctctggcgattggctgctcccctctcttcctccatcctcgattttcgctccttttcttcctctccattgttggccttcgctcccctctcttcctatccattgttggccttcgctcccctctcttcctttcaaatcctaccaccctaatactttgattttgacccactgaacccaatcgtttaattctctctctgattcacacaccaggtgtgaggtctaaaactccaaggaaacaaattcacatccacattcacaggtatttgcttttatgtgtatataatatatgggttttgagcttgcggtgggttgattc

SEQ ID NO: 95645 - DNA, 745 bp, Cannabis sativa
accatcaggcaacaaagctgataataatcataccttcaacattatttatgaagaaatcttattattaagcaatactatatagaagttcttatgtatgattctctcttatatatctttttactttttatcaccaatatttattatacattttaatttaacttattactattatttctttttacatatcaaagatgaatcctcagtataaattactacgagaaattacaccaactactagaggatggatagcaaaagttactgttattgaaaaacttatcccacgtctctctcgcaatggagtattgtaccaacgtataattcttgctgatattgaggtatgtttattacaactcataaatctaaataaactgtataaattaaatttaaattttgtttcagctacaaaatataagattattaattaattagctataaaatctctacaaaagatactttcttaaatcactttgtgtatttttaattcattataaatagaaaaatcgtacacaagctactctatatgggaatgcaatcaatcatttcggagataccttaaatgtttcacaagtctacttaatttccaatgcttatataaagccagtacaagaagagtttagaattgttgacaatcaatttgaatggagcctcaacacttctacatcaattgaggaaacaactgaagaaaaccaatggaactttgaagatctctacaacttgtattatcttcatcaactagatgcctacg

SEQ ID NO: 95646 - DNA, 552 bp, Cannabis sativa
agcttcaacgagaaaggctgactgggagtcttactgaaagggtttattccaccagaaggattggaagctattgcaacttgcagagcagcagtgttttgggtagagttatttggagttgtagccctggtaggggtttcagggacattcccttgattttggttggtagacatttctctgactcagaggcagaggccaaaaggctctgataccaagtgaaatatttagaaaaatgcagaaggatcaaaatcacagctcgaaggagtctgtgtaggaaacttttcatttatagaagaagctgatacaatcaataatcaaagatgaccactccatgtcttacacgtgtagtaacagaaaatacaaaaggcataataatgaaatcagcataatacagagcaaattattggggattctcaattctaacaacctccagattcctgggaccacaagatattcctcatagcagaattcagtgcattctgttattcaattcttttcacatctatatggtggaacatatagagcattctataaattgagagtgcaattctaagt

SEQ ID NO: 95647 - DNA, 627 bp, Cannabis sativa
aaaaataaaattttaaaaacataaattttgctttcatttttgtgattaaaaaattaaaaaaaaaataaaatgttatcaaacacccctatatatatttatatatataaggataaaataaattagtgtagaaaaaaaagatatatatatatatatttatatatatatatagagagagagagagagaaagaaagaattttaaataaaaaattaatgagatagatctgatttgggggtttttatgaaaaaatcggtgggttttgttactgagtatccccgacggtttaaaaccatcggggatactcattataaaatctcacccaatttttaagttattgtattaaaccgtcaggaattctttaagactatttaaaatcgttggaaatacccaattatagtcgataattttaaacaataacaaatttttaatagcgacagttttttaaaattacgaattttaaaccatcaggaattatgctttttgtggttgtaagaattatcttgtcaatcaagtaagaagaaattagtgaagttaatgttataaaaaaaaaaaaaattgtactgtgagtctaacctatgagtacattgatacaatcattgaagaaaataaaaattttgaatccttaacta

SEQ ID NO: 95648 - DNA, 799 bp, Cannabis sativa
  modified_base (749)..(753): a, c, t, g, unknown or other
atatattaattatggtgtagtttttaagagttaatttgagtcattggattaaatcaagggcaataaattattatccctattgataagtaaaatactcaattcctactataatagctatataattaataaaaggttatcactgtaaaaaaaacgtggcaagtttcttttttctttttttttttttttaattttcttttaattaaaattgataataaaaatatgataccctaaatatataatacccattcctttcactttaatatattctctcttactattcatcatctttttcttttttttcttcactctctacttcctttcttcttttttttttttccactctctacttcctcaagttctctctatttttctctattaacatataagttttttattttttttttcttcttcatcttcttttcatttttttatttagtttttgaagttcttagtcacattttcggaaaatataagagttagtgtattttcttattctgattttccagaacttgcttgcaaatatagtacatctagtattgaggatgtgcagaaaatagtttttttaatcatttttttcttttatttttttatttgttttagtattgttttacggttgtttatcatgatttatttatttgacgttgatttcactgctcttgctccatctcgatggaattaatagttattttctgggttttctcgtgttgctgtgttggttctattcgtgggtgtagaagatgaaggctatnnnnncatttcttcttcgttctctttggctatttttgtagtttttttattc

SEQ ID NO: 95649 - DNA, 501 bp, Cannabis sativa
tctaatttaaatttaaattaaaatttatataaaaaaataattatttaattttattgatacttttaaattaattcaattaaatatttaaaattattattttctctaaaaaaataaataattaattaatttaacagtatttagttttaataaataataaaataccattaaattaataattttctttaaataatcatatgtaatacaaaagagatatttaaaattactcttggcaccattatatactactaatatgaaaaagaaaaaaattataataaataatagtaatatataacgttaaattgttattattaatttttaattattgttatcatacataaacacactggcttacatattttatttatattagctatacatttctctactttacaccccaattttgtttatatttattttttaaataaacaaacttaatttatatataataatttcccacctattacataattaatattttattttatataataaatacattat

SEQ ID NO: 95650 - DNA, 700 bp, Cannabis sativa
accagttacaaaagaatcagtcaattgatcaacattatgaaaaatgacagaacgaacctttgaatccctgataatttcttgaacatcttttgtagtactaaatactgataggcgacgactccttcctttaaatttagtcttacttgtgttgagaatgtgagaaaaacacattgcatctacttttgttaagatgatctcaaacattaaatcatggacataacaccatctttggaatccaaatctaacatgaaaggagactaagtttctgtggatgagctcattcaagtattcttgagctacttgctccatcgttttatctcttttcgattcaataaagccctcagcaatccaaattctgtataatctttggtcgaaaattaagtaatcttctggaaacattccaaaatataagaagcaacatttgagatgataaggcagatcatgataactaaaagacaacactgttaaaacgcctgtaagctggggattgttttcaaactcataattgagattatcaataactttttgccattcaaactcaatcttctcttttgttgacaataaacttgctatggccacaataacaagtggcaaaccttggcattttcttacaatttcacaagacatattgtgtaggtgttcaggacaacatctattcagctcaaaacgatatgcccatttgcaaaataactcccaagat

SEQ ID NO: 95651 - DNA, 536 bp, Cannabis sativa
atgtgaagaaattttcaccatattttatttcctccaattgacaggctcctaaacgattgggaaaatctgttgaggaattaaactttactctagcacctattcgttcttcctttgaaaggatatcattaaaattcctaaacacaatccaaggatcctttccattcagcatacacaaatccttctagagaagctttctttcttcttccttattaaaaccatatacaaaagtcacctaaaattgcttcctgttatcgcttgttactactttcatgtgaatcatttggctggaatactacaaaatatcagccacgaacatcaatggattccaagcaaccataatacgaccacctttatgccatgctatgttactagtaaaacaccaaacaaaaaatatcttaacaaataaggcaccaatattatgggccttaactctagtctcaaggagaccaaccaaaccaatcttttgttttgcaatcataagctcgactgcatttcgcttctcatattggtatattcctcggacgttccaagataaa

SEQ ID NO: 95652 - DNA, 947 bp, Cannabis sativa
tttaattttttcggggccttcaaattatggggcctggggcctcggccccggctgtcccaccttctgggtggccttgttcccacaccacacaacaagcaatgttgatctatagttggatcatattttaatattcgatttttggtgcgaagcttttaccacattactaaccctatgataaatctatgtttaggaataatcaatctattccaaacaaatgtacttcatggcaccttagcttcttgttcaaatagcatcgtatgcctatattgttgtgaaatgaaataatcttgattcatattttctttattaaacgcatttttcacagcaacaaatttcttccaataccagctacaatccgtgggagtctcatactcctaccaattttagtccaccaaatgcacactatttatccatttgacaaataagttgtcattttctttggcgattgcccaaatatatttcttcattgcatcctggttctattcttgaattcttctaagacccaatccacctgctttcttaagaagataaattattctaagctactcaaccaggagttaaagtatccaaaatctcttttcatgagaaagctttgtaaatttcgtcaacttctctaagaaatttcttaggtagaatcataatctgagcccaatacgaatagattgacaataacacctaattaatcaatgtcactctccccatatatgacagattttttgagctccacattctgattctattaatcattttttttccaaaatgctattacaatcagtagaagaatttttttttgcgcatattagaattccaagatacctgaaagacaaatgacttcgagaaaggacatatacctctaatacccgattaacttctgattaagccatgccactacaaaaaatttctatctttgcttcattcgacaacaacccaaatgtggctgagaacaa

SEQ ID NO: 95653 - DNA, 880 bp, Cannabis sativa
taaagatccagtcttagtcctgatgttggaccaccattttcatgtcatcagtaacctttgtcttggcaaccacgtccatcatgtgttggatgaacttcttcaaactttctccttgttgttgcttggcgcttatcaaggagctagcttccaaatcataatccttggccgctataaactgtttcttgaacattacttgtaggtctctccaattgtggatcgatctcggagacaacctcttccatgagtcctctacggacttacttaatgttaatgaaaaacacaaacatttaacatcatcactggccttggaaacttgcatgatgtgattgtatttcgataaatggtcccttggatccattcgtccttcatacaattccatctggggcatcctaaaatgctccgataatggtgcatgaataattctcttcacagaaggctctgtatcctcttcctcagagtcagatacgacaccactttgtttcctaaagatcttttcaatgatctttgtcaactcttcaactttacattcaagatgttgagtcttatcattagaggattctcttccgcaaatgcggtcgttaatgtgattcttcaaattgtttccatggggtcttgcttttttggctttagctttttcattttaagcatccagttttctttggagatcatttgtaaaaggcttttgccactatcatccgatatcggatgcacttcttcaacctccttgtcatggttgctaaaatcactaagaaggggtgttttctttcaagactcaggcttccgtgtcccagcattagctttgtctttttgtgtgactctgcctctagaattggtttggtcttcatgccctgaagcatggtatgctttccttttctatttt

SEQ ID NO: 95654 - DNA, 1134 bp, Cannabis sativa
ttgttagtaaaaattgacattgtttagttagattctttgattttttttaggaataaacttccggcttaggggttaattgaaatcgaaattggtaaccacataagggtctacgtccccaagcaaaccggcataggaagcaccacacttcgtagcaccaagatatgagctaaactattctcttttctagcaacaaactttaaaaaatacactgaaaattacacaatgtcacaacctcatgttaagagatggaaaaaatgaagtctcgaatcttaagattgggaaaacatgcatcttcagtcaacgtttaaatttaagatattttaaacaagaagacttctagctatatcacttcttgaaacccgcaaaatttaacaagaagaccatagcttagcttgtacagtccagagagtaaatttaaatttctgtttatattattatcagttgtgaagattaagagatcttctaatttacaattaaacattctctctcatatgatattgacaaaatgtaactattaaagcaaaatgtaacagggaaagggaaagaaggggaaaaaacctataaaaattaaaacaatgaagcagaagcagaacattttgtgaggagatgaagagaagaaagacgagggtaggcatcagaccatagcaagcctagttcgatcagttgcagagacagcgtaagaatttcattgagattttatgaagattctatggaacgacgagcacagcgacgaactctcctgcaaatttccacaaggtgttgttagttttagcaaaattaaattatgaaattaaggagaatatgaccaattagtgtactttttacatacttgttgtaagcctgaatatcatgttgatacagttgagcagcctcaggatttgcaggacttgcgggattaggatcagttagaagtgactgcaagaaatgaattagtgaacaccacagcatcaaatacaaatgcagtgaaaacacagagataggtttggttggaagcagtaatatagagttttgaaattggaatattacctgaacagacgttaaaattgtcgagacattgtggcagggtgaccatgcatcctgaattatatccatacacagtgtaccatcatgataaactgttttgccaatgtcaaa

SEQ ID NO: 95655 - DNA, 782 bp, Cannabis sativa
acaaggacccgaagctggaaaaggacttagacccaggcccaaacctgggacccaaaactgaaacttgaaaaagaatgtgatcaggaccatggaacaggatcgggaccgtgacctggatattgacccggactcagaactagaccgaacatagcccagatttcgggttgaaacccagtcctggacccagactagcaatgacactcgaaccagaacctgaacacgaacttgggactcgatcccagacccagacgaagcccctgacctaaattggaattcggacctagacatggacacgaacccatacccagacccaaataccgacgcagacctagaccgggattgaaacacgggacctaggcccagacgcagacgcagacctagacacgaacatgggatctagaaccaagacccgaacctggaccttgactcagacctggacccagaccgagattcgaaaaacccgtaccctgacaccaacttggacacagacccagacccggaaccaaacttggacctagaataaaaactggaaattgttactaggacccagacctaagacgataaccaaacccaaaccataactcaaactcagaccaaaacctggaccgagaccttgattaggactgggacctgagacctaagactttaacctggactaggtttggcaccgggacctggacctcacctggtcctaaaccctcacaagatcctgacactcgcaacccagaccacgatctagacccttaaaaggacccgaccctaaaccccgacaaagataggga

SEQ ID NO: 95656 - DNA, 507 bp, Cannabis sativa
attgcatagaaattgataatagggagataattatattaggccataatcaatagaaataattgaagtcgaagccctagttcttattgaccgttaatgtcctatttaatttaattgcgtattcttgcactatttttattttctattttttttttactcaaccaaatagaagtagaagtttaattttaatgtacttaactacaatccttgtaaaatcgacctcactcttggtgagtttactacttgtaacgatacgtgcacttgcgtgtgcaaaatatcacaacaagtttttggcgccgttgccggggattattagttaatattattaaaaattaaattttgttctaatttggttttcttttcaattggagtactaactctgtttgtcttaagatgttatttttttcaggttcattagtttatgagaagtcaaggtccaactgccagattacctattgaccttgagataaaaaagacttgtagaaagaacagaagaaggaagaaattgga

SEQ ID NO: 95657 - DNA, 997 bp, Cannabis sativa
ctttgcggacgacctaattctggtaggtcgagcaagtttagtagaggtgaatggattctagagatgtctagagagtttttgttcgtggtctggccaacaggtgaataagctcaaaacatctattttctttagtaaaaacacaccgttaagcttacggggtgaaatcaaggaggtgttgggaattgattaccctgaaggatgcattaaatatctggggctgcccctctttagatcgaggcagaaagatgttgattttaacttcattcttgataacctcatgacaaaacttcagggttggaaagcaaaaaccttatctaaagcgggccgagctactctcattaaatctgtaggtttggctatgcctatgtatgctatgcaaaccacgaaactctctacccgaatggtaaataagattgatggcttggtaagagatttttggtgggggtttgagaaaggaaaccatgggattcatccaaaggcttgggataaactttgtcttcctaaatctttgggggggtcttggttttcgaaaaacaaaagggatgaatcaggcctttctggctaaatggggatggaatatcctcaatggaagccaatctttgtgctgtagagttctaatggccaaatatctcaaaggaaaggactttctaagttgcaggttcaaagattctgactcttggttctggaaaagtgtcgttaaagcgaattccatcttgaaaaaaggggcttgcaagttggttgcaaatggttcgaatactaagatttgggaggatccctggattccacatcgcaaaggcttctgtccgaaaccgaggggggatgcctcttccaactttaactatgtggctgacctcatgtcatgtaacgggcaatgggacatccaaaaactccgagatacctttgatcgagaaacggtctcggatattctaaaaggtggccatccttccgggattggctccgatagatggatttggacgttagaaagcaagggttgctt

SEQ ID NO: 95658 - DNA, 572 bp, Cannabis sativa
catgtctacgaaaacggcattcccgacttttttttgaatatttatatcgaattaaatcactttttatacaattttagatctttcaacaagaaacccttaccccatagatttattcgaaattcataaaaggtaaaagatagcttgattaaacctgtgattgatttaagaactttattttatctgcttataaaattaaaacgagatatactttgttatgtaatcttatttccaaagttgatcggaggaaggaggtttggaaaagacttagccttccaaagtataaatttattttgattgactatgcttaatagatggaaaacaaaatataaattattcaaattttggtattactttaaacaacatttgtgttgtttgtagcagccatgaaatgatcattcaacatctcttctttggtggtacaaatagtaataagatcttggaagctctcaagaattggttgaattggaacactacagctactattgttaacttttgaagtgaatttggaagagcaaaatgtcaaagtgtaaatgccaagtgtatgcaacaatggtagctgccgcagtatatca

SEQ ID NO: 95659 - DNA, 627 bp, Cannabis sativa
aatcttcttcctaaggtaatagaataccacatctaaatgctacagaaaagcaataaacacatgtatcagaaaccggtttttgaaagaaccgataccagaattatagactcaaatagcaaagacataaaaaataataaaaagaaactagtttcttacactgtcacacagaaattcaccacaagtatgaaactgcaaaagtaaaatacaaatgtataagcaaccatcaaatcgtgatgattacatgcaaaaactctacaaaaaaacggttatgttcaaaaaaaaaactgaaccaaaaaaatttaaatacctaaaattactaaaataacctaaataaactacaatacacacactatgggctttaaaatcccataaacttgccaaagtttaaaaaagccatataaatggatccatagttaaatatgccatatttatcataaaaggtttaaaaaaaccatacaccacgtaaattctactatttttatttgattctagaaaacaaatcgacataattaaaaaaaaaaaatctttaaaaattcaaatctgaatactaagtatgtagacataaaatttaattccaccactaaaataaacaatatatctcaaaataataaagtatgtctcaatatc

SEQ ID NO: 95660 - DNA, 831 bp, Cannabis sativa
ttatgagattgtgtttgttttattagtatcttcgtactaaaaattatatatttctttgttatatttgattgtgaacttagtactattgttaggacttaggagggtgatactgatacatatgaagtttagtaggtaattttctgaatggattcttcaagaatcaaaccccatgagaaacctatgaaatggtcttggaatattccaaggtgcattattttcatttttttccaagtgaacttttgagtataatttgatccttggaccttttcttgattaatgtttactgtctagtattgaggtaacagagtatatataaagcttataaatacatcatttgttttagtgaaagtgtttcttaaatatataagcattgaattcgtaataaaatatgaaaaatgtgatgggctagaataccatctttcaaatggaagtgttttttttgcatataatttgggattttacatcattttgtagttattttattttgatctaatgataacacatctgttgtgcttgttttcttatgttgaattatggtttgttatgtttcttgggatattgtattgatctataaagtgatcagaaagtgttaaatctcgagtttgagtaagatcgattcgagatagtgattccaaaactagatgcagaccaagaatcttacctatataatgccctgtgtttgtctttgattttcttactttgcttttttctttgattaagtacttgaatatgaaagggaaatgagatatttaatgaatgatgaagatcatcattagacctcattgtttatttattaggttttttttttttttttgtttttttttctttttt

SEQ ID NO: 95661 - DNA, 756 bp, Cannabis sativa
agttcgattggatgttggatgtagtaaatttttaggcactccatccgacatccgatacgatccaattgaatatctaaaataacatccaatctaatccgatcacaaatagatatctaatatttggtggtcagttgtaattggatcgatcgattggcattagattggatcaatttatgctagtaacattaattgatggtattatatatatactatataaatggtaagtgcccaagttatgtttagttttattttaagttctggtttttttgttagaaaaatattatatgcaatttcaaaataaataatgttcaatatagagtgataattgtggaaagtataatagtaaaatatattagtactaggaaataaattgcggtttgcgtgcaattgtaataattaaatcataaaattatatcaacttttaaaatttgatattttttatttactttttttaatactgaaagatatttattctaataagcttttattttattttttcagaaacataaattaatattgtaaaaaaaaaatcatcataaaataaagatatcctcaaacgtgaaaaagatattataaattgaaaatatttcacgcaaaacatctaaaaaaaaagaaaatttataaatttataaaaaatttatcacagttttaaaattattgtcattactatcttgtaatcgttactacatttaaacttgttatcattctaaaataaagatatcccaaatattatagtgaaaaggagattataaattg

SEQ ID NO: 95662 - DNA, 504 bp, Cannabis sativa
attgtttggtaattaattacagtctttgtgggaacgatacattacttatcattatataacttgattcaactacgtatacttgtgtattagaattttcacaacaatgttgcaagaccacctattacaactatgacctggaggaggaccactagaggatcatcatgtaaatgagagctaatagagctcactcataaatactaatttcctcagatttgacaggagttggaaaatcattgtaagcaaggcacttagatagcaataaaaaatttctatttcttcttctccatcacttctctgcaattcattcatgttcttgagttcataaacactttaatcttatctcgcctaaaatcttatatttttcggccatagcttggctgacgagttcttgatgtcaacagtttggcgccatttatgggaacaacaagcactaactacgttagttcctaaatcactctactgtttcgagatgcgtagacgttcacaatatcaacaagaaaatgg

SEQ ID NO: 95663 - DNA, 1004 bp, Cannabis sativa
acaaaacaaacttagaaaaaaaaaagcacaaaataaaataaaatattataaaaaaattgtaaaataaatattataaaaaattataataaaaaaatattcacaaaaaaacaaaaacaaatcattttttggtcaaagtttattggaagtacaaaattatggaaactttcaaaaaagacattttaattatatacataaataattgagcattgctattaggcacgagtagtgcttagcaccttctcgatatgtcgtgttgcgattggctagcgatactccctaaaagctattatattaaattatataggaccaaatactgaattggaccaatagcgatattaacacataggaaggtgctagacactaatggtgtcctttagcatttctctaaataattagtggtaacatcaaaagatccctaaaaggcttatttcattatcagtgtaaatatattcagttaattaaaataactataatgataattgaattaaaagttaaaaaaaatttacaggtaagtggagccttacttagaattattgctcgctataggaacaagtttaaacaaaaatattacaaagaaaagaatcgaagagaaggaaaaacatgaaactttaccattttaattacaaaatggtccctaataatagccatatatgcacaaggagataatagaccataacactctaccaccagatagtagataataccatgcaatatcttcaacaaattatcactaatttttacttctaataatcttaaaatcattccaccaagtatttaacagagatgcaaggttagcaaaaaggagtcttaatcttgcttacggagataataggcaacaacactctaccaccagataatagataatacccagcaatatctccaacaaattattatcaattttcacttctaataatcttaaaatcattacaccaagtacttagcatagatgtaaggttagcaaaaagggagccttaattttactcaaggagataataggcaataaa

SEQ ID NO: 95664 - DNA, 699 bp, Cannabis sativa
ttattttcctctcgttagtcgcagcactcgtatattagtcataatgaaatattaataacaatatataacagaacaacatgaacacattatatgagtaaaataatatgatttacatgtttaaagagacagatgtgtctttaatttttatggtagataatcacatataggaattatgttgggtagttgagataatttttatatttctaggtcacacttaattaggagtgttcatctaatttaattccgattttatatttgaatcaaattcaacctcataatagcctaaattcaattcaatttaatcggcaaaaaaaaaaaaaaagaatgctgattaggtaaattattttagattaattattttttaatattaaattatttaatatttattaaaaaatattattattttcacatattaactataaaataaaataaattattattgcttttatttttctaacaacaaattaaaataaataggaataattgcgttaaaagtctctaaaaatataaagttgatacactttagttttcaaaaattgacagtaataatttctaatgtgaccttgggaactaaataaaacgtgatatattagtcttcttttctaatagatccgtttactaaataaaaattatatttttaattaaaataaaaaaacactaaaataaattaattaaaaacaaacaatttaaataattaaa

SEQ ID NO: 95665 - DNA, 596 bp, Cannabis sativa
tttaatatttctaaaattaatatttgtaacaaaaattttttagtgaccattaagggataagcattctatatatattccatctaaaatgaaatgttaattaagatttttctttttagacattgacatgtgttaaattgtatcttcgaatattttaagcaaaataaaaatttttattattgagattgatagatttaagtattttattaaatttcgaatcaattttactaaagggcacttgacgtgcacttaagttcaggagctatgctttgctacatgcacaagtgtcaaacaaattaagaatgtgtcactaaaacataatagaattagataaaattttatagaatacaataatctcagtagttaagaaattttttaacttacaacctgaaaagtttataaaatgcaatttattaccggtaaaagttcaagtatatataaaaataagaattagtgaatatgttttttttttttgttgttgcttaaataattagtaaaaaataaaataagtcaatggagcttcaagaactagaataagaatttatgaaagtcacgaaccttttcctttcgttaatatattttgtagtaataacaataac

SEQ ID NO: 95666 - DNA, 649 bp, Cannabis sativa
  modified_base (213)..(229): a, c, t, g, unknown or other
ttttttttttttttattttttagtacaatctcactgggataaaagagtgcttagaagaaaaaattaatacaatgaacaacaatcttaagtatttcacatcgagttttataaatttaaatttgaatcattaagtattgttggacatgatattacaggtgaaacttttacttctagaagtaaaaaaaaaaaaaaaagccactaaggctagcttannnnnnnnnnnnnnnnnggaaaaagggagaggtcatgtgttcgaacctacgaccttgaagctattaagctattaaatgattgtaaaataccattacgctacactaaaaagaaaaaagaaagtaaaaaaaaaagtttaaacatagttttgattgctaagtcaagacactaaaaaatttggaggttggtagaagaacttaactacaatttgaacttaaagaaacaacatagctttcaaggttaggtaagaacgcgtgaagctacctatgaacagctttagttgaaaatatatattttcattcaaatacatattataaagacatagttttttattttatttttgagaaatttatattaaatctctagtttgaagtaagtttacaatataaaatcaaatcattattttcattatatataaacaaatatcattgttatatta

SEQ ID NO: 95667 - DNA, 681 bp, Cannabis sativa
taaatactataacacatatatcgacgagatctttaaataccttattcatcatgttcataaaagttgttggagcactgtagtccaaaggacataaccaagaattcataatggccatacctagtacaaaaggcagtatatggaatgtcctcctctcaaattctcaattgataatagcctgatcggaggtcaatcttagagaagactgtcttttcttgaagctaatcaaataaatcgtcgatcctaggtaaagtgtatatattttttattgtcaacttatttaattcccagtagtcaatacacatacgaagtgatccatctatctttttaacaaatagtactgaagctccccagggtgacacactaggtcgagaaaatcctaaatcaagcatcctctaatgatgaacttttaattctttgagttccacaggagccattctataaggtgccttagaaactggctcctctctatgggctaagtctattgcaaagtctcttggagataactaattctctgccaggcattagggtttcaaaccttttatcataattatcacatggcctacctactttttcaattactctgtctgccacataagaataagtggccttagagttaaacaaaacagagtaataagagttatcgactgagagctgacctataataactgaagggctagcttc

SEQ ID NO: 95668 - DNA, 740 bp, Cannabis sativa
ttaatggaaaatttatacaaatagaaagagcttagtttcagaaataagttaaatttggctttctcctgaagaattcaaggatactccagttttcttcaaaaattagtctcagaacaatattcaaggatccctcctgtaagtttttatctcctagatatcctagccatactgtattctaagtaatattttctgtttctattaacaataaggataaacaaaagttactaacataaattgtgaaaactttcaggaaagaagaacaaaagaagagtaagagcaacctgacgagctaattgttggtggtacaaagcgccggcagactctttagtaacaggagaaataataccaatactcaacatccaatcttgcatctcttgtttggagcccatttcctcatcattcgatgcaccagtttgagagtttgagccagataagagtttctgtctcatcttctctgccagcatcaccatctctttggccttactctgttatagaacatgatcataaaatattagctactgatgaacttaagaaactttcacattgaacaattatcttatacgtggtgttattgcaatgtatgaaacagggtagttgcaacccagtctcctcctaatataacacaaaagtgtacgttataacctaatttattcagacgtttgctttttctctcttccaaatccaaatgttgggacaaagacctatgaatacaatcaattttcattttccacaattctcaa

SEQ ID NO: 95669 - DNA, 503 bp, Cannabis sativa
gagagatttgctgtctttggctatggaaatggaggttaagtcgaaatttagtatttcaaattagaaaaggttttgagttcttaatttccagaaacagaagaaataaagtttatttttttattgaactgcacatacatgacttaaattctcatgagtagattatgaaatgggggaaaagtggtctctttgtttacttgattaattaggaaaatttggattcagacagtggctatcttgtgaatggaaagacagtggctggtcaataaataaagtggtctctttgtttacttgattaacaaaaatataggaaaattctagaccaaacacatcacacgtggctaattgacatggacatgttgcttaagtaaatccaaaatactttgttttcctttggctgatgaggtgttgcattgtattcatatgtcaaaagctgtttgattatatcaatactttggattcttttatatatatagataggaataagtgacacaatttgtacattt

SEQ ID NO: 95670 - DNA, 608 bp, Cannabis sativa
attattatgtgacttagcttaaaaactagttattagttactagtgacaagattaagcttatatatattgctatttgtcaaaatatgtgcatcgacgttttaattatatgttttcttttattttatgtgactacgtgacaagcatttccttactgagtttagtagctatcaaacttaccatgtacatattaaggttgtaaaacttaaaaaaccagtggcaagtgagaccttggaggcttatgtgtgtactcgctgaggaccatataactgagggtggtctagggtacactccatttattttactaagtgttattaaatttatgtgtagttatttttatttattaattacagttgttctgcattttaatgcttgtaactaaattagtaaattatgaaaaagtttgggcgttacatttggtatcaaagccacagttatattggtcctgaacgttctcatgagttacacatatcggctaaaaaagttccacttgctaccgagtaagtattatttttgcatgattgtattttatgtgcattttagtaatttcaaaagttctttttattttcagaacccgagaaccaactaaccaccaacatcatgagactaga

SEQ ID NO: 95671 - DNA, 683 bp, Cannabis sativa
  modified_base (86)..(91): a, c, t, g, unknown or other
tctgctacataaaggaatcaaggactagatatctgaacggaaggagtcattatattctgctacacccaatgtaaggtttactaaannnnnnatgtgtttatttcattgttttatatttcatattatgttgttaataaatcatacatggtagtaaacctagatcccagtaaaatatttccaacactaggctcttggtacggattgttttggtctaaaggggccagagtatctacattctgatcggtagggactttggtgctctagtcggctggagatcaaggggatagttgcctcagggttttctttggccatctgagtcgcccagaaatcaagatacatgctcttggaatcaccaaggtaatcaaagtttccttcagggttggccttccaaaaattgtacaaagcctcgagagcagctgtctctaggctctcaacctccttcacaagctcctcctccctgatctgcttattcttgacatccccctccagtttggaaagaagagtctggagactctctttctaggctttatgattattgatctttttggacaaagagacattatcagcctccaactactcggttgtaggctaacttgcagctctttggtcagctctccaatcttggtgttagctacaagaagcttcttgctcacctccccaagctcattcctcacttccccgag

SEQ ID NO: 95672 - DNA, 715 bp, Cannabis sativa
gtcttcaaagattgatccaaacatgtcctattaactgctggatcaaccatgctccgccgagctgctctatcagttgcaatagccaattgtatctggaataaattgtcaaaggatttgatatgttatgtactttttgtatgatttagcaatgtatttactctcttcaatgttcatgggacaaaccataactattataactaggactggacctaagctaagacgagttaagcctgcacttaagggtaaagaagacatattttccttttaataatataaatatattttgtagtcgttgacccactcaatttcgggaccgaccctgattatagattgtttttcaagagaagaaaaaacatggattacctgatctctaagagcatcaacttgtttttcagactttactggcctacccttgattatttcaaccaaaatcactccaaagtcataaacatcactctgttcatcatctttcatcctgtggaaaaatcaattgcattttctgattcagtattatgtcaatctacacatgatactaagttcaagaacactataatctttacaacagaccttgtattaataatgatctctttggatccactagaattgacctgcaatataatgcagaattatgtaatcaaattaccaattcagactgattttgtcaagtacttaaacaatggaaagataatattctttggcttaccttctttcctgt

SEQ ID NO: 95673 - DNA, 797 bp, Cannabis sativa
aatttaatccataggggcatgaagatcgatcccatgtgtgatctttgtggcaggtatgctgaaactctcactcatgctctttggagctatgagaaggtaagaagtatctaaaactcctgtcgttttacaaacattgtggaattggagaaacggttccatgtttgatctgcttgtggatttaagaatgaaactctcaaagtatgaattcgaagatgtgataaaagttatgtgggctctttgggaaaagcacaacaggagattgaaccacttgattgggtcttcattgttaccctgcttctacggccaaacaaggagaagtctcgaacccaacaatggcctcgtattcgcctcagacccactgaattacccctactagtgtgatttgtgctaattgtgatgcagccatcaatcaagggcaagttggagttggaattggtttcctgtggcgtgactggggtggtaatttgatctcggctgggatggttttcattcccagccaatgttcggtggctgttgcagaggcctggctatcctggaagcgctgaaggtgctaccgaagactgataccaagtcctttgagattcattcaaattgcaaagtggtggtggaagccatcaagaaaacgaaaaactagttaaactcactaggaattgttcttcaccaaatcaagactcttatgagatcttcatcctgtataaacataatttttgtaaagagaaataataacgagagtgctaatttgttgtctaggaaatgcctagatgacaaagcctctaaatttttttacaattcttttc

SEQ ID NO: 95674 - DNA, 788 bp, Cannabis sativa
ggtaaatatctaaggcacgcttaatagctccataggaccgatcatccgcttggcagaagaggagactgtcatcagcaaaaaataagtggggtaatagaaggtgccctacgagccacagcaaaacccttcaatcagccaatgctttcttcatattgtaacaatcttgagaggccctcagagcaaattaagaacaagtaaggagatagtggattcccttgtctcaatccccgttgcggtatgatagaacccgtgacagcaccattaagcaaaaagctgaatgtgttagtgtgtaaacacatcataatgagagagatttagcgtatattaaagcccattttactcataacaacagctaagaaagaccactcaaccttatcaaaggccttactcatatccaatttaagggcaacataccctttgttgcctttctttttgtgttttataccatgaaccatttcaaaagcaaccagtacattgtcagtaatcaaacgattagggaggaaggcactttgagtttctgagataaccacagccttagagcaagcatcttggagatgagtttgtatataacattacatatgctaataggcctaaaattcttcatagttcttagtctttttactttgggtatcagcggtaataatgttttattgaatgcagcagggttaccaccttcatttagaacatgtagaacaactttggaaactgtatcaccaacaatatgtcaatgatgttgataaaacatcactgacattctatcaatactcggacttttatcggagcccatt

SEQ ID NO: 95675 - DNA, 561 bp, Cannabis sativa
aaccgtcttctcgtactgatcatacatatatatatccatcaccataattatatatatttataactatatatatacacaaatatcgcttaattaagcatgcaactaatttagttcaattatttttaaataagattttttaaattgttgttatttttttttactattataacacaaatatatgtttgtttaacataattatatgaaaaataaagggcaattactttatatattatttttttaatttacggtttgagtttttaaggtagttgcagcgctaattgcaatagaggttgttatacgatttttgttgcaatttaagttacagtattagttgcaatagtagtttctatatagaatcccgtaaaaaaaaattattttaaagtataaaaataaaaaaaccctaaaattaaataaatcttaccaaaaaaaatgagattaatattattttaaaaatgatatccattcattataatagaaaacaagacaagctagaaatctctctctcttttcttttttgaaagctactagaaatgttggaaaaatacatgttttttttttttt

SEQ ID NO: 95676 - DNA, 705 bp, Cannabis sativa
atataaatatgtactattctatgaaatatacacacaattcgaatcactattttctacactaaacaagaagctcatgagaggaaagaagcaacacttgataatcaaggtgaagatatgggatttagaaacatggatgaagttgttgttggtccaatgttaaatactaatccacagtcttgcagtcaagaaattgctgaaaaagtaaatggtgaaaatgaaggattagataacatcacggactataatattttaaacttcaggctactatcatcagtggaagatgagaatgagcctttgtgtcctacaatgaaaatgttacgtagaaagagcaagaggacaatgaaaccaagttctgttgtttgctcttcgtttaaagcttttggaaagaatcactaatggagcatggcttttaagatacataggaaggaaaccaactgctgattgatgtcctatcttgagttcttaaagctgtaatcttatagaaatcctttaatggtttacttgcagtcaattttttgtgtaatgtgtcaaatattttcacacatatagtaaagctcacaagctcaggctgtctaaaaaaccattatgtcgtgttatcttatatcattgatttaagaatgttgctgtcaatttgagcaagatgatacgtacgtggctataattgttagggaagtggtggtgtaacgtccccgcttcaagcctcca

SEQ ID NO: 95677 - DNA, 590 bp, Cannabis sativa
ttttttttttttagatttgcttaatgagatgaatatttttcgcttaaaatattatactgcaagattgaatgatatgttatcatgagcaaaatactctttattgttattattattagaattttattaaaataaattcatgaagatataataaaaaaaaactcaacaatctaattttaaacaaaaaaaaaagtttataattataatattaatataaatagtataaattatattatattatatatataaaaataattttatagcattttaaattttataatttcagaatttactaaagtctatttttaatatatttttttttttttgaaaataactcttttagtgtctgtttaaaacaaacacttatacttattattagtctcggttttaaatcgatactaaaggaaaaaaaaatatgtatattttaagtgtcgattttaaaacgacataaaaactcattcgtttcagcttataactgacacttaaattctaactttttgtgattgtgattgtagaataggtgtcgattctaaggtataagtgacagttaccaaaaatacaatttgtagtagtgtcatcttatttattataat

SEQ ID NO: 95678 - DNA, 602 bp, Cannabis sativa
  modified_base (28)..(33): a, c, t, g, unknown or other
gagcgagacccagacccaaacctggacnnnnnnccaagacttggactcggacctggacctggacccaaacccagacccatatcgggatccgaacttggacccagacccaaaacaaaactcggacaaataagaccccaacctagactcgtacccgtatacgaagccagacacggaatcgaaatgagaattaggacccaaacccaaacatggaccctgactgggaccaaggacccgtacctggatgggggaccttgatccgggccttggaacccaaaccaagatcgaaaccttagagtaagacccggactaggatctggactcgaacccagatctggacctgaaccaggattggaaacccgaacctgaactcggactaggacttgaaccctgaccgggtcctagactcggactgggacctaggacccagacctggatagggaacctagacccgggacccgggctttggaactagcactgagaccctagacctgaccccagacccacaccctgaactaggacccagaccagaatctttgactcgaagtagaactagactaggacccgagaccgggatcctgatttcgacccgaagcttggacctg

SEQ ID NO: 95679 - DNA, 546 bp, Cannabis sativa
attgcatgttataaaaactatgcacaacatctctcgaaagataaatttaatgcattgaaatacttagaaaaaagtggcaaagatcccaacagcccaattacctcaaaaacttggctaacactgaagtctcctatcttcactgtaccatgacgtgtaaccagtaaattatcaggtttaatatcaccgtgaactattttctgtttcaaagaaaaacaagcaccgcaatatcaataccaagtgatcacttcatatgattgaaagtaaaagagctcatattaaggaagcacatggggcacattattaacactccaaattccgaatgtacaaactgtgtcatttatccctatctgtctatataatagaaaccgaagtatcaagatatccagatattcacatgtgatgtgcttggtcaaaaactagtagcagaaaccgtaaagaaacctaatgaggcataattaagaatgcaaacaaaaatatgaagtggtaagattcacgcaatcatagagataaagcttagtagccgaactttaacattcatacatgatc

SEQ ID NO: 95680 - DNA, 835 bp, Cannabis sativa
agaaatcacatgtgatgcttaactacctagcctatacctcctttttttcattggctaaattaatatatatatatatatatatgtatatatatatgtacatatgtgaatctgatgcttaatataatcattatttcttatttatatgcaaactcataatctgttctattataaagaagagagtaattttagggggccaaaaataatttttagggcaggtgaaatgcatatatctgaaaaggaaataaatattattttatatataatttttaatttttaattttaatgttgggagcaaaagatccctctcgttcacttatttacgtactgtataaattgtacattacatattataaattttaatttacgatttctttttttttttaattgtggacagggccgaccctatattattgggatttgaactctcaacattttagttattaaactaatcaaattaccactaggctacaaaacatatttaatattaaaagtattattatttattttattacgaactatattttaatttttttttcgaaatgtgccctgagcggtgggggcctaaggcggccgcctccttcgtcttagctcatggccggccctgattgtgaatattactactgttacaacttattatttaatcatacagcaaaaaaaaatattatataattatcttccatatattcaatattgtatttttaaatgaaataactttatcatcaagttttttattttttttaaataattgaaataaaataaatatttgaaaatgtctcattttattatatgaaattaaatcaaattatttttaaaaaattattaataaatgtaaaat

SEQ ID NO: 95681 - DNA, 526 bp, Cannabis sativa
acaacatgggagcaagtgctttggctgcaaatccagtgtatcacgcgcgcactaaacacgtagagttggatgttcatttagttcgagacaaagtcctcagcaaatcacttgaaatacgatatgtgccatccagtgatcaaattgccgattgcttgacaaaaagcctcaccaatcacaggtttcatttcttggtggacaaactaggagttgttgagacaccacctagcttgagatggggtgttaagaaatgaattctcccactgctgtatatctgctgtatattcttgctgaggtgtcataaccgttttgtaccattccctagactaacaaactttattccctttgtcagaatattccttgtattatttcaaaacgtgtgtaatgtgtacaataattattctagatgattcctgtatgtacctaccagtaaatataaatacaataggccagactcttattcattgagctgagcttttcattttcttgctttgtttcttcatctctctgtttactctgttttcgaact

SEQ ID NO: 95682 - DNA, 566 bp, Cannabis sativa
atatatatatatatttatgggagccattatagaataaggtggctcatagaatgtaaataaaataatttttattctatttttttttttagttgcattttaaagtatttgaatatcatttcactgaaataatttttttttatcattttagtaaaataattattatattttacaaagaaatgaaagaccatattaatgcacaataagaaaaatttaatgtttttttataattttttaatgcattttaaatttaattttatttctattcttattcttattctcattcatattcttaaataccgaaattgtgcattgcatatggggtacaatctaattagtatagatcacccttattgttcatatggtggggtacaaatgtattatttttacaatttcttatgatgttatatattttaaaaaaataccatcataatgagttatttacaaattttttaaaaatttaaataatttattgtataatttttttttttttttctttgctataggtcccccaaatatataagagcgtaggtgtttatttggggtagctcaaatagctatatagaatg

SEQ ID NO: 95683 - DNA, 1240 bp, Cannabis sativa
tacataaggttttaaaatattcccacccactacacattttttaatgatacttttaattcttttttaatcccaaaatatccttttattaaaaccaaaaaaattcactttcatttctcactctctctttctttctctcgttttccctcagccaccaccacccaccaaaaccagccggaccaccaaccaccacgacctcaaccgcgcctcaaccacgccggaccacaaccacactcggtcagatctccaaaaactttattttcatcacaaaaactttcattttcctcaccccaaaagcaatgggtaagtattttttatacaaaatattattggtttttattgtattggatggatctacacattatttgttgtattatgtcatttttgtgatctgaaatgaaagtagagtttgcacccgaacgttggtttttttctggattttttgaattttttgcgattttgtacaccattgtgcgatttttgtgcgatgccaagagaaatcaaaggtgagggagactttcattctttttggcgacattaaacgatgtccttgcgttttgtgcgattttgatggttttgtgatttgtgtgtgatatctttacatcattatgcgatttggttttcgttttctttttattatttcattgttgtatttttttgtgcgatattgttttgtgcttgtgcgattattgtgcgacatgttattgttacataaatttgttaacttttcatttgatttaattttccagcatattcccaaaaagtttactatcaaatacggtgaaactttatccaattgggtgttgatgaagtttccatgtagttctaaatggaatggggttaacaaagaaatatgagaatatttgatttgagaaggagtggctagatttgcaaagcattatggattaaaaagagagagtatgataatatttagatatgctgggaattctaaatattatgctgtaatatttgatttaagtatagttgagataaactacctttctgtgcctactaattttacccttctatacagttgggataaactcgcacaaacgtcacacaattataaaaagatatcgcttaaaatcgcatattttgtcaattaagaaaattattataatatcatagtcaactaaattatggaaaataaaatcgcaaaaatatcgcacaaatatcaaaagatattgcataaatgtcgcctaaacatagtaagggaattttggtgtctttcatgtacatgtaa

SEQ ID NO: 95684 - DNA, 809 bp, Cannabis sativa
aggttggattggatcggatgcccacccctacctgtagctacatattgcgacgactttggcctttgtcgcaatagtgtcatatagcgacgactaatcgtctctaaaaagatagtgaaattttcaaaaaaaaaaatcaattttcgaacatattgcgacgactagtcgtctcaatatagcgggtttaattttgaaattgtaccctattgcgacgacttgatcatagcactggttctaaaaaagttgaattacattagctattgtgacgatacatggtcgcaattcttattatggagaataaaaaaaatctgctaccaataactattccaaggatatgttgtcgcaataagtatgtaagtatttttcttaaaaaaaatgtatttactattatatttatgttaataataatttatattatttaaaattaaaattgactaaaattcattttttaactattagtacttaatttttttaacttaaaacaaaaagtattttagagttagaaatttttgacagtcatggtttaaaatagttaaatacaaaagtactaatcatctcctaaatcagtatcatcttcaccattagattcagagtgttgttgtggttgttgctgtgactaaaattgtgccataattgtctgaacaagctcattgacatcgatagtggcatcttcaaattctgggatggttgcagtagggcacatggtttgcaacaattgacgaatcgctttcagattgttgttttggcgcttcattacggcattaacagtttgagcaacaccttgaacgaactcttgtggcatttgtggacgt

SEQ ID NO: 95685 - DNA, 514 bp, Cannabis sativa
tgacaacttagaacttacgagtttctaatgggttgtctaacacattagtctctcggactaaaatatatgtaaatatgcgatctttatgcgtcgcatgagagatatactttctcgtcgcatataatcggtatatgcgcgaccagtactaacttctctcagtcctgcttttttaactatgttgggcatagtgtgcgattagactttgtcttggtcgcaccttctcacaagttttatgtcatgcgaggttagctctactggagctatatattgacacatcatcttttttctatcgggaattgggttcatgtgtcaacctttttcgagattgtactcgtatttctaggggaaatattcatactataacacatgtcccttgtttcgcgatgacaagtgtctgtcaggcggcaaaactattttgagggacaagctagttgacttgtcacattatggtggcgtttgggtatcttatcaagggttgttgaaatgatggctgtaattatggttttatcttccc

SEQ ID NO: 95686 - DNA, 937 bp, Cannabis sativa
ttcttttttgaaaaaaaaaattaagttctgatagattagaccaattggtcgttacaataggtaagtaacatccatattgtgagtgatgtccaaactcaaagcctatttagtaatattatgggtagcaagattaaattactagatattttaaaaaaattacatcccaaaaataatttaaaagaattcaaattagtaaatataattgcatattttctatctaaaagtggtatctttttttttttgacgaaaatgtaacttcagcagaagaaagctacaaaactagaacagattcattccagctcaattctttgtctagccccaaggccttgcgagctaaatgatgagcattgtaattgtacttcctgtttacatgtcgaaggctaatattggggaagaaagacaaagaacttctaatatcatcaaccacatccgtgagagcataaagattttgcttctaaccacaaattcgatctacaagaatcctggaatcagtctcaatgaaagcaagggggattttgatatgatggcaccagactaggcttgctcttaatgttaaggcttcagccatcaaatgttgaaagttactagttgcagggataaaaagaccagccacaaccctgccactccaatctttaataatagccccataaccaagcttgccttgatctgaactcagtgccgcatcagtattaagctgatagaaacccggagagacatgtctcgacttgccaggatagtgtgtggccttagatgtattatgatccctcatattaagttgtgcttctttgtagacatattatgatttgcaaataattttttatttctaaggttccatattgcccagacaatagataacaaaagtgatagatcctctttattcagctaagagaaaccagagaggaaaaagtctttgatatcagtgttggaaattatttta

SEQ ID NO: 95687 - DNA, 954 bp, Cannabis sativa
  modified_base (198)..(207): a, c, t, g, unknown or other
tattaaaaaaatatcttaatttgaattaaaattaggttgttagagaatatttaaaaaatattaaaatctaacaaaccctaaaatatcttaaatttaaatttaaaatttaaatatcaaactaatttttaaatatctaatttatttaaataacgtaaattaattaaataactaataaaataatataacataatatcttannnnnnnnnntttctaatgttatatttcaaatcttataatttaataaattaaatttaacaaaataaacaaatttgaaaataggatatttttatggttagatttattttatttaataaataaataaaataaatatcctaaatttaaaaattttacggttagaaaactcaaaaatatctattcaaaaaaattaaccaattattcaaaaaattgcatgttattttaacaaaaaaatataaattttattaagataaatatcataataagataaaatatcaaataattaacatttatctaatcttataattaaattaataaaatatattttaaaaataacaaatttttgaaaaacggttagcaatttgaaatttttctagactatctttaagttttattattattttaatgtcaaaataagataatttcaaattttattaataaaatatataaatatctgatcttattattaaaattaataaaccaaaatagaataattaaattttaaaaataaccataatgacaagtaggggtgtatgtcggtcggtttagtcgatttatgttatattttatttaacccaatgtaaagattgagttacaaaaatctaagtacaacccgcccaattaagaaaaaaaaatttcaacttgcccgatgaattagttggtttagacaggttaacccgtccaaaccgagcactaatgtttttttttttcacattcaattgttatattttagttattgtgataatgagataaatataa

SEQ ID NO: 95688 - DNA, 833 bp, Cannabis sativa
aattataattttatgtaatgaagttttttatacaaagtaccacttaaaagcaatgagattgtgactactccagtcatcatatataattggacaacctgttcttgtcggttaagttttaatgaaattaatggccaactacaaaagatgatgctgtgtcatgatatgaatctttccgagcaataaagtgttatctcccaatcgatttttcttcacaaaaatactagtcaatctaaataaataattgataatattgtgtcacactactgttacattgtacgatatttttttagcgctttttcttttctttatatttatattttttctatatggtagttggggtagatctaaagtatggacacatatgtcaatttaattggtctatctaagaaatattttttaaaggaaaatttattatattatttattaatataatatgtagaataaaatatggtaatatatttttggaaaggtccacacttgttacaaggtctagggctcatagcatgggactcagtttgccagtttaagacaacaaggggattggattcaggaaagtagaggaatggaacttgacaattaccaagtatatttgggcaattgcaaacaaagaagacaatctatggataaaattgattcataatgtatatatcaaggacaataattggtagagtgaccaagctccaatccaagaaagttggtactggagaagaattgttgcagctaaagaaactgtcaaaaactccatggccttccagtagcttattagtgatggaaaatatcaaatctcaaagggatataaaatattctaccttgaataagagaatgttcaatgg

SEQ ID NO: 95689 - DNA, 835 bp, Cannabis sativa
atttgtctcagaattatgatgtatatattattatgcttttttaatttttcagttcgttaaaattagattcaaagtattgtaaattagttctattaagtttgtcacacgtagcaaacaaaatgatagcataattgcttagtcagttaagttaccacgtcagtgttatgtcaacatcacatgtgtaattaatttgaaaaaaaaaaattaatttaattttatgtaattttcttaatgatgacaaatcaaatgatgacatggcaaacaaaataatgacataactgcttaatatcagttatcacgtcagtgttatgtatcaacaccacatgtgtaattaatatgataaaatattttttttaaaatttagttttacgtaattttctttattattaattaatttttagtataataattttttagaaatacataattattttgtaatgttaaattatatacttgatataaaaattagttaagtaatcatgtcattattttgtcactgtgtgataaaaatttaatagaatgaccaatttacgatactctgaatagttcagaaactatttgtaatagactcaaaaatttagagacacaataatacatattatgtcatagttcatggggacaaaaatcctaaatagaaaataaaattatgatcggccgattgtttatataaatatatctgtatatgtataatatatagatgattatttaccttaaacataaatatatataattaactaattaatataatcctgttttaactcctataattacttttactctacaaaggagatggcttaaataagagggttaattagttatacttgtccatatgcat

SEQ ID NO: 95690 - DNA, 698 bp, Cannabis sativa
aatattatttataaattatattttttggtagggacttaaattttaaattagaacagggcctccggaatgttcaagacggccctggtcttgggactcgcatttcggccccaatcctagtcttggactcagaccacagccctaaccccaaactcgaacgtggactcgacttaaataaaataaaaaataataataaaagttataaaacacacttttattttctatttttgaaatttaaaaaaaaaaaaatagttatagaacatatttttattttttaaaaacacaaattttgtatttatttttgtaattaaaaaattaaaaaaataaatattaccaaacaggctcatagttacacactatttatttttcaaacttttttattctttcttttttctttttctctcgtatttttattttaaaaaaataatatttgaataaataatatttaaatgtaaataatggggggtgatgagagtgttggtgtatttaagtaaaagagtttatatatttgactgtaaattataatatagattccatattagcaatagtaatatcttgtgtaaaatggtgttaaatgctagtgatgtgctttgcaaattagattcgtataaatttacatgtaattatttttgtgattcatgttatcactttgttttcttgtacataacattaaacaattataatgctatttaaggatttct

SEQ ID NO: 95691 - DNA, 519 bp, Cannabis sativa
ttattttttcaagtttttgctcaacttattgatgcatttatataagttctcttatatatatatatggatgattaattaaaaagtttacaaatcacatcacttatatatgtataattaaataatttagtgtcttttctaaaccaatttttttttcttgtgcatgttcttttgtttagtaaattaagtcatatataatattcttaatttgattatttattttagggatattgatagaaaaactatttaaattttatgattagtgacatttaatcacataaattaatgttttggtggtaaaaccctccaaacgtaacttttgttaattatttaccccctctgatcaaaaagctctattaagtggcacgatggatatgccacagtgtacataagtgtatacgtggttgttaacgcaattttttattaaccaaaattgagcctcacgaatatgattcaacacagaaataaaaaaaaaattgtagaaaaataaaataagaacaccaggtttttttacgtggtttt

SEQ ID NO: 95692 - DNA, 574 bp, Cannabis sativa
tttttttaataataagaaaaatatatttttgttttaattttgagtattaaattattatttatttgattcacatttataataatttgattatatttgaaaatattttgactaagaagtaattttagtccctaatttttattttattatgttttaataaaaatgaggtcctaaataaattttttaaatattaagtgtcaatattctaaaatatagagtctaaaataatatatttttttttataattaagggtacttttgtcataacgaaaaatgaccttagggtcctaattgtaatcttttaaaaaatataagatctaaaatagaaatttttaaaatgtaaggtccaaattgatagttcatcaaaacacatgatacaaaataatataaatcttaaaacaaaaataaagttacatgggaattaggatggccatggtatagtgtgtaaaaatatatttttttttttgcgatatataatttaatctcaactccttcaatattttaaaagtatcaaattgtatggggtgacgtttttaagttcgaaatcttataaatttaataataatagaaataataaa

SEQ ID NO: 95693 - DNA, 761 bp, Cannabis sativa
agccacaattctcgccctttgtttccagtaaacagctttcctggttcttgcttcattcaggttacgtctgatgtcacactccaacttccaatctctagtaccagtaggcaacagctgaattctatcaagttctagctccaaatctttaataacctcatcaagtttcccaaattgcgttctcttccactgaagaagagccaccctagtagctcctatctttttaaaaacgcgggcgagagcccaaggatggcccaccaaatcccaagcgttggcaacaacaaggttgcttctaacatccctcgtccaactttcctcaaatttgaagcacctcttaaatttagacactgtccctaccgtatcaagacacaacggtctatggtcagaagtactagtctggacagaacagagaatagctttggggaacaggtgaagccaggcaccattcacaatgcctttatcaagggtcgacttcacatggttctctcccgaccggtggttgtcccaagtcatcatatccccttggatgtgcatattgataaggccacgggactccaccaggtgagaaataaaagggataaaggggtctctacccgacgacccgtttcttctctattttttaattagctaacacacatcacacgtaattggaatatcaaaaattgctagttcacttaatttttttaaaaaaaacaaatcaaattataataataatagcaactaacaaaaattttgtttgctatatactaaagatcatagtaaaa

SEQ ID NO: 95694 - DNA, 604 bp, Cannabis sativa
cctttaccaatcctgaaacaaacaatgatcgggaaagaatgagatggaataatttagattgtgaatgagttgactaactaaaagcaaatgaaagaacaaattaagtaaatgtaagactgatgacaaagtgagcagaggtgtaagaacaacagaactagatcgagaacagaagatggtgatccatcaataaaggtaacaatagaagtgagactatgagactgaaaagtagaaacgagactgaaattacctgtcacatgatctgtatcaccagaatcaatgacccattttgaagatttggaaggaaaacatgtattagagttacctgaatcaacaattgcagttacagaagaagatgaagacttaagtgtttcttgatacctcgagaacttgacaaattcatcagtaataataatgactgatttgtcagatgcatcactagtgtttgcaatattaacagtattgttgtcgatttttgaactgtaatttttgacactcaaacttggtgtgacctggtttcttacaatagttgcatatgatgcccccagaatctggtgttcgattatcaggcccttgttaatttcttcctttgaatccacttggagta

SEQ ID NO: 95695 - DNA, 546 bp, Cannabis sativa
tggggatcctgtagcaataagagcaaaattcactggaaaaattggtctaccctttgcacttcaaaattttatggggtcttggtttcagatttctcaccaatcacaatcaagcccttattgccaaataggcttggagaatttggacaaatccatcaaccctacttcactctctcctcaaagctagatacttcaaaaataatgacttcctcaatgctccaaaaggtcacttcccttcaaatacatggagaagcctcctttgggaagggaattgctaaagaaaggcctcatctggaaagtgagaaatggtaggttcatatccttaaaagaccataactgaattcctagttttcactccctctctttccttaacaactttgaccctactgaacagacaatctcctctttcattgacaataattgcaactggacatttccatcctccaacaatcattatcccattaccaggtccagaagatctttaagatcccaattgatctcactcaaaaggatagcctcatttggggttttcaccattccgggatcttc

SEQ ID NO: 95696 - DNA, 562 bp, Cannabis sativa
  modified_base (519)..(520): a, c, t, g, unknown or other
aagtgataaaagtgagatcatgctataattatacgaaaagagaatcatgaattccagaagcaatttaaggttgtgttaatagaagctcttaatgagatctatactccaagtggagtggattaccaagctacgggagtactcttgatagactcacctatgtgaatgtgggagtagggccactttctatgaaattttgggtaaaatttctagagcgttcactatactaggatagacgtgcatggcccttaactcacgagcttctaattacaccattgaaaaggttgttgcgtggtacaatattagatatagagttctaaattacgggtcactttagtaaaatctagatcgtattcactatataaaggttcaaatcgaaagatacatttgtttatgctcaatcttactgttgaatgatactagtagatggaaatattttttaaaaaattcaagtgggggattgttggaacatagagtgcaacatgggattgggggattgttctgttaggttttatgccctanntaaaactcaatttcaatgtaatctattttattcaacatcaat

SEQ ID NO: 95697 - DNA, 660 bp, Cannabis sativa
ctctccaagtgagctgagaagtctagatgtctccaatttatcggtcacttgtctaaaacgtagcttatggccgaatgaaaacgtaaagtgtatacaacggttgtacataaagagggtaattacattaaattttaaacaaagcttatgggatctcatcaaggttgtgaacctctgcctatttgtagtaccgacataagtggtctacattcttggtgtgagcgaccctcgatccgtccatcctcttaaggtgaaaagttccttggcccaccttttcaagtatttcgtaagggccttccaagtttggtccaagtactctcacccccagttcctgcgaagcagggaatattctcctcaagacaagatctctaacgtcaaatgtacgacttttgaccttggaattgatgtgtcgagcaattttgccttggtacatcttgagttggacctgtgacttttccttcagttcttcgattaagtccaacgattcctggagcaaggaatggttccaggaagggtcataagtatcttgtcgatgagaggggactgtggtttcaaccgggatcactgcttcacacccataggccattgtgtatggcatgtgtctagttgaagttctctctatagtccgataggccccagcgaactcagggaggttctttcggc

SEQ ID NO: 95698 - DNA, 780 bp, Cannabis sativa
attgacaaaaataatgtttgttcatttcgaatttattactataataataacaataaaaaaaattaattaagtaggtaataaatgtaggcctatatataatattatcttttagcaagcttattaacatataataatcatgtaaaaagaagaacagtgcttagcgggactgtttggtgtactataattttagcatagggagcttgaattcaaaatatatatatatatatatttatgttatgtttagccaaaatcatatatattattattttttgaaaattatattatatatattaggcatggaggatgtgtccgtaacctcgtcaaaacttgtgggtgtaattatatatcttactttcatcaattatgtttaaataatgacaatgtggtatatattcacttattattgaacctaagttcatcaatttgctatttaaatttatgctcatgtgagttgctatacaattatctattattaagcattagaagaaaaattaaacaataatattaacaaaatttatgaagaaaaaaaaataacaacacaaaaaagattaatattatatatatgtcttttacattattatatatttactaataaaaaataagatgaaaaattaaaaaaaaaaagtaaaatacacaagagaaaaaaataattaaaaaaatttaaaatatatattttaaaagagaaatggagtaaaaaaaagagagattttttgagaaaaattagggaaaaaagtgtgaggtttaaaaaaaaagatcaaaaatattaataaatggtacaaa

SEQ ID NO: 95699 - DNA, 902 bp, Cannabis sativa
  modified_base (530)..(541): a, c, t, g, unknown or other
ttgaggaatataccaaaaaggatgaggttctaaaaatcttggccaacacaaatttagaaccagaatctcaaatcgaagcaaaaacccaaaatctgaaataatactaaaaattaaacataaaaaaagcccaattcaaatccaagaacattttctcgagaaatcaaacatgaaaggctcaagctccatgcaaatgatgagtcaggatacgctatggctgagcttacaacaagggcataagctcgctccggcgttgattaagagaagttgttgattgatgtgagggctgggataagagaggggtgtatatatatgtacatagaaagagaaaggggttagagagagaaagaaggtttctgtagaaaaagaagaagaaagaagaagaagaagaaaaagaaaaaaagaagtaaaaaaaaataattaattttttaatttttttaaatttaaaaaagtaaaaaaaataaaaaaatttctaattttttaattttttttaaatgtttataattattatttaaaattaatattacgtggannnnnnnnnnnntgacacgtgtacaagtgtgtacacgtggacagttcaccgtgacacttaactgtgatttttggacggagatgtgcagagcaaaacagaaccagagtttagatagtttagcggccaaaaattcggtttatgtggttaagtgttacaaaccataaagttcaggtggtttatccaccaatattcctattaaaaaagtaaaattattgaaaattaagcttaagaacaaaacagatagtctaattagtaacttttgcaaagagcattatttaaaagagtatttgcccttattattttagtgttaccatatttagggttttagtaagctttatttatttatattttttttttgctaagaagggtttta

SEQ ID NO: 95700 - DNA, 1241 bp, Cannabis sativa
ctcttgcaacgatggtaaccaatagcaattttattgggatctcccccctcatccacgatcacaaaagggttaaagtggtcggcctttggtctagttctttgagttatttttatgggatctcgattcaaagtagctggataatgaaaaacctcaatgtgtcgatattgttcaaacgaacgagcagtatcatcaaattttgattctttgcgaatagttgcgacggccacagtggtttcgtcgatggcagctggagtcattgcatgaaagccttcgggagtaacacgaggagtgtccgatgtaaaaccattgctaatgtcagctctaaacacaccccaatagtttccaacctttcgatggaaaaataaaatgttttcacttccccatgttggccatccaccattctttataaccatcttacgatctaaatcaggtccatctacattaaacacataaatatctgtttttagatcttcaatttccccttcccaaccttgttctttaaatgatgccactgcaatcttttttccagatggtgatactgatggacttaaatcagcttttccctaaaaatacacaatattgtatgaaagaaaagaataggttaattttgttatgttcgtaatgcatttatgggacaatattcatgagaatttaatgagaataatgggtgtgcagtgtatatgatgatagtagctaaagtatgtgtgatgaatgggacaatattcattatgttttaaaaaaatttatttctagtgacagcaaaattttttattataaatatgtaacaacttttaatatatatgtttactacataaaggtttattcttagtgacaacgaaatttataatgactgaaaaaaaatataaaaaaaaaaaattatgttattattagtatgtattatcactagctaaaggtattacaagaagttattgtgtctagaacaaaaatagtaacaatttatattttgaagggataattatgtactatttagtcaaagaaaattatttattgctactaaaaagttatcaatataaaattgaaggtgttataaaacagggaattctaattaaaatttaaaatccaagcgtatgtctatgtataaaacaataattaaatatttagttactactttacaaattatgatgagtagttttgatgtaaatttatataaatttagaaaattttacatccatcaataacatgtgagaacataatattaatcatacctgtggggtgagtcg

SEQ ID NO: 95701 - DNA, 621 bp, Cannabis sativa
aggaactcacatgacttttgtttcggactaaagcttgaactccacaaatgaaattcagaatgcaaagaactgggaattcaatccaaaatttcaaaaatataaaataaacgaaaataaacggattgaaaacattctgttggactcaaaatcaaaatcacaaaatctatttcaacaccataagctaagaatagtgactttataatcgaaacttaataaagagaaaagaatttaaaactaaattgccatcgtcttcaacaactcgcacaagctcaaaattcttcaatcaatcaaagaacctcctcctaaccttcggtgataaaatatgttgaagatcaatttttgatcccctatatataatcactcagatgtaagtttagactgtaaaactaagatttcttaagattttctgtaaaacaaaataaatgtagagaaatcattacctatacctgaagctctgcatttcttctctccaaatactcttcaaaaacctccaccaaaaccctaaaacacatagaaaatttaatgctcacaagccgtcaatatcagcaagcattcaatgctcgctcaaaaaataggcttttcatattaaaaaataaaacattaattaagtggaacccacga

SEQ ID NO: 95702 - DNA, 582 bp, Cannabis sativa
gtaggggacgtaggccccctctcccatttttttttttttttaaattacatgtaaaaaataattaaaatatttttatttttatctttatctacatatatatactatagatttttggcctggctgcttctcccgactttatttcttcttaaaaaagataaatgacaaaaaaaaaaaaaaaaaagaaaagttgacttgtagaattaggagtttggggtatttggagaattaggagtttggagaagcactaaaataataattaaagataacacaaaaagtagtagtagtagtagtagtagtggtaaaagactctctctctctctgtccataacagaatctcactactcactacttttgattctgtttggctttgtgttatcacactacttttcaactacacagcatcatccttaaatttaataatcactttttatttcgatacaatgacattttttgactttatactttattatgtagacaagccagccaactttcctgtgttatattctaatgtaaaagtattcacatcacatcaccaatattcaatgtccatacctaagcctaaggatacatcacatatgtaga

SEQ ID NO: 95703 - DNA, 686 bp, Cannabis sativa
gttcgttgaatccgttcgcttccaaaaccttcttgaggaacccccactcaattcggtcataagctttgtgcatatccatcttcacagccacaaacctcgcttttcctttgaccttcttcaaagcatgttgagctttagaggccaacactcagcattcagctatccatcttccttttaagaaagcagattgaaaaggagatatgagtttatccagaattggttttagcctgtccgttagaatgcgagcaataatcttgtatccaaaattgcatagacttatgggcctaaattgttcaaaatttgaaggactctcacactttgggatcaagcaaataaaggtgtgatttagattctttgccaaaagacccgagctgaagaaatcctgcaccatgtttaccacatcctcttctacagtgcctcaatattttcgaaagaaaattcccggataaccatcaggtccaggagcctttaaaggatgaagcttccaaacagcctccttcatttcttgagaagttgggattctgcacagctcctggttttctcgatccagaaatctttcctcaaagagcatatcaaactcaacatcaatactcggtgtggaacttttatacaggttcttgaaattatctatgaagtagcagccaatttcgttccttgtccttttccagtcgccattctccttctgt

SEQ ID NO: 95704 - DNA, 1607 bp, Cannabis sativa
attgattacaagtagatgaaaaaggggttttgtgagatctgtcagattgcagcaagaagtatagattgccaatccgtttagcagtcccaatcctcttgttcattatgccctgtattgtgcaataagaattggtgaaaagcatgttgttagttgtgttgttgagataactcgaaacactaaagagattaaatttgaatgtaggaacatagagaacatttgagaggtgaaaatctggtgagaaattaatgtcacctgaatgaaaaactttagtggtcgatccattaggtaaggtaacagtgttagctatagtgtgtttatgcacattagacaaaagagagaaatcacaacaaatgtggtgtgaagcaccactatcaacaatccataggtgattagaagagttaccagtaatattagatgcaaatgcatctgtgggaggatgagttggctgtagcttctgtgtgaggagggatattattgcttgaatgtcttcttacttggtaagattggcaagaacactgtattgatcaacagaagatgaagcattatggactgagggctgctcattctttttcttgtcaccataaccggggggaaaaccaatcaagaaatagcatttttcttttaaatgccctggtttgtgacaattagagcagtagggtcgcatctttttattggatcgaggattggtggaggctgcagaggctgagggattttgagccaatgcagcaggttgttggcttgagtcttgaacagaagcaagcagtgggagatgaggatttttaagttttctttgcctttcttcatggataaccatggaaaaaactttagacaaagatgggaaaggatcaataaggaggatttgtgctcgaacagggaaataagattcatttagacctgtgagaaattgtaaaacctgttcttgattcaagaaagctaaattgtcaatagaaagcagcacaagaacagggaatccggtcttaattcctgaatttcatcccacatgcatttaagttttgtaaagtaagaactaaccgaatcatcaccttgacgaagagtgataagagtttctcgaagctcaaaaatcctgggaccattaccttggtcgaatcgggcatggagttcagtccacatctcagccgaagtttcaagaaacataatactgctcttgatttctggagtgacagagtggaggatccatgacattaccatttggttacaacggagccaatggttgtgaagaggatcttcaatcggaggtcgaggtagagtgcctttgagaaacacggtcttgtttcttgcaccaacagagagttcgaaatctcgcctccatgcttgaaaattctgatcagaaaggggaggagtgactagtattagaccaggatgatcccctgaactgaggtaataggggctggaactatcttcatgagcaggacgaagatgaatgcgattctggttattggaattttctccagtaatcacaggagcaggaggaatgatcggatcgtcatgttgtggagcatctggaatcgtagatgaggaattaggcggaggattttggccagaactccttgaaccagtagctcgggttcgagccatgttgagaatca

SEQ ID NO: 95705 - DNA, 3297 bp, Cannabis sativa
aaaaaatgtgaaaaataactctaatttctagagttatcagtaccagtttcattattccacatttaattaatcacttaattaaataatcaaactgggaatttcaaaatacggaatttcagttgtatttagtgaaacagatttaactgttcttcatttattcttttacgtttatttcaatttaatgttaatatttaatgtaaaacagttttataaccgattaagttttgtgtaactaaaagaaagaggtggtccgacatgaataagaggagacagaaaatcctttgcaacagtagactaagcagaatatgatttgactgaaccactaaacttctttgtgttcattgttttcattactttgtctgggcagccgtgtttgaatacttgctgttttaggttgagtactcgttgtttttttagttaaatatcaactctttattttatatttgaagttgtccaaactccttcgacaacatttgatgctgtccgtgggaacttcttttaattttggaggaaaatcaacatggctgcaaaccagacaaacagaaatactggatctttcaatgttggaacaatgaatgtcccactcccaggtgatggaactaatctgactgacacaatcaatggggttgtgggacaaaccaacattactcctttcattttgttcccaaagactgctggtcatctaggagagacgtcgacactgacagtcgttgtgggccacttcccacctatcacgccagtcgtagcctctgaaagaattgtccagctgacaacaacatagtatacaaccatgcaagaacagatgtgggcattataggctgaagtcgatgggagagttaggacccgacgtccaccctgcatcccgaacacgcgttcaggcaaccctcaggtaactaccacatacagacgatgaaatgaacatcctaacaataattgtatttgcatgaaacatgtgaacgagcaagaggatctcgatctgaattagcccacacataactccatacggagtggggagtcgattactccttatgccggtcacggtagagaagagagaccacaagagaacaacctcgaacgacaaaactcgagaagtcaggcccagacacaaatagaggtaaatgaagtcgaatctcattcttctttcactaacagtcgctcccctagaatttataccaggtcggtgactgttgagacacaatgaagagggagataccatgttcatagaggtgaccttcgtgatcatctcaatgagatttttagggcgcaatcccagacaccaaggaatcacgatgatgacgagccccgtgatccctaaatgggcaattaaggcacgcagaacgtgaaaaacctgactaatcttatcaacccgctgatcgcaccagctgcgaccataaaggtaataatcctaactaacatagccgtggttgctgctgtaccagcgaaaacacaggctaattctgtcttaccaggaggtattgaccaagaaagcctcctgcgagcattaagaatgatcgagcagcagagaaagtccatctacaaaatccatgggacatctcgttttacagaaaaagtgagacaagcttaactcccaaagggttttaggctatctaaatcgctcaaatacaaatgtactactaacccaatcaattatttagataaatttaatacgattatgaaagtagaccaagtaccacagttggaaaaatgtcagatactcgctgcaaccctgtatgataatgctcatgattggtttagccaattacctgaggcctccatatcaacatgggaaaccttcgtagacctatttttgacgcatttccaagccacgatgacatacaaactgccgcacacgttggcaaatattaaccagaaagtcggtgagtctttacaggattattttaaacgttttaatgctaaaataaccaaagttgagaaggctccaagtctttattactttgtatgttgattataggtgttttaccaagaaccgatttttggaatgaactacaagtgcgatgacccgagtcgttagtggaattctttgcaatggccaaactgcataaaagaattaagaattttttggccaagttggaaagagggaaaaagaaacgcgaatctcctatgcccgggttgcgttcccaaagcccgaaaggaaaaatttccagaggtcgaagccccagaagattcagtccatcgaggcgacggagtccaaaactcgctaattctccctctaagatagagacatccccgaggaggaaagggggtccacattttttcaattataccgagttgtctgctcctcgtgaccatatgtatgtgatagaggaacataatggcattttcaaaaagccaccgctaattcgggataatcgtgacaaaataatgccaaaaagttttgtaagtatcataaagatatcgaccatacaactctagagtgctggtctcttcaagacaaaattaaagaattaatcaggcgaggaaaatttagccagtacaaaaagaacggagaaaatcatccacgagtagatgatagtaacaacacaaataatgcgagtggttctcgagcacctcgcaatattctaactatcataggaggaccacatgtcggtggagaatctagaaaggcgcatgagcgctatgcgaaagaagcaaaagaaaaaccccttactaatgtaaataatttgagtgaacgaccagagaagttgttcaaaaaagagtgcgatgacatcactttcatggagagtgatgtcaggtgggtacatcatcctcatgtcgatgccttagtaatagccgcaaatattggaggggataatgtacatcagtgtctttgttgacaatggaaggtccgtcaacttgctttttatataaataagtgatccaaatcaaataaaccaaggagaaatcatttgcaacagtgaactaagaagtcgagatttgactaaactactatatttctttgtgtccttattatttctagttcttcttctgtttttgatagcttattgttgaatacttgctattttaagtgagtgtttgcacttttttattcaaattatttaatatttatacgaattttggtgttgtccaaactcttcttataataaaggctatagttgcattagaagaaaaaaattcactaaactaattttcttttaatttgatgattacacactaaaatagtaaaatatttccataaatattttcttataataatgaagtctcacaaatttattaaatttattaaggggacgtttagtaatacttttattttttatttttttaatcataaaaataaaa

SEQ ID NO: 95706 - DNA, 1143 bp, Cannabis sativa
cccgaaacttaactaacttaggatttataatttgagcaattctaatcagataaatactatttatgttttgtaaaagttacgattagaccttctattttgttaaatgataatttagaccctgtatttttcataatagtacaaaatagaccctgaattcaattttcgtcatttttttttcttaatataactaacctgaaactagtttctagcgtgaacgattgcgaaaaatataatcattcttgtcataacacttcaggttggttattattaagcttaaggtttattttgtaacaatttaaaaaataaagggtctgaattatcatttaacaaaacagatggtccaattgataacttttacaaaatacagggttcaaaatagtatttaccatttctaatcctttccaatagattatactaaagtgtcaaatcgctaagtttgccaaacacaaactcaataccagccctaaccattttggatgatagctgagaaaaaatcatcttcatgttgaaaacttgcctgagacctttcttacttaaagcatctggtactacattagcttttccaggatgatagagaatctcacaatcaatttttttaactaatcaccgtcttcgcctcatattcaaaatcttttttagtaaaaaaatatttaagactcttgtggtcagtgtagactttgtgtttcctttcgtggaaataatgctgccatataataaatgcaaacacctttgcgacaattcctaaatcatgagttaggtagcattgctcatactttttcatgtaattagaaacataagcaatgatcttgacaacttatatcagagcacacttcggatcttgtttagaggcatcacaataagcatagccatcatagcacacaaacatttttccgatttgatcataaaatcaaaaatagaactataattagtcgctactttaacttttggaaactcgcttcgcacttattggtctcacaaactactaatttttcttggttaatttctattaaaagtttgcaaattttagaaaactcttctacaaagacagtaatacctggctaaaccaaaagtaatacctgactaaaccaaaaaagcttctaaatttcatttttttttttttgagatattctaaatttcatttaa

SEQ ID NO: 95707 - DNA, 895 bp, Cannabis sativa
tgtacattatttgctattttgtaaaaaaaaatttcttgttggttaatcagaatacatttatatataattcacgttttacgatcataagtgactaaaatacgtattatatatatttttttataaaaaatattacacacaatatattacatagaatcatttacaaatatatgcaagcttcatagactaataaattaattggcgtatatcattaggtttgattatagtttactctattaaaaaatataaaatgttgttccaacaaacaaaaactagtaggtttattgacaaatataatggtaatatgcgaaaaaaaaataaaaatttattttaatatgccaaaataaactaatagatttattagcatatacgatggtaggctatactaaaaagggaaacaaagaataaaaatttgtttcaatatgccaaaataaactaataagtttatttggcatatttgagtatgtattataagatatttagtctaatcatcatctttttattttaaaattgatgattttattaaaagtaaccaattggtatcttatcgaaatcataattaattggtctaaaaaaatatgtctttttagtaatgatttaaaagttatgtgtaactctaatctttacttaattaatcaaaatatatatattaatttatatttaaaagaatatattttttaaaacagtttactaaaatggtagtttactagatgacaactaattattttggaaaaataaacttgaaagttttagagataaccaaaataattagtttactagatgacaactaattatcgaaatcattaaaatgtatacatgtaagttttagagataaccaaaaaatatctcaaattatataatataaaagtgatacttttttttatgaaaaagttactta

SEQ ID NO: 95708 - DNA, 934 bp, Cannabis sativa
aaaaggaaatagaaatcaatgatgacaatcataaatgcgacccacgcatcaggggcacatgccactatatttattaaggatcataggccgcatacttatcttttactaaataagacttaggggtaaatgttgccttggttttttcccaaaatacgtggccacggctacgtatgacacatagaccaaaaggacacctcacccgagaattagttgagtcatatacagacaaaatggtgtagttcaagaagtgagcccgcagagaatacaaaaagcatgtccttcctctccgggagctagaaatatgataacacatctatgggaggaggaggacattcaaaaaatcacctcacatttaatacagcatggggaaagtgtttgggaacgcccataagaggacatgtcagacaacgtaagcctcatttacggcgattatacgataatcaaaagggctagcgacgactccattatgaagagtcacatcaatcaaggaaggataaagattaatctcacctaatccctaagatacctacaacataagttaggcatgccctattttgtatctcttggaaacttgtgctcatacattgctggctctcaaagacaagttatctcttttgaactatccccacaaatctccattaatacccacaagaaaaatgggaaagggggtcgatgaaaagagagagagaaaaactcaccaagaacattctctgtatatgaactctcattaataacaaagactcatggactacggctcattaatgccggaaccatgtaaaaatcatctccattaattatcccaaaagctgtcatcattatatcatttaaatggttgccaaaaacctcggtcaacaaaattcaagtggtctgggaagattaaaaagccaaaagctctaaaagatatgaccaaataatgtgaatttcatagcgatca

SEQ ID NO: 95709 - DNA, 886 bp, Cannabis sativa
tgaagacagagtaaagcttagctaagtgtaaatctctttctttctatcttttctaaactgaatattagactttgttgacaatggataatgattctatataaatctgccattgcaatttattcatttgtgttattgttgggggaattcttactgtttgatatgtatgcagtattgggattatatcatatgcctttacaaaattgtagtaatcagtggtatttgttagcttttgttctacaatttctgtatgttttcaatgaagggttcttcattgcagggaattgtgagagcttccattggatgatcaaatcaaaattattgttttagcttgtctaagaaaatagtagaaacataagaattgagagagatgggagagtctagagagaataagaaattcatatattcttcacactaacaacaaaatatgttcttacactaataaactactaaactaaagagtaatatttgttattattttctgttctttaatattggtttaagacggggtgttgtgtcggcttgacttagcaagtcttggaatgatggctggttcaagagtgagatataagaggggtagctcaatagttaggcatgttgtttactctcgtaaggtttgaggttcgagtccctctccatagcaattgctatagtttcctgatcccaaaatattgtagggttaaacggggatcctagtttcaaaaaaatagctgccactcacgagtaccaattccaggacgatttcttcaaattttgagtccttgacttaatgatcattttcccactgatttataattgtaaacaagacacataaatggtcttttgttttggtccttttcgtttgcaagctgagaatatatgaggtaaaataaattctacacataaatca

SEQ ID NO: 95710 - DNA, 695 bp, Cannabis sativa
aaaaaaaaaaaaaaatagattttgtctattttaatttataatcaagtgatattctccttatgttacgcgtacatgataaaagttctactatagagcttactaaaaaaaaaaaatttgatatatatatatatatattgtaaaatattataatttagagaaagaaaatagaaaagagataaaaattttcttagtattttattccaatggataatttcttatttatacacatacatgagtcaaatattaagaaattaaaaaaaaagaatattaattacaattaatggtaataaagatttgaacatctatatacttattaatatttaaaacactctccattagatgtccataataactacctcattaaaaacctcgccgagaaaacccagtgggacaaaactcggtcaaggaaaaagagtgcagtataaaattactctccctcattttgacatttatgaagatcctttaatcgacacattataatcttgtgaatcaccttctcaaaagttgatgttagtaatgactttgtaaataagtctagaagattatcacttgattgaatttgttgaacatcaatatcattctcttaaagattgtgtaaagattttttttggtgaaatgtgtttaattctatctcctttaatgtatcctcctttaagttgagcgatacaaggagcattatcttcatagagaattgt

SEQ ID NO: 95711 - DNA, 1103 bp, Cannabis sativa
tcatagtagaggccctaataaaggaagaaaacaaggcagaggcagggcaccatccaggggtcccaagaattgaaatggctgctaccactctagaaagtcaggacacttcagaagggattgctactataggaagagaaacgacaagaacaaacttgatggtcaagacaataatacaaaccaaggagagaattacttctcaaaacaaaaggtaataacacataaagtagctctgatgacatggacatcaatgttcgacacgtggcaagaaagaaaatatttcggaattgagtagtttcgaatcttaacaagtcgacttgggtggggtctctagtcctacgcccaggttgacatcgaaaacttcaggatgggtgtttggatcccaataagttatttccaactcactatcttttactattatgaaccatgaagacatagagaaaccaaatctaagcctcggaagctgaaaataaatgaacctacacccctgaagtcaacatgggcacctatggttttaccagtgcccaaggtgacatcctcaactagggtttcagtttccaagactaccttagtgaaaatgggtcaaaattttcattggtgcatcaactagagatccgcagacatatttgagtcatcaaaattagattcagagtaagttcatttttgagcacctggtgctcgggcacccagcgccccggtcgggaatttgtcaatctaggtaccctccaagtatcaaatcgatgatccaactttttcatcatctttgtcttcattgaaaagggggaaataagtactttcagtgaggaaaaacacttcctgggtcccaaaagcaaggcccagcacctaggttgacacttggggctggccctgcgcctagattgatattttgtcaacttgggccaattttgatggtgtttattcaaaactcttatgagcatcttctcaatttttaggaaagattaagattaaactattttggggatcaaatggaactttcaaaggccagaacttggacctagtgcccaggtatcaacctgggctatttccaatcaagttatcaaaaaaatattttgggcattttttctgtcataaaaaataatgaagat

SEQ ID NO: 95712 - DNA, 597 bp, Cannabis sativa
agtttgcagctaaacatttcattccccaccgattcccaagcatttttgcaaaaacaacacacaggagaggtaagagatttcttttaaaaagtgatacaacagtaaggaggccattttgaatagctctccaaccaaatattttcactttcgaaggaagattcagccccagtaagatttccaccattgttcttgtgtttgtgaagatgaagattttgaaacttcagcacttgaacaggccagatggtaagctgattttactgtgaattctcctacatgtagtgccaaaaccattcatctctagatgaatgaaaagagagaggaattgacagcatattatccacataaagaggaaagaaatcattctgcagttttgataaatcccattctctttctaaagagatataatttgaaaccatattagctgaattcccttagtagtataaaggcacaaagactgattgacctggcaccgacaggtttgaaagacaactcatggtagagctatcaccaaccttcaacctcaaacctttctttaagagctctttaccccaacatataccctgccaagtaagggaagactgttggaatttattttac

SEQ ID NO: 95713 - DNA, 560 bp, Cannabis sativa
aagagtaatttgcgacaaaacccctccaactatcagtttacttgcaaaaaactatctaaaaaactttaaggttggataattttttgtaagtaaattgatagtttgggaagttttgctacaaattactcttaaattttttatttttattttgtaaaatataatcacgtaggataattttttagtgacctatcattaccacgtgggcaaaattaagacttaatgaagctagacagacggcaccttaaaaatataaacggaacagtatttcggaggattttcccaccaaaatatgaagttagatagttttttgcaagtaatttgatagttggggaattttactaaaacataaatttattataaacatttgcaaaaacagttcaccaagtcatccgcaactctcactctcttaacttaaggcctcgaaggagcctcagaaaattgccacaactgaagtttacaatattacaactggaaaaaaaaatctgataaggccacttggtagaaaatcacatataataaacatgaagtttaaaaattttacaaataggtaagacaaagct

SEQ ID NO: 95714 - DNA, 1079 bp, Cannabis sativa
  modified_base (1015)..(1017): a, c, t, g, unknown or other
taccggaagcctcctcccctgtacagggatagttcgcgaagggatattagcaagagatgtgaatatcacaacaatattggtcacagtaccaatgagtgtaaaaatttgaaggacgagatcgaaaacttgatccggctgggtcatttgtatgagtggatcaagaactggctaccctatctcaattcgattccggcaggaagcttgttacctcaggtggccctaaggggtgcacccggagcactagcacctgttgcaccccccgggggagcaatccctcagcaggttcctaggctcccaccaatactcaacgggagagtggccatgatctccggtgggccccatgttggggggaccacctgaaaagaattaaaacgctacactggggccataaaacacgatgacgtgtgggaagtcacccagcttccaacacaaaggccccgactaatggatcaacccattaccttcacagaagaagacgcaaaactggtatgtttccctcatcatgaccccctagtcatagagactcccattgccaaaaaaaaattgtggctagaatactgatcgataatgggagttctatgaacttattattcaaagaagccttcgcagccataggcctcacagactggaatttatcgcccagcgtttcccaactcacaggatttaatggaaccacgcttatcccaatgggaaaagtgatattgccagtcaccctgtgcccggatacacctcagagtacttttaagtactgcacctttgtggtggtagactgcccaactgcatacaacgcaatccttggccaaccggccttggttgattttggtgcaattacatccatccggcacttgtgcctgaaattccccactcaagaggccggagtgggaaccgtaagaggtaaccagggagaagccatgcattgttataatgtcgcagcccatttgccggtgctgatggtctgtgagaatattgacccaaagttggcagaagaagatgagttggatccccgtgtgggatnnnaaaaaattgtagaacccatggaagacgtcgaggaagtgcaagtgtgcgacctcgaccctacc

SEQ ID NO: 95715 - DNA, 1251 bp, Cannabis sativa
tcaccaacccaaagactaatagtttctgtcttttcctcaaaataatggcttgcaaaatccgatggaataggctgcaccaaaaatgtcatcataatttaatgtattgtattatatgatattatcattaaaacaaatattgattagagcaacattattgctttcagcataccagtttatatcctccatgcacatgatctaattgcaaagtcactttaaagcttggattttttgaaaagaaatggctagctacttcagaagctctcttaaccactgaagatttagatgaagatgaagaagggctgtcttggttattactagtgtttgtttcagatatcagattagtggacttatctgcattaaatttataataaacagcattgtaataatctgatataatcttcttaagaatgaaaaaataaacatagagagaagagagaatgattaacattcttgattaacaattgaatatacctgaaagtccagcaataactttcttttgttctttctttttgattatgttctgggaaatttttctacctttactattgcctgcaaaagaagaatcaagcatgagatttcgcttggacggtgttgcagttgctatttttgaagctgaaaacaacaaattattgatcattaagaaacaacaacttcacaagatcagtaaacactttctcacattatcattacatttacatactagcattctcaccactttttctaataatggtaactttcagctcagattggttccccttaatcaacttaaagatgcaagcatctcctggctttagagagttctctcttgtaaagtccttccatccagcagaaaaagaaaaatctttttcaccaaccaaaaacctcacatcccaacatctctcaccaacccaaagagtcatagtttgagtcttgtctttaaggtatttctttgcaaaatacaatggaatattctgcacaaacaagatttgacattaattgactttcattatttgaaacatggatgtcatgataataatgtacatatctttattcaagatgatatagttataagagcaacatttttctacatactagtttatatctttgcaagtgaattggtctcaaaaccactttgaggctgcgattttctgaaaagcaatggttggttgttcttgaagatgaaggcctcttacaagtgcctttgtttccagtgttagctttagatatcaactcggtggactcatctgtatctgcattaaatttacaaaacaa

SEQ ID NO: 95716 - DNA, 552 bp, Cannabis sativa
ttatgaatgttctaagctggaattgccgggggcttgggaaccaacggactattcaattccttaaagaaattgtttttcaaaagagacccgattttgtctttttgtgtgaaacgaagtgtcctaaatcaaaagttgtgggcttggcccaaactttgaattttgatggtgtatttgtggttgatgctattggggcttcgggtggtattgcaatgctatggaaaaatgaggattcaggctctttgttgggtttttctaaaaatcacatagatttgcaagtctctttatcacatacttctccgacatggcgtctcactggtttttatggagagcccaacagaaatagaagaagcgattcatggacactcctccaaagtctaaaggaccggtcttcacttccttggtgtgttattggagacattaacaaaattgttcatcaagaagataagaggggagggcgcccttatcctcaatggttgttaatgggttttcagcaaacattgcttcattgtggattagatgatctcgagttgcaaggtcatcaatacacttggg

SEQ ID NO: 95717 - DNA, 554 bp, Cannabis sativa
acaaaatttgactctccttcaaagtcagaatttttgtcaaaactcaagaatcactatcctcaaattttaggttgtggatacaattgagaaaacaaaagtaactctggttccattgtactatgattttcactgtagtttatccataagctgaatgctaccaacattctacatacagagttatcagaaaacataacaatattaaataaaattaaacttgtactcaggcctcacagttatagtcatcgtgagtacttaatatatttgagacaacagatgcatcagacaatggcagccactcacctgccatcctacaaaacagaaatataaataaatacatataaagaagccaataacaaaataaggcaagggaatttattactatagaaagcttgacaggttgtgtttcattgaatggtatattactatcagcagtgcattaaatttcggaaaatatttctagattagctacttttcactcaaggcatttaacaagcttggcacctacaaccctcttcttcaagataagaagccatgtggcatatatccatagggag

SEQ ID NO: 95718 - DNA, 915 bp, Cannabis sativa
gatttatatattagttcacattccataaagtaagttaatattaaatttttcatactttaattacttgcccaaaagaaataatttaaatatatatttattattattttttacttgaattaatatatattctttaactaatttatttgctcaaaagtaataaattcttaattgatatggattttttttattattattaacatcatgaaggtagatcatgtgtgtgttatattctcatcccaaaagaaagtttataatggccaattaactctacaatatattctaattacttgcctcttatagtttaatcaagttttaatttttcaatctcctttctgtgaacaacaataaatatttccatccaaattctgaatgctccaactttatggcatgattacgaaatgtgaaaattactttaaacataattgatttggacttatgcctgtgagaaaaaaagattgatgatctaactcataccagtattattgcccataaaactcttcatgcacaatgagaaaagtcaaatcatcttaatcttattgctatgaaaagatctattcctaaacatctattgagtggtttgtcaaacactacaaatttcaaagagtttaatgttgtagaaaaatatatgatactggtgaaaatgctgaaattgagcatcttataggtgaaagaacaaccattaagtatgatgaatcaaaaggagtacgagattttattttgaaaattttgaaggttcagtccaagttaaaagatcatattatttttcttcctaactcttacattattcatcgtgatcttcatgcatttcccgcctctttttagtcttatcaagaccgcctacaacacttataataaaacatggagtgtcaatgacctaatttctcaattttgtagctgagtaaagtaagttgtaaa

SEQ ID NO: 95719 - DNA, 605 bp, Cannabis sativa
taaccttaaacattgctaagaaaacttttgacacaagacaccactaaacacagatctccatcttgtactgtcgtaatcttcaacgggacacgccgtctgaccacatcaatatcaggtagacttttgatacaagacaccatgtagaattttaattgtgaggtcatcacaataagggcttctcctatacaatgcacatgcgacccactatcccaactcctgaacctttggctctgataccacttgttaggtccgtttttccaccttgttgggtcgtcacctcaccttaactaccatattagtatgacattatccgttttgggactaagctcttacagttttattttttgacaccttcccaaaaaacctcatactaatggagtagttggaagacttatattttgtactcttacatcatctttcgatgtgccaatctctgttgatatttaattgtaatatttaactagcgtttcaatttacaatcaaaagtaaaggtaaggggtattaccactttaaaaaatatcagtgaagttaaatgtataaaaattaaaacataaaataatttcgtcaccaattacttatgtaaataaataaaaagttatgagttc

SEQ ID NO: 95720 - DNA, 912 bp, Cannabis sativa
tttacataatttttatttttaaatatataataatattataaaattaataaagaatattttattaagtaatggagatattctgttaaagtaaacgtaaaaaacttaaaaatatcgttaaactaaaaaattttgttaaataatcaccactactacaaaaataatttttctcgacatttttcaacagtcgtttaaaataattctgtcagtttctataaccgtcgcctatacgaccgtcgcaaaacggacaaaataacagagtataggtgacagttttaaagtagggcatgatttaaaactgtcgacgattttaaaccgtcgggaatgtaaaaaaagtgaaaaaaatagatttttctgtcatgtcattaatgacaaaagaatttgtattttcccccattttttttcctgcattagttttataagtttacctaacttaaaataaaacaactaattaattttgttacaataacaactaactttaaaacacactaaattttgttacaatatttcttttgggatattggcggttaaactacccgaactttaaattttttaacacttaaccacaaaaatcaatttttttggggtaaaactacctaaactcacattctgtttttgacacttttcctttttcttttcttcttcttcttaactaaaaaaaccctagcataccccatgacctaaccttctctaactcccctctcacacactctctctcacggtgcacaatgccggccttctccgactccccatgttagacgggccacagaactgaaccccacgacccaaaaaatcccaaccccgatctgccctcttctctctctctccttcgatctttctccaaccccctctatttttactgattcagtccgacccccctccagtgatcaccacgaagagagagagagagagaga

SEQ ID NO: 95721 - DNA, 921 bp, Cannabis sativa
taaaatactaatcataattcttaaaaaaggctatgatatgtttcaaaccctattcatgaaataagaaagaataatgatgaagacatctttactactacaccacacaacacgtgataaatgtcatctataaccttaatggatacattaagttcacctacacaacacatcttcttacaccaagttatttgtgttgtgcccacaaatatcctatttaactaattgatagattctccattttttccaatacaaaaaaaaaaagtgcaactaatttcttgaatcaaatatgttaacattcaatttgttaggtatttggaatacaattattgaaatgtgaacaccaacttaaatggaaaagtatgtaacaattaattaatctctaatttatatcaatttaaagaacttgaatggaccacaacactaattgaagacaaattcaattactttacactactacatatacatatacatatacatatattgggaatgaattttgtcattttattataaaacaaaaaacacaaccaactaaattttaatgtagtacacaaaaagttttatttgatgtatataattaaagtacaatgtacttatcaagattgaatgtattttcgttttcaaccgttaaatcaactaaattttaatccaaatggttatagtgaccacgggacatgaccgaacaaaatctaattcataatatatatagaaatttatggtataaatatttaactttaatttctgattttagataaacacttaaattttatttttaacgttaataatatttacagttaaatttttaaaacttcaataaatacggctattaagtgtcaaattaatagccataaaacagtctccaattagtacaggccattaaaattttatttttatttaaaaattaatttaaatatacaaattaaaaaa

SEQ ID NO: 95722 - DNA, 806 bp, Cannabis sativa
acaaaaacacatactaaatcacaactttcagtttaagcacaaattcatccacaaattaaggcatattttaaggataaattaaaacggaaattttaaaaaaaaaaatacctcttttagcttaacggtggaatgtggacggtggcggttggcggggacggtgctccgagactagtgtgagtgggttttgggggttgctggggtctcgagtgggtcgatgggtcgtcggggtagattgggttagtcttcgtatcgagtgggtcgatggggtggtcttcatctcgagtgggtcttcgtgggtcgatggggtcgattaagtcgaaaggattgtggggttgggtcgtctggttcgaatggaaggggtgggttcgacgatgttggttcaaacggagggggaggatcttggatgtgggttcgaatggagagtgacggaggagagagagaaggctgttagagagaatgggagaaaaagtgaaaggatatgagtaattttggaagaaaaatgaaaaattagcatatatttactatgtgtaaatttttgatttaattaaacaccatatgtaatttttttagcataatttatcaaactttccttttttatatagttggtagctttgttttttgttttgttttgttttttgttttttttttttttttgagataaatgctattataataaaacaagagttataatacaatagacattagtggaagtggaagttcatccaaccataaatactcagtatttatcgaaaaagtatatttagctagcctatgagcaccaatatttacaaatctattgacatgag

SEQ ID NO: 95723 - DNA, 1268 bp, Cannabis sativa
atcctctttttctagtggtttcaagatcaagtagagcggttttctgaccttccttgttaagaggttgagtgaagtgaagttttgtcccaacgttgctcacttgagtatccaacgtagcccaatgtttttttgtttaatccttgaatttctttcttgaaatcctttcccaacactagggctaagcataaaatccagaaaactaaaaaaattgttcaaactaacctaccgaacactgttgaaattgaaaccgatggaactgaaaatcgaaaaaactactaacggttaaaaccaccattaaacaatcattttttttgggtaataaaccgaccgaaaaaaccaaaactgacagttatatatatatattaatttattaatttttttttggtttatgtattgtagttacttataatatataataatatattatgattttattaatattaaagttgaaagaataagataattagtttttgaacaactaatttgtatgtttgtagttgtaaaatgtagaataatgtatttatagaataaattagattatattttaaagaagaaaaaaagaagttcggtttgggaggttcaaactgaccaaatcgaggttcaaaacggtcggttttaagataggttctggattgattggtcggttttcggattgcacgaatccagaccgaaaatcaaattctgaatttttatatagaaaaaactgactaaactaaacaatgctcaaccctacccaacactactcgagctagaattcatgacagaaaatcctcttgcacttgttggtgagttctcagcacaagttttccaaaatttgaggaaaatatctccatcagaagcattgacaaatttactcggtgtttccaatgtaaattcattgaccacatgatcttgttcatggataatcaaaattaaagggagctttgtcttagcatcacgaattgcgggctttgagtttgttttctttttttttttttcgtcatagctagagagaaaacatttctatcatctttaataataaagaattttaatatatagaatgttaaaatattgacgtctaaattaatgtgtgacaattcagaataaaaaaaaatcaacgtgtgacatatttataatggtataatatacatacattatagattgtaatagtgatagttttggttatatcattttcaagcataaacatcatctttcattacattattatttttgtcttagttttattttccttttagatttgtaccatataataatatgaaatttcatga

SEQ ID NO: 95724 - DNA, 661 bp, Cannabis sativa
cctgcgtcgctcagccatcttgggagtaggagttggtcctttcgagaccgctatcaaaatagtaagattgcaagtcaacgagctaaaactaaaaacatgaaataatttaaaaccaagttttaggtaaatagtcaattacgaattatacggaaggtggttgtgttaattggggagaggccagtcgtccaaaagaagtcctcttttgaaaggggtattgtttggcaacccaacaatgatcttacgatcgcctgtgtgagtcccaaggtaatcaaaaccccatgctgcattcttcctcgcagaaacggccttgacggaatacatatattctatttctaggggagtgggcactcccatcctaaaattttgtacagaacctttaaacttgcaaggattctgtatgaaataggaaccaactggaatggggcaattccaagatggtttaggacatccttaaagtgatctcccagggggatgattgctccagccctaatgtgttcgaggctccaagcgcctatccctgtcaagccactcgtactggccttgccactggttccctcagatgcttcgcaagtgagtcgttttggtgggtaacaactaaactcgccagtggctactgatctaacccggcatttttgcgtttggtcaatgccacaagtcctta

SEQ ID NO: 95725 - DNA, 545 bp, Cannabis sativa
gggccttttcctatctcctggttcgtgagccacgaggtctgcctcatggtcttctcactccaggttcaagttgattttgagcatttgtcccctgcaccgccctggtcaaggctgcctctaattctaactcagcatttcgacgttgcgcctcttccagacggtgtctcaggcgatggctttctgtttcataagttctttctctcgcacattgggcacctccatgtttgagctcttcatccctcgtctcaggaccctgaccattcccacgctgagttctcctcgagcgcgttgtctacgtagtaggaccaatgtccggttgagttctctgaggacgtgtggtctgagcactgggaccatcctcaggttgagccctcctgaaacaggtggtcgttctggactgcagattatacatcttctagagctcattgggctcttttcgagaatgatggtcagtttcctcatgtggggtgttaatattctttggattttcagccataaaggagaaggtttttctttaaaagaaaggaaggttttttcttagcttt

SEQ ID NO: 95726 - DNA, 764 bp, Cannabis sativa
gttgaaaatggcaaaaatataattagtggggtccactatcatggccaaccactataggtttattttagctattattttatcatttttttattccctataattcaatcctaaccctaagtgaattagtataaaaagaatatgatagtctcataatccaactaatgggtattaacctagtttacatcttgtcagacaactagagagttcttgagacttctgcctctttctttcttctaaatttcgaatcctagagtgttcttcagataaaattttaagccttagtaattgagtgcatagacccatagtaagtctagtactcaatcatagtttgtaagactgaagaatccaacaactaaagcagaatcaggctcagatcttgataatactccgcgacagaaaggaacaagggttagagatcttagtgggaggagtcattatattttgctgcaaccaatgtaaggtttctcaaactttatatgtatttaagtttcattattttagaaattcatatttaggatgttagtaaacatacttgttagtaaatctaggtcctcataaaatatattccaacagtggtggcatactacgagcaaacttgcgaacccttaatgcttgtagaatttggcagggggtaagaaggctccaagagtaccatctcaggttgtgatcttgagaatctaacttgatgaatagaccctaaagcctgttcatcaatgtttgtagtagcaggtaccaaagaggccactaggggcacctctgactca

SEQ ID NO: 95727 - DNA, 1040 bp, Cannabis sativa
  modified_base (48)..(53): a, c, t, g, unknown or other
  modified_base (100)..(102): a, c, t, g, unknown or other
  modified_base (934)..(944): a, c, t, g, unknown or other
aaattgtaacaaaaaaatcgtacagaaatccttattgcaactagcgcnnnnnncactttagaaactcaaactgtaaaattttttaaaaaaaaagttaaannnaataatatatagggtaattccccataaaacaatttatcaaaaaaataaataaataaatagaataataattttaaaaaaaacaacaaaaaaaaagctataaatgaattagaagattttcttatcaaaataaatcttcattaatcacaaccaattacaattaaacaaaacaaggctagaaaaccctcatttgcatctcacaaacattggacagtaattacatcctctccctctttttcagtttcttttgtaaaagagtatagctcctatattgtacatccctttatcatatcaacaatatactttacactatgagagtaataacaatacatgtatttctatttttccatgcataataaatgagagcaaccataacacaatcacccctgctttgaaacccttcttcttcaagccaactgatctcactcgataaaaacttcgagaccaaccacaaccaatcacctctaaacttgttcaagagcctgctgagagaacaagcagtgaaaaaacaggtgatcatggtcctcctaattttctatccctcaaaccgaacaaaggtgcaattcagaggaattgggtgagcaacttgacattaaacacctgccacaatataaatttgtttttaggaacactcaatctatattctaacaaaatgatgatatttgaatcaagcttctatataacaaaccaacactaaatttgccttggtaactcgcattataaatattttctcgagagaaagtagtcccttatgcggtacaatttacgctaataccaactagcatcaactttaacttgataccgccaaaagtctcactacaagaaatgtcacttnnnnnnnnnnngttcgctactgcgctggtaaaaataacttttaccagtgcatttcgctaactgcgctggcaaagagatcaaaattttactagcatacatttgcagtg

SEQ ID NO: 95728 - DNA, 535 bp, Cannabis sativa
ctttggactttaaatattcaacctaagattaaaaatttctcttggagagttttccaccacattctccccgttggccttaatttgtttgttagaaaaaccattcctcaaccctcttgttctttctgtaccaaccccactgaaactgttacacatgccctgctagattgtcctagagcttcaaaaatttggaaggcctcgcctctccgaagtttttatttttctaacaggcatgttgatgttaaagatttcatgatgaatggttttgaacagttgcataaagatcaattaatcttattgcttacaacattatgggctatttggcactcaagaaacaaaaagttatttgcaaatttggatttgacccctactgatattattgcttggattgacacattcatttcagattaccaagcagccgtatctgatattaacagatgtagtggagctcacaaattacaggtttcgggcggggaaaaagttgttccccaaaatcaatacctacttcaaactaatgcagcgattaacacggcacaaa

SEQ ID NO: 95729 - DNA, 814 bp, Cannabis sativa
agggaattaagcccacctcgaggagctggataaaatacacaggttcggtcgctagatcccgaacttgagtcactatggatgcattaaatgcgatatggaaaaaatatctgcgagtggtttggaaaggacatgtcagaggcatttaatccattattctacaattacacactgccctatgtctcttgtgaggaaggaaatgaagtattttgggcgtaacatatcaaacatattaatactacttatttaaatgtgaaaaaacatgcatattgatacttcattttccttcctcttccacggtctccggtttgacatcctcattcgcattttgcttcacttgttcgccattgtcctcgtcatcatgttccaactttttcttctcaactacattttccttcacttgttcgccattgtccttttcatcctgttccaactttttcacatcaacttgattctctgcagtgttgtcgtttttttcttttacattcgccattgccttaaccttttcaaaataacattttgtagaatcgtgcattttctgtattgcatcagaaacaccaatggcatcgtttattttctctgtttgtggatcggtaccgatcttcgtcttcattttttattgaatttgacagcatcaacctcttcaggtggtggaagattcaaacatggaattggagtacggttagtagtgtcccggcaacggaaccagactaatcctatatattttttagtaaaaataatgacaaagagatagagatagagatggtggtgatagtgaaggaaatgaacattataattacttttcttaatttttaag

SEQ ID NO: 95730 - DNA, 1015 bp, Cannabis sativa
tgccgtgatgcatactgctttgactcctttcctgaatcggttttgccttgccttgtgtatgatctttatcaaattccccaatgtatcttccggcgtggactatcactaacagtataaactccagacaaaataccacgaactccagacgcaactggacataatttgtcactacagaaaatattggctcttacaatatatattatctattattaagaaaaattcataaataattactttcttagaaaaaaaatcttgaaatgcaatgtaagaaccttaatatcacttagccgctctattcattcgatctctctctcgtactcatggtatatatatttgacttatttttttctttctatttattcagagtctctctatgcatctccatctcacaaatataatcatatacatgtctattttgtaaatattattttttttatttgctccattttattcttttttttttctttcatgtcaaattttcatttttaatttcaaaaaattcaattatcatcaaattatatccattcacacatactcactcttcatctctatttcattattataactatgctatatatagggtattgagaatgatatagtgatgactacgagtgaaatataatgataacaacgattttgaagtcatacgatgagtttctataaatttctcaattatctttttttagatctctatgtaaggacatgtattatttaatttctaatattttttcattataatgtttgaaaatatctcttagagtaaatgattataaaaaattaaaaatattcaaaacataacaatatagtattttgaaaactaatttataataatatatatgtattaatttttaaaataatttgtataatattaattaatttttgtcattaagagtaaaaagtaaaagttagttgctcattttattaagaaatttttacatcaaaaatccaatttactcaatttattacaaaaaaacccctacacgcttacatcatcatttttacatttcctctttct

SEQ ID NO: 95731 - DNA, 5243 bp, Cannabis sativa
  modified_base (4999)..(5007): a, c, t, g, unknown or other
atggtgatatgtattagtttagaaataaaatattagatatatgtaagtatacaaaatcaaatttccttatgtattttctacctatgtaaaaatatattaaatgtagaaattgttcacatttcataaccgttgtctagataagatcaaaaatatctgtcatcccattcctataaatagcactaacaattatgtacaagggatgaccaattttcttaacttaaggaaattctaccaaattgtaatatgtaatcaaaaactataaaataaaaatgactcgtgaaatatctaggatttaactacaaaactacgtaaaaaatttctatctcttatattataattcgtagtaaaatatctatttattattaagtatttactgtagaatattaattatcaagtctcatttatgttaacaaaattcttagttaacaatttggtgctttcattgagagcacgataattaaactctaaaaaacacatctccctatccggaaacaaaaaacatgcgtaatgtaaaatactactcaagatattcctgtggaacaagaagaaattgttcatcatcctggaaaggagcctcaaagaactcagccctccaacaacataaatacaaggataccttctgagtgggacttcaaaaaaaattggtgatgaagaagatgttccagagagaaggaatgaggaagcatatgatcccacaagatatattccattggtggaattagaaaatagtcaacttcgacaaaggttggttaaatctaagcatagtaacactgagttggaatgtgaggccgctccagcacgtgcaattgccaacaacacacctgcagatcaaactgtgcccccaattcagttaagcagcctcacagatcaaggactaggagggcacaagatgttccaactgaagggaacaacacaaataacctacacgtgttaggatttatgccctaaaagcaagtatttattggattatatattatagaatatatgaaatataaatataagataaataaatatactaattatagaagtataattaataaatatctgaaaattctatattcatatagagaatgtatgatcttgtagggtagtacaagataattaagatcatacaatatgaataaaacaattcggtagtgtattaaagtatgaaatctttaatataaaattactaagtacggtttactatgcctgtgattttgattcgaatcacatatgtagatagacatgtggtaaatgtactgtgtataatttgattatacatgactagaccgattgaaataatatcttttatcaacgtaccatttattatgaaaaagttattcatatcacagtaatgatcattagtagatcagtctgaatcctaagtaacataaactcctatttgtgttcattgcgttctttaattcactcgttaaagttactcaaagaagattattcttgcaacttctgtttaagagcttaataacatgagcgactggaaacatatcatataataatggaatccaagctttctgaaatgatcgaatactagttctcttatagtgttaattctaggagtgctaacaattggatctaaatctataattagattgtagattaactattcacattgaattaatggtacataaagtattcaagagataattagaaggataaaataataattttgaccaactctaattataaactaataatttgagggcgaactacttatattgattatatcaatagcctacaagtaagaattctgtaaatataattttatatcgtcaaagtgtgtaattctatatttatagtagagtaataatagaattaataaatcgaattattctattaaagagttcaataataatgtgttcattggagcttcgaaatataggtccatggtcccttgatcacctctatacaacattgtacaagggaaggtttaatttaaaaatttaatttttataagaaaattcttgagggcaaaatattaattttgtataattatttttttgaataattatattaattatgaattgaataattatattaattatgaattgaataattatattgattatgaattgaataattaaaataatatttaactattaagttttatctgataaaactatattaattagttaaatataatattattcttaaatgatatttaaagagaaatatattattttagtgtaaaataaaatttatttaatcctagttgaataagtgattaataagaattaattaattattatttattacaaaataaatagtaaatcttatttgtaacaaaattaagaaatcaattttgggctttaaaatatggcccacgagtagtgtagggtgacatataaaagcccatttaattgttttgattatttaatgtaataagataaatcaaaataaaatattaattatttttttaattatttgaattaaatatattataggatatgtatttaaattaaaagataatataaaataataagatataactgaattctgttattcaatatagatattatttttgaatttaaattttgaattttgaattaaaaataatactatcattttattttaaaagattaaaaatagtttaataatgatatatattataaatatacgacatagactgatgagatatatgatatacagttttggagagttctaaaaatatacgatatatttgtcaatcctaaacctaagtgtcgaaccctctctctctcatcactctctctcacgcatctctctctagagattggtgctatctctcatctcaggttactgtgtctcatgagctgagtacacattgtaacagaaaatttcattcatcttatcaatcctatcagcctactcttgtcctgagtgttgaggctgatctagaagatttggtgtgaactcttcaacaagtctattatttctttgaattggatgatcgaatttgtatataaaaagaaacaaggatcccctgattggcatcaagaggtaaaatcttttttcatgttgttagattaaatttaagttatattgtgttgagatttagggtttaaggttcatattagattcaacaaatatttttttaaacctgaatctatttttctacttccattgggactttgatatgaatcctaaaaaccaaaaacacatcagtaggagcaacaaccagggaatacaagggaagtacccattgaccgagaagaacagtaaaatctaaatggtcaaaatcaaagagaaacacgaccagacaactcgaggccttctcatagaaatatgagaccaccaacagaccaacaaacatctcggccctcaaattatcatcgtccaccacgatacccacgaagggctagtcgcattcgcatatcctatttattcaaatggcatcatccaagacaagaagctaatcctcgaaggacaaacttgaacattgtggttagtgaatcgaggggaaaccacacatagagtcggtcttcaagatcccgtacaagggaaatctcacaccgagtatgaagtgaaactcatcatcattgccaccagtaagcaaacaaacatgagtgatttacaaagttactagtcagaaagtgcctcgccaacaaggtcagtcagtaattacaataatagaaaagaaaaatattgtgggtatcgaaatgaacttgatctccaagaacatttgaatcggagacagcctgacctacgcaagcagttaaaccgcaatgcacttaatctccaggaggaattaaattataatgctcataacttatgcaagcaactaaacaatcttgcaccagatgacccaataaaattaagagttataaagttggaagagcaattccgtaaataccaagatgaagaatacagaaaactgcttgggtatgacttagacgaagaactcgggccatttcaccctaacataacaaacactccattccaaggggatttaaaaatctacatgtggctccatatgatggaactacagatcccataagtcatttgagcaacttcaacaccataatacgagccaacaatgtaggattaaacttgtgttgcatgttgtttccgacctctataacgggagcaacaaaaagttggttcgataagttcaccaagcattctgtcacgtcttgggaatagttgttttaagaatttaaaaagcagattactgcatcaaggaattatcacgatcacactatcttcttcgtgttgctgcaagaggttacgaatcaggaattatcaacactattagaacaacctaaaatctggtgagttttcatccttaagcccccctttctttctatctctttgttatttttcttgttctagctttgcacaattttgatttgaagtggtaaggtaattatttttaggtcttttcaagcagttcatttccccctctgaattaagtcctttccataatttcagaatccttgaggaatttttatttgtgacaaagaatgcctcatgtctgattttgaattggaatttccagagttcttagaatgataaatccaaaattatttgccttacccttcaacccacaacctatacaaccaaaaatgatattagaaataaatgatgagaaaattaggttatttaatgaaaaacttgattgaaaggatgttaacctacttcagccaaactaaacctagttttcattctctgacaactagtagatgagagactcctttcttagtgatttcgaatccttattcattgttcttcatcaattcgaaccatagtgatagagtaccatgcctacacatagcaagtcaagtactcaatcatagtgcggaatacagtggttaaccaaaactgaaggagagaaggagatccaagctcagatcttgttattactctgcgacagaaaggaacaagggttagaaatctaagtgaaaggagtcattaatattccgcttccatcaatgtaaggttttttaaactcttatgtgtttaatttcatcgtattagagaattcatatttagggtgttaatcaaacatacatgttagtannnnnnnnncctggtaaaataagttctaacatataccatgggtgagattgtatcttcttatggtcttcgtcaaggtgatcctctatctctgtttctctttcttatctgtgatgagggcctttctaatgtgaataaaaatgtcttcgagagggggtattcatggtcttccttgtggcagaactgggctagttatctcttacttattgtttgccaatgatagtttttcattcttagaagcgtttcat

SEQ ID NO: 95732 - DNA, 721 bp, Cannabis sativa
aaagcgatggtgatagggatagtcaaagggagtaaacatctaaatagacaatcaaataaagaagccacataatagagtacctagaggagaagggccgcctcgaagatggaaccggtgtctgagccatctcttcaatgcttagagagactgtctggattcagagatgatatgcaatgatgggttttgggtatgagaaggagggaaaccaagtgacggttggtttatctgtatgagatcgagctgaggagcggaataagtatagtttgtgcaggaaaattaaatgctaaaaggatagagccgccataattaaatgcaggtgtgagagagaaatggcattaaacagcggctgagctcgagaaattagggagagatgcataatgattagggtgacgtattatgctattaaatcaagagtctggaaggagtaattaatgaggccaaaacaggaacaaagagaggattcttcgcgagtaaggaaaaaaaggggggtaattaatgcagggaaaactaaagaagaaaatagaaagaaacgaaaaattaaaaggaaaaacacagagaagctcaaacctggttgagaagaagagacaaaaggaaaaacacagttaccctaaccaaggttgaactagagcaaagcctgtaggaagcttcaagaagaagattagaactacatatatctttcagcagactactccaaacatagtcacttgataatatatgattc

SEQ ID NO: 95733 - DNA, 513 bp, Cannabis sativa
aaaattaaagagaaaaagaatgaacaatttaagaaaatttagacttaactctatcaaactaagacaaagatattgacgtactttcttcttgatacaatttcatatttttttttatcttcttgtagatccttagatttatcttcattcttttttgattaccttcctcaaatatgtatgagactgaatccatttgatttttaaaaaggataatttgaagtacttttcatatgtattcttgataaaccaacgtttatatatatatagatgtaggaagatctgtttgggaagtaagaagcccctctattttttctttgaaaaaataagagaataatagctaagcattttattcgaacaaatatagaaccagaatggatggtttacctttcgctcaatgagaaaatgagttagattctacatgatcaaacctatggcacttaaggaatgatggaaaagaagaaaatcaaaaaagaaataaaaaaagaaaagagagggaaaaataataaaaaaaagtta

SEQ ID NO: 95734 - DNA, 516 bp, Cannabis sativa
taagtagagagtgagggtatattagacaacccactcaaaaaataggtatattttaataaaatataatacgagaatttttttttattaatgaatacaaaaaaaaatatatttcaatttatcccatacaaaaattggtcgtaaaacttttaagttatgagtcaattttagattaaaatataatcataacaattttaaatttgcatcactttccatatttactactgtatcaatggagcatgtatattattatttcatatatctttctaaaaaaaaaagatggaagcactactagaaaaaacactgtttttttttaactaaaaaaacgtaaaaggtaacatattatcatgcttttaatcaaagtctttggagcaaaacaaaagctagtcaaaaataatgttttgttttgcttttaatgcttttaatcaagaaataaattaatgttaaagcaaaacattattgcttttgttttgcttttaatcaagcattagaaaaataatgttttgttaatttgctttt

SEQ ID NO: 95735 - DNA, 1113 bp, Cannabis sativa
ttccttggctgaagctggttttagagcaggttttcctaaactcgtgtaaccacggtgttcctccaccatgagtgagggttatatatatatatatatatatatatatatatataacgggtgaggagtctgtctaagacaagtggcgtcctttctctttttcaaaaaaaaaaagtacaggtgcaaactaaattgtttggttacaactttgtaaatccagcatctgtagaacaagattgagctcttgacaatcaaatcaatgatcaggttgtggttcaaaatctggaagaagatacagttggtcagcaacaaggttgagtggagcctgttgaacaaaactatcaatccaatgagagtgaagctttggaagagtatatgctaacaagggacggagcaaaaaaacaaatgaagccaactgcaaggtcttcacaagcagactttatgacctgtgcccacaaagtggccaatgcattggaatttggagagcctagaagttatgctgaagctaagaacagtaaggattctcttgattggaaacaagctatggaatacgcaatgcagtctttagctaagaatcaaacctgggttttgaaggataaattgaaagaaaaaagagtaactagatgcaaatggttttcaaaagaaaaccaagtattcctggtgtaggaaaaagatttaaagcccgtttggtagccagtggatactctcaagcagaaagggcatgattataacaaaatattttctccagttgttaaacatacctcaatacggttattcaagcttttacagcagttcaagaccttgagttacttagagcattaaatgtcaaacagctcttttgcatggacatatagaagaagaaattctcatgttacaacctgaagggtttgccaaagtgaaagaagctgagaaagtctatcaactaatctcataattacaatacaacagagtgcaaattcagggtgtggggtgtaaagaagcaaatacttgctaattttttctaagaagccctgggcatacacaaaacaattccttataaaacattttgaacaaatgacggtacatagtgatttttaatccataactctgcaatcattgttgataatcaacattcaa

SEQ ID NO: 95736 - DNA, 692 bp, Cannabis sativa
agaatcaataatccacaaagatttatcatcttccacttaacccttcggtatcaaaatatcaattcctaataagataatatttttatcattgtctaataagatagcattttcataatttcctaataaggtaatatttttatcatcgcctaataaaataatatttttatcattatctaataagataaaatttttatcattgtctaataagataatattttcatcatatagcggtaataacattattttaatctcaatatcaatcgattcacatcgataataattgtatcctaacataacatgctatgtaatacaaatatacttttcctacctttaattttgattcatgcataacggctaatccaagtggagaaacagctgacaatcccagccctatgtcacaatacagtaaattgatgtatctattccaaaatactacttaatacccacataaaacaatctaaggttttctagtaaatctcgtagcaaaaacatcctataataaaatacatattttggatttaaattatgcttcacaatggagagctctttacaagctttgaaacaatatatacaacgtctaaaacaggcacccgagcaaaaagttatgactgaaatacgaaaattggcatttctcagttactaccaatcgaattttggttggtacaacttgtacaatccataattccagttca

SEQ ID NO: 95737 - DNA, 605 bp, Cannabis sativa
ttgcatctggtgttgaggttgtgcagaagatggttagttttctttaatccttttttacttttttttttatttgttttagtattgttttatggttgttttgccataatttatttatttaacgtcaatttcactgttcttactccttttcgccaaaattaatagttgttttcttagtgttctcgtgttgctatggtggttctctccgtgggtatggaatttggaggttataaatacatttctttttccttttctatggtatgtttttgtgttttttttttattctaattctcctataaatacatttgacgagctcacatgctaaaaaggtttgaggggtgtggttcttttatattttttaaatggttatatctgttgtattgttttacatttgtttttgtgttgttttagtagttttctttattctgattttccaagaatgggcttccaaatatagccactattgcgtctagtgttgaggctatgcatttaatctttattttttcttttgttttcttaatttgttttagtgttgttttgctatgattatttatttgacgtcgatttttctactttgttccatcttgcaaggattaatggttgttttc

SEQ ID NO: 95738 - DNA, 924 bp, Cannabis sativa
atattattactgtaaaaaaattaatttttttacgccgtaaattattctaattttaaattttataaaacaaaataatttaattttaatttttaattttaatttacagtaatttattattattattattattttttgaataaaatttgttattattattagtaaattgttttatgaatcaaagtgttgattgctcattgcttattaaaaaaaatgaagtacaaaataaattctgaataccaaaaattgttagtatttgaaaacgtgtaatttttaacaatttttttaggatttcttctttttgttttgattttataaatttattattgttttgtttgggaggtgaggagtgagtgtaggagatagttttttatattttaataactctctatatgtaaaggaattctgttcatgtattgtaagcaaaactcattgtttgtaaaaagaaagggaattagaaagtgattttggttgttatgcaagactcaattgattgtataggtcaatttttaaactttttaagtgttattttatttagtgggtagactcattgattaaaactgctttcaaaagtcaaaaggtttagattggaactaatgttaaacatgaaagtcattcatgttgattctaagatgggcagtgcattgttgctaaaattgaatggtaaaatggattaatgattcaacaaataacttgttcacaagtttctttaaaatacattcatttggcaaacatagcctaaaagaaacatgttaattacaattacacaacaaaatcaaatcattattcccattaaactggattgatcaatcatcctacataataaatatttttgcagctttaaaattacttcaattccttatattttcataagatttcttgtttataatttgactgttttaaacccaaaattctaactttaacagc

SEQ ID NO: 95739 - DNA, 1003 bp, Cannabis sativa
atgtaattttattacatcactatatattaatgattatgaaatacatcaagatatgagttgggtctgaaacttcaaaactatacattaatgattatgtaattttattacatcactatgcataatttctacaatactaatagaaattgcaaaatttattatgataacttcatctagaatgtacatatttttactgtacaattaagaaaaataaatcacacttcatcaccaccaataaattttcaatttattttatcttacttttttctaatatagttaatgtgattattaacatatattggattattttagattgttatttcacatttataatttattgcaaggtttacaaataaacctaagaaagccagtaactgtgagcaaatcttatccacaaacaagatgagttctcacatttagaaatttaaggaacaatcaatatagtagtgactttgttttaaaattaatcaaagacctttatgctccaagtttcattagaaacttgatttagacatttatttaaaggtctttactacattaatttacaaaatgatctcactcataaagatatgcacgttcaatttggcaataagaaatgtgctattaataagaattcttctacattttggcatcgaagattatatagcatatctccataaatagaatatgttaacccaaaaactttccctagtagcgtggacatcaatatttcacacatggcaagaatgatgacgttacaaaggttagtagacccgagtcatagtagtcgacctgggaggggaccttagccctgctcctaggttgacttagggagctccgggatggaagtttagacttcaataacttgaatccaacaaactattttttcagtgttatgtaccatggagacttggagcaaccaaatctaagccgcaggagctaaaattacatgaacttgcaacccgaaagccaacttgggcacctggggttttagttcctgggactgtcttagtgaaaatgggtcaaa

SEQ ID NO: 95740 - DNA, 983 bp, Cannabis sativa
aaaagtgtaataaaataaagttaatgagtataaatgttggtttaaccgtgtgaagatatatatgtaataatgtatgtattttgtatttttagtgtaaaaatttctataataaaatttaaataatctgacttaatacaatgaccagaagagtccctaatgtttgagaatgtatataggtgattgttattgttatctgtatttttagataggttacacgtatacttctaaaaatcgaaattctgcaagacggaccaattcacaagcccaatcaaactagtgggtcagtccaccatagatttaggccacggctccaaattcagctttaaatctaatatacatgcataataaagttggaccttattggttccggaagggcaactagcccagaaaatgtaaggtccagcaaagtatatttggatacgctcatgaggtaatctagagagggaaactggagaggcatccagatatcaacctacatgacacctttgtgagatcgaatctcacaaatttgggtgacaagtttgtttccaacgttagataaaggattaaaaattttaaaagaaaaaaaaataatgatagatgacgtagtatatgtacatgtggctgcttcaattaataatcaaatgataccattttcatcattccttaaatcatggaagtggtattaattataatttttttttttttgaaatgtggtattaattataactaattagagcggtatcaacaaaagaaaggtagcaaattggagagtaatgactggccaaagtgaatatataaataggaaaaaggagaaattaaagaaggaggtgtgtaaataaaagaagtaaaatacattgtgtaactataatgacgtcgtctaaattaaagcaaaggtatttcagagtgttagagtcaatattatggtttaaaattcgtgaatgaagcaccgtccatttctcaagtggcttccatatgttacctcttctattattattattatt

SEQ ID NO: 95741 - DNA, 547 bp, Cannabis sativa
gtccaaaaggttagagatgatcgggatgaaaggatcccgacccaaggaaccttctctttcagaagcactgagaacaaagttagtatcacccaggatcagtcagggccccccaaatctatctcccagagtcagaaactcagaccagaactttttcttcgcatgcaggtagggaggaccataaacacacgataggagccacggataagaggggggatctgaatacactatccccgagatatgattgcacgagcaagagatacattcaaaactaaacccctctttccaagccagaataatacctcccgcatttccaatagaaggaacacaaatattaaagtaaaagtgaagggacttgagggtacgtaccagaggattggcgttcactttcagctcggtcagaaagacaaaatcaggtgagcgcgaccagagcagagacttcagttcccgcactgtagaggtctgccctaaccctctacagttccaagctaagcctctcatggctcctgtggaggagattcaacattctcctccacaggggtatgagagt

SEQ ID NO: 95742 - DNA, 861 bp, Cannabis sativa
gttagtaagaagatggatgctttggttaggaagtattggtggacaggtggagtggaaaaagaccattttcttgcaactaaatgttgggatattttgtgccagccgaagcagagaggggggctgggctttaggaggtttggagatatgaataaagcgttagtggcgaagttggcttgggaagtggcgtgcaatgaggataaaccgtgggtgaaggctttaagggagaagtactgctcttggccttctttctggagtgtgcagccaagagagtcgaattcagcagtttggaaacatattcttgtggcgcgacaagtgattagagaaggagcttgcatgattttggctaacggttaagaggtggatatctggtatcaaccgtggataccgtggatggactatgatgagtttaggactgttatggaaggagttcgtgttcgggcgccaaatctaaggactgtagcagatcttcttcggggatcatccttggaatggcggaagaaatatgttctgtacttgtttggtcgagaggagggagagagaatcctttcgatctctatgtctaattgactggggagggatactttaatttggaaggaggctcgggatgggaagtttagtgtgaaaggggcttattggtttgagcagaagggaaggtttaataacaaccatgaggttttgagattgatatgggatgggaagatgcatccgagacagagtattttcttgtggagattgtgtgcgggtgccatgccgactaaagataaatatgcaggagggagcaatcaggagtgtgtgctgtgtggctatatttgcgagtcgactgaccatttatttttacagtgtcctctgtcaagagcgtta

SEQ ID NO: 95743 - DNA, 741 bp, Cannabis sativa
atcttctttcccagtgtacatcttccaggtcagcattttgaacttgaggggtagttgtagaacattgatttcaagagtgaatggtgatccgcgtgctcaatccaactctagatcattgagtttctggccggcaaggccttggaacatatttttcaattcatccaactatgcttgcacggatgggtgaacttgttcggcgtcttggccgatgagtgccacgtcaggatctctttgagttaggtcttggatacacatttcaggctgagtggccagtgggacatattgttcgtccaagcccctccttctattcagatcatccctgagatcatgagcaattcctagtttgttgaatactaaaacaccaggttgtctcagtaactagttggtttggctagtcagttggccagaactgctaatctgggcagagttattgggtataacccaacttgatgaattgcaagataaggtctggctccctaccacttggcccacaggtggaacctgtgaccagggattggactgctgaccgttcaaagtttgggcagtatgccgagcaggaatatcttctgagccgcctagtgggatgctagaggctatggctggttgctggttagcaacttggtaggcccttcgtatcattacggtggtctatcttgtttagtcatcgattgctacctgttaagccttcaacgtctccatctctcaatccctccatatagcgaactgatgccttttctcttc

SEQ ID NO: 95744 - DNA, 648 bp, Cannabis sativa
aatgccaacctggatgctaggtgtctggggtacctggtgctctggatgctgaaaaatgaaagtttctgaattttattatgatgcctcaaatatgttcatgacatgtataattcatgtcccagtataaagtttgacccatttgcactaagacggtcccaaaaactgaaaccctagttagaatgtcaacctaggcattgggtgaaaccctaggtgcccgggttgacttccaaggtgttatttcatgtattttcaacgttcgggccttggacttggattcttcttgacttagttactcaggatattaaaggatggtgacttggaaacaacttggcgggatccaaatacccattccagagcctcaaagttaacatgggcgtagggctaaggaccctttcccatgttgactgctatgactcgagtttcttcactcctggaatattttctttctttccacgtgtcaaacattgatgttcacatcgtcaaagctacttttggtgtaagaattttcccccaagtcaactttacacttgtatgaggttgaattgatgacgtgaactaaacccatttctctcgaaactaccaggtgggcatcaattttggatatcttaggcaattgtattctgtttgtcttgagtgatttcatttgaa

SEQ ID NO: 95745 - DNA, 521 bp, Cannabis sativa
catagtcaatcaattttcgaaccactgacagaaactctttatttccgaattgaaaatgtcaacacatgcaaaacgtcccaatattatacatgctggagtggatttttgtctaaattgtttcataatacataaacacaattagagcaaaaaaactttctcaaaattattgataaacaaacaaaactctaataagtaataacaataattctcagaacaacagtagagaaaaaagtagaaataataacatacaaacgtaggtggttccatgagcttggtctgcctatgtgagttgcgctgtgagccccgcctttgttcgagccttcgtgaaccccacacctttccgttcttccacccgtgtgagcgctacaacagccatggtcttccaagaacgtgtgggaggcgagaaacgagagggtttatttcatttttacaactaaggaaggactatcaaagtgattttttaatttttttttaaagacaattaatataagttcttaaaaaaaatgttctaaaaagggtat

SEQ ID NO: 95746 - DNA, 522 bp, Cannabis sativa
  modified_base (468)..(469): a, c, t, g, unknown or other
atcaaacatatcgttaactataaagatctaattgataacataatgatgatcagtagtagattggcctaaattctgagtagtcatgaactcttattcatattattagtttatttgattcactcattaaagtttctcagaaaatataattcttacaacttctattttgggaatctaataatgtggatggctgagaacaagatctacaattatgatatcataactttcctaatggatcgaatcttggttctctttaagtgttaattttagaactgaaaagttgtgtgcaaatttggattggatttaaattaaactttcactaggaattgacagtactaaaggataaagaaagaattataaaggtaaaatgataatttaaccaaaactaaatacgaacagacacaaggagggctaataactgaaattgattatattaatggacactgcagtaaaactcagtaaatataattnnataattactaagagttcaattctaaattcatagtggagtaatcatgaaattaa

SEQ ID NO: 95747 - DNA, 938 bp, Cannabis sativa
  modified_base (163)..(164): a, c, t, g, unknown or other
  modified_base (691)..(693): a, c, t, g, unknown or other
gaagtaacactagtagttaattcaactgtatagaactttccataggctgaacaaatatctttctgcaactttaacattcagtctcactattagagttagagattctggatctatttttacacttctccaaaatcactgctccacccccaagagtaatcaccannttatcagtagactttctagcatcaagcaagtctagaaacctgatttggtgtagtctaagagtattaaatgaccacccttatcgactaacatatgtttcctcttcttgatcttaagattctcttgattttcttccaatgtttctttcctgtattaatctgatacctactcattactcccactcaacaacaggtgtttggtctaatgcatagtaaagcatacctgagatctctcactgttgatcctaagaaattttttcttggcctttatcttttttggaatagttaaaacttttctttagataaataaaatctatatacagaagtcgagaagcttctatagattgtcattaaaaaatgctccagcatctaactaaagtaagttgcttgaactagagtaagtggattaccaggcatgccataagccataggtttagataatctcaaatctataatatactaggaacaggaagtttcgttaagtccattgaatggacttattttcaaatttcatttcttgtccttgtaannnaaaacttttggttattccatatgaatggtttttgaccatagttctcttggcttttcttcgtagtgacaccctagtttatggtattgccattgtaacaccctaactagcataggcgtgttagcgtgttaggttaatgaaaaacgtgattaattaaaatttgcttatttaattaaaaatttgaattattacatatataaaattctgggatcccgtttacaaaatactttttaaaagtttgctataca

SEQ ID NO: 95748 - DNA, 928 bp, Cannabis sativa
gattttagacttttaccaacgtaacaaattgcgtcggtaaaaggttctgattaaaatcgaaggcacaaagccttcttcctcactttttttctctgcaatttctctttgtttctctctctctctctgatcaccatccttccctctctgattctttcactctctctaattctcactttctcatctctctctctgtgtccaaaaaatattgaaaaaagaggcctccgaccatcattgctgcccgagtaattttgactgccgcctccctttctctcaggcaaggtatgttttaatttttattttttaaaatatttatttgtttatatatatgtgtggttaaaaatgtaaatatatttacattaattcttttaatttttttactttaaatatgtatagacaagtaaattttgtgtaaaaatgtgtaaatgtatgtatgtatgttgtaagttaaatttagtatgcaagaatatgcaatcaaatcaagtaatataataataaagtagagtatccttcccacaaagatatactatcaattatcaatcaattaattctttgtttttatttgatcactaaaaagttgtaaaaaaaataaaaaaagcaaaataaataattaaaaattagagaattaaacaatgagaaaaaatacaaggattattatggtcctccactatcctttttttttttacttcataattcatttatacaatttttcttctttctattaaattgacaagttgaattaagtagttcataatctggttaggacttataaacccaatctatgtaaaaattacttatattcctatggtaaagtttaatcacaaagaaatcattaaacaaaacaactcataaaatcatacaaataaacttgatacttctctcttaaatcaagttacatccataataatcaaagcatattcaaatctcactt

SEQ ID NO: 95749 - DNA, 615 bp, Cannabis sativa
acgaccttataaatagactcatcgagaaactgaagatgaacctgatttggaggcaccagaagcaagctcaatgtatggagatttccaaacaactcctttcttccgatccctcttttgaggacgtaaaataggagtctcttgaaaaacaaccatttcaagatcattcttctcagaagtctcagcagaagcagacacagtagttaaggaaccaatctgaaaaatacaagaaaaatgatttactatattttttaaaaaaaaaattacaatcaaaacactagtaaaacaacaatagaatattatataaacacacataaaaaaagaaaaaataaataaaacaaaccaaattctccacaactttaacagcagatgcaatagttgcatcaacatcaatgttctcctctacaacttgataatgttcagactgacgaaaaaaacaacattaagaaaatattaaaacaacatcaaaacacagatacacaaaaacaacacagaatattaaaacaaacaagaaatacacctgtttaacctctgcaacaggttccatagggtcagtcttcttggcatcattaatgtgttttctttagaagaagaatccaccttgccagtatcatcatc

SEQ ID NO: 95750 - DNA, 655 bp, Cannabis sativa
gttggtgattagtcgtaataattcaaacttttggaaacaaattagctcaatctttttgtgccaatataattggaaaatcttttggctcagttatacctgaaagtttgcttatcaaattaattgataaatataattccttaatttctttttcttagttatatatggaggatatataatactattataaacaacacatttaaataaatataattctaataaatagaggagatggaggttttaaattaaataagaatgtgtactgtacataaaggtgagactaatatgttggatggtagtgttgggtagacaggtgttcaaattgttgatatttgtttggcacaatggaggtttgatcaacttacaagaactctgcaacctgcttcgtcggaggcgaaggactgaccgagaagctgtctctgaagatgactgcctaagagctataagtaaactcaaggtaatatcataagtgtttttttttcacaccttggatttttttaccaatatgacttacaagccttggaaaaaattgattgtacaggaaggtcttccaatgattgatgatgggcatagagatggaagacgccggtactggtttccctgcatttctccaattgtatctattggagaacattgtcccacatggattaaatgtaaa

SEQ ID NO: 95751 - DNA, 854 bp, Cannabis sativa
cgagttatttttcttcaatcttcactgccgattgaactaccttcaacaatgtggtggataatataaatttttttgtttctagggagaaaaatcaagacctacttcggcctgtacttgctgaagaaattaagcaagctctctttcaaatgcatcctgacaaagctctgggggcagatgacatgggacctggtttttatgagtaacattgggatatcatggggcctgaccttgtcaaattagttactgatttttttgacacaggtgtttttccacaggagctcaatgataccaaccttgttctcattcccaaaaagaaaaacttctcctcaatgggtgaattgcggccaattactttgtataatgtttcgtataagattggctcaaaagttcttgccaactgtatgcgtaacatgattgacttttttatatctaaaacctaaagtgtgttcataccaggccgactgatttcgaacaatattatggtggcctttgaagtaatgcactacttgaaacggaaaaggagaggtaaaaagggctttatggctttaaaacttgatatgagcaaagcttatgactgggttgaataggattatttgcgagctgtcatgcttcgtatgggatttgcagaaaaatgggtaaattttatcatggcttgtgttacctcggtgagatataccatcatgcataacaatcatgttatgggtcctatcatccccacccatgaaatcaagcaaggtgacccactctcaacatatcttttcattatttgtgttgagggtttatcatcaattatcaagacgttcgaatcaaatcaactcctccaagggtgccatgtggctaatggggctccatca

SEQ ID NO: 95752 - DNA, 519 bp, Cannabis sativa
atgggtgacacatgttaggtgcgtttgctcgcgattcgatgtgaggctaaccaggcgtcccttcagttttcgtctaattaatgctctgactcaattaatgcctcaaaacccagctttctcgtaccacgtttgacggttacacttgattatattttattaccaatatttgcttttggggggaaccgatgcgtctaaggcattttaaatgatttccttttttcactcttctgcctataaatagggttaagcatcctccacaaattcacttttaccaatttctccactaagcgaacttagagcaaggaaggttttcacttcaagtctgtcgtgagatttctaccaaaagcatccgagcagctttgtttggactgaactcagatgtcgaacagtgagttagttttcaatctcttcctcttttactttgcatgtttaatttctggttttcatacatgcgttcttgacgttgctgtagaacataggtagaaaatctaggtttgaaactttgtgattttctttgtc

SEQ ID NO: 95753 - DNA, 630 bp, Cannabis sativa
  modified_base (269)..(273): a, c, t, g, unknown or other
tatagtcatatactaggtatttatttagtttcaattttttttttaataatttataatgtcgaaaaataagatttaaatattcagttgtacacatgtttgttttattttacaagcatgcaaaacggacaagatactttataactacaatatacacgttatatcaaaaaatgagtatacaatttcttaaagtatgaaaaataaatatattcccactacaaaaaaaaaaaaaaaaattgcttttagtgataactttttagtcacaatataannnnnttgtgattaaatgtgacttttaattataataaaaagttgctagtgattaaacataatatttacatataagttgtcactaatttaattttagtcacaataaattataacttttgtgactaatacttttagtcacgaaatttttagtcacaacatagaataaaaatttataattagtcataattttttttatttttagtcataagttttattgtgactaaaaatatatttttttttgtagtgtcttgcagtaagaacataaataatcaccctacttaagaaattttgtgtttacatatatattatattatttttgtactgaacaatagtagtttgacacaaagaaaattaagaagaaaa

SEQ ID NO: 95754 - DNA, 1189 bp, Cannabis sativa
tttctaaactttttacaaaatatacaaaatacatatatcaggtcgcacagtgacttgaaaatggaaaacccagatgtctcgagaccgaactctccaggtcaccccgccatgacatgtacaaccccatcccagctcaggctcactcctattcagctttcacgttccttttacctacacatgaaagtagaattgtgagtcgagagactcagtaagaaaagcatataacatatcatattataccaacttgtatctaggcgtccatacacctatttacaaggcttaacaaatgagtaagaacgttccatactagggtacaaccactgtaccacatacactacgtacctcattgcacgagtgttggtagggtttgttttgtaccctaagtaccactaagtgatataccacacacaccctgtactttctcatacttgtgctagtaacaccgcaatgtactctttaaatcacatacactataccaatgcactctgtaccatttttccatacaagtgttggtagtgaactaaccatataagcatgcatatacattaacacatacatacattcgcatattcatatcacatattatacgttgttcttaccttttttctgaattcaagtgagttggccgacttgaactgaaagtctcgtgttggatggatgccctaatcacatattaaaactgggtaaatcatacgtcaaaaccctaattcgagaaacctgaacctacaacttaaggttctattattactaatagggaccccaataccctaaggaacgggaaatcacccaaccaaggcactagagtggacatgaatcgagaaaacaagttgtttggggaatttgccaaaatcggttaaccagttttacaggtcccgacaatctagttaactggtttacactaggtttccccaaacaactccaaacttgctcaatattgtccaaatgccaccaaactttccagaatacctaaaatgaccttccacaatataatccaagcaataacagcaagagaaaaacttaaaatccaaaagtggcattaaagacccaagtttgagtttccaaacccaaacttgttcaattccatcacaatacatcaaaatcagcaaccagaactaaatattaacttaaaatgaacctaaaaactaaaccccaaacatttctaaccctaacagccaccaaaacccaaaat

SEQ ID NO: 95755 - DNA, 528 bp, Cannabis sativa
actagtccacaaagggaagacgaacagaatctttgtcaacgcggttgtcacctcccccaactgtcacccgagatcacctaaacaaaagagataaggggaagtgagaaactagaaaaagtgatgaggtgcagataaagttctgtccaattgtacccaagggtacttgcagacaatctcatcgtacaaggttgagtattagtgaagtatcatcccaagtataacaacatggacaaatgtttagtcttaagtttaacattaaactataatagactcaccattaagtgtcatagaaatttttgaaggaaaccatatatgagactaaggttgtacatgcctacaaaacgttcacaaaatgcttgccaaggtcaaaagaggacaaaaaattggttgctcgcttagaacctaggcttagattagctagggttcccaagctactagatggtcagccagggtcccatgacccaaccaagaaccgttcaaggtcccatgacccaggcatggaccggccagccctcttgggtgaacccc

SEQ ID NO: 95756 - DNA, 622 bp, Cannabis sativa
tgatcaatgctttatcatgtaccttatacacaaaccaaaataaagaatcgatcaagaacaatacaaacaaacagaattatgcacaacttgaaattgatcaaaccgaaaaacaaatagagaataaactagctatttgatcagatatgaacaaatgaacaatgaacaaatttagacaagaaggagaaaaagaatcaaacacaaccaattacgaggttcgaacaagtgatgatgaatcacttgcctactcctcggccagaacaactccaatggctcgaatctttattgagctagaagagagaattacaatgtgattattaatgtgttcttgacacaatcactcaagaagcatagcttcatttacaatcaacctcacacaaaagacattatgatttatcacttcataggcctatataacaaacttaaatctctctctctctctcttgcacactaaactagctcttgtaacctctgaaattttctcccaaaaactgtgttgcaaagtagtagcaattggctatatatagccttgaggttgaatccgatcctaactgtcataaccgacaattaggttaaattgttggtagttataagaggacgagccaaagatgtctttttcctctat

SEQ ID NO: 95757 - DNA, 1008 bp, Cannabis sativa
aggttagacagcgatcataaaacttaagaccgctcttattgacctaaaggcaacacacttaaaataaataattataatctaatatgcttcctaacatacgtaataatcattgaaaacactaaacaagtacgggcctactgaaccgtgaactgagctttttctgatgaagattgtacatgtcttggcaagcttcggtagacaaacctggcagctctgataccaaaattgtaacgccctactgctaaggcacgctacagtgctttttcaattacagtgctgtctttgctaatcaaagaatttccttaaaaaacatgtcaaattaaaacttttatattaatgaataaactttataatatacaaaactatttacaagttctgggatcccgtttataaacttttaaaacatagtattccaaaatacacattatccatgtcgcatagcgactacaaaatacaaccccagatttcccaagaccgaacactccaggtcgcgctgccttgacatgtacaacctcatccagctcagattcactcctgttcgaccttcgcctttcctttacctacacatggaagcaaaactgtgagtcgacaatcttagtaagaaaagcatataacatataatataatttctgacttgtatctaggagcccaaacaccgatttacaaggcttgacaaatgagtaagaatgttccaaactagggtatagccactataccacatacactacgtacttcgctgtacgagtgttggtagggtttgtttcatgccctgagtaccactaagtgatatactactcacacccaatacttccagtactggtgctggtatcactgtaatgtactctcaaataacatccactataccaatgcaccctataccttaactataaaagtgttggtagtgcaacaaccacttttagcatgcatatagacataacatatacatacactcagacattgatatcacacattatacccagtttgtaccttctttccagattcaagtgt

SEQ ID NO: 95758 - DNA, 581 bp, Cannabis sativa
cggtgttgctctgtccgtccccaatgaagaaagaggcgtcgtttgtccgattttactattcacagtataaaaaaaaataaatgggcctggacagtttaaaagttatttttgcagtgtggcagtatttttattaagattggagcaaaagtcagtatttttataagtttccctttaatatatacatgaaaaaaccccaaaagaaaagtgacaacaagtagccctatttctacgttttatttactcattattttgtttggacaaatgttatccattggatttcaaaagcaataattttttgttcaatccaatggttaatatgattcttgaggtttcacgtttcacatccttcaaaattatgtgagtgacttcaaaatttgccttaatcatatgcatgacaagttttttatgtggctacatgtagtgctgtaaatacgggtaaggccttttaatatgatacaaaattaatacgagcctcgaagtcaagagtatgattaggcacaaataaatgtggacttgggcataacacgacacgatgctacaaattagcacggtacgacacgaaaactatgtccttaagaatg

SEQ ID NO: 95759 - DNA, 962 bp, Cannabis sativa
caattaagtttgcatgccatatttatcaaaactttaatttcttttcccatatttttgtaaatagcccattttataatgagcattgctattgggtgctaacggcgcctaacactttttataggaggtattttactattagttagcgataattcctaaaagttatttacttaagttatataggactcaatacttaattaaaccaatagtagtacgacaccgaaaaaggtgctaagcaccaggagtgccttttagtatttcttttttaaaattgagcgaaaaataagcgatcaataggataatatgtaggaatatttacgacataaatactataagttttcagttttatacacttaaataccataagttacatttctgttacttccgtcattacttttctgttaaatcatatcaaacataggatattttcggcataaataactgatgttttagatttcatgcacttatatatcccatgttttttcttttgacaaattaaatatctaaagttacatttatgttacctttatcactaaaatcttattaaaatatactaagatgacacgtgtcaatatattagttgtttactcatattttcaataaaaaataattcttaaataattaaaaaattaaaaaataactaaataatgacctctctcaccattcaccatgatgttgatcacatcaccacattctcattccccataaatttacattaaaaagattgctcaaacaaaatggatacatgtgactagggtgggcatcatccaatctaattcaattaaaccgaactgatttaatccaatccaattacaaaaaattggatatccaattacaattagatcggattggatgctaaaagttggattctaattggattggatcagttattgaatgtcaatctcaaaatctaattaaaaaccgtttcaatccaattacattcatatatattaaaaaattattta

SEQ ID NO: 95760 - DNA, 503 bp, Cannabis sativa
cactaattaataacatttcatccagtttttatttttaagcgtttatatattacaaccatgcataatttggaactcgaacctaggatctccaacacacacacacactcttctatagccacttgatctagcctcaagtgaagctttgcaattgattagtaatattctataaaagctattacattaaataataagcattgataggtacctaagggtgaatatgggggcgggttgaccgagtttcgagtttatactactattagtacaattaagtatcgagttccatataacttgagaaaatatttttttagggattatcactaactaatcatgagacaccacctatagaagggatgaaattagatggtatacctcttttttttcaattgaatttgaaataaagcgttaattgaaaaataagtatatttcaacttacccctataaaacgtgttgggcaccagtagcacttaataccaatcctctttgagtaaatggcaaaatggtaa

SEQ ID NO: 95761 - DNA, 653 bp, Cannabis sativa
aagctttacttgccaagatagcttacagccttgcaaaaaatgaagagagaccttgggtcacctgtttgttgtgaaagtattgcaagcatgaaaactttgaaaaagtgcaacaaaagagtagtgattcttatcagtggaagtgtatcttggaggtgagagaaacaatagcaaaatgatcgatctctgtcgctgtagtggtgaattcatggttggaccttcaagagtttatggatacaatggatgaacttaggagtaagcgtttcacggttcaaacaatagctgatgtgtccataggcaacaattggaatgaagaaatggtagttcaaatttttggagaagaagtgggaaatcgtatcctaaaaattccaagaattgcccatccttttaaggatcaaatcttttgaaaaaacaagaaaaatggtcagttctcagttaaagatgcttattgtgtagatcaacttggaggtttgctcctacaagagacatttggaagttgatttgggatgcaagaatccaccccataatctcaattttcctttagagaattctcacagaagacaaattgccttttattttagacaaggagtgttatttgtgtggtgagttggaagagtgtggtcttcatctttttagagattgtaactttttgaaag

SEQ ID NO: 95762 - DNA, 635 bp, Cannabis sativa
  modified_base (586)..(599): a, c, t, g, unknown or other
cactctttccctacacgacgctcttccgatctttatttagggcacaaaacccaacagttactagttccggaaaagtcatcagagtttattgccagtgccgaaaaagtcgatggagacgctgtcagtgccaaaaaagtcgcaggagttgctgctgaagtcagaaaagttaccgaaatcggtattgtcaccataaaaattaacaaaaaaattgtctgagttatcaccatcaccggagttcgatgccggagtcatcaccagagttagacattagaatctgactaataaaaaccagttacgtttatctgctagtaaaaaatatgaacaatgaaactaatttcttaaaataataaaaagaacataacatttaaacatagaagggctcgtttggtacgccgtattgtaatgtattgtattgtactgtgttggattgtattgtattgtattaatattatttaatacattacaatgtttggtattgatttgtattaattgattgtgttaagttataatatatttttaatacactcaatcccaacaccaactacggggtcctagtgttggaacttattgttggaaattattttannnnnnnnnnnnnntactaacaagtatgttgattaacaacctaatatgaa

SEQ ID NO: 95763 - DNA, 736 bp, Cannabis sativa
tcatacaaaatgtaaatccaatctctctctctctctctctctctctccttcaccttcgtccctagaagaaccaaagaaaaaccaaggttagacttccattttctagccatttttagcaaggattaatgagaaccttaagccaagatcaaaggtaagccctatatactttattccttgttgttttttaagttttaagcttggttctcttttgtaattttttggaattcgggggtttagttttatttaaggttgaattgtgttagagactattttaaagcttgattttagttgtttatagcttgtttttggaagtaatagcagctgtagcagatttgaggaactttggattttgagaactcaagttttgctcatccatggtgaattttattgcatgttgttttagatgcttttgagttatgtgttatgtttagattaccccaaattgctattttgaaatttttggtagcttttggttaggtgggagctagttttgggggcttaaaagttagaaatttgtgagccctttatgcgtaggaaaaagctttcgggatgggagagcttccgggatggaagagcttccatgatgggagagctttcaagatgggagagcttccgcgatgggagagcttccatgatcagagaagcttccatgattggaggaggttccatgatcagaggagcttccatgatcgaggagcttacatgattggaggagcttccatgatcggaggagctt

SEQ ID NO: 95764 - DNA, 523 bp, Cannabis sativa
tttctattgtaaggtacatattttttgttatatgatatataggttgtattgtattgtatatcattttaatttagagcatgcatgtttagtttttattttattatatacaaatatggtatataatctggcacgtatgctagaattattttatagttgttaatatgatatatgtaatttttttttaaataatattatattatattattttattttttattgcaggtatatatgttttgttgtatagtgtatttttttgttgtgtatagtatatcatttacttaagatgatatttaatttcgatttattatatataatgcttatgtataaattttttagtatgcgatacatattttaatagtggtacataattttgttagcacgatatatttatattttttaagtattaacggagtagttttagttgttggaaatattttaccagggtctagatttactaacaagtatgtttcattaacatccttatatgaatttctaaaacaataaaataaacaagatcggaaga

SEQ ID NO: 95765 - DNA, 781 bp, Cannabis sativa
actacaaatgacaataatacaataaatagtagaaacaaataaagatagtccctaaacagaaaatggtcaaataaaaatcatgatgcgagaaatgtatagtaggtaacatggattgtaaagcctctaaaaatatctaacacgaataattaaaatgatgattatttcaaacctttgatcaatctactggctaggttcatacttgcctttttggagctagtatcggtgaattacagctgagattgtataagcttggccttcaatagtcacactctccctacattgcaagttttatagacaaagcaacagatcagatacaataaaacttgaaaaataacctagaagagatatcatgtttatatgttcccaaactgacaatttaagttggacctactaatccccattaatgaatcaaacatgaaaaacaacctagaagtgttaacatatttattgctaacttatttttttttcttactggatcagaatttttttcgtagggaaaatcaaagtttattcatacaaggccaccaatttaaacaagttaaacaatcaataaattactcaaacataaaaccactataacagatgcaactcttttaacaagagaaattcaatcaattaaatcacaaatacataatcagcccagctgatttcaagttacgctcagctctattgagccttcacacaagcccaaagaaaactgaaggagcaaaagaaaccatgattgaatcgaaattaatcttttttttttttaaaaaaaaaaaaaaactgagatatacttaca

SEQ ID NO: 95766 - DNA, 652 bp, Cannabis sativa
taactcatactatctgatagtctagcatatatctgttggcatctcggtgcaactctatgtacacctcactgatgccctgatatgcttattttatggatataaattttcctattctgacggcaactaacatgtacactaaacacgtatacatatatgcaaccattatactaatattacctcatttctcaatttaggtgtaccggccaacttgagtggaacaactgctcgacgaattacaggccctaaatcacattattcgtaaaattggtgagtgacacgctaaatcactttccgggaacttaaacttgaaactaaaagtttccctattgctatcgataaaaaacatggcaataccctaaaaatcaaggaatcaatcaaccaaagctctgaaaataacacgaatcgacaacacaaaaaattaaaaaaaaattagtttctaatccagttaaccggttttatagagcctgtgaaatcggttaactagtttgcgctaggtaacccgaaataattcgaaagcttgaccaattcgtatccaaaccaaaccaaaccttctagacctgcttaatatatcccaaagaacatatttcaagcagcaaaacaacctaacatgctcataatcaaaaattgtcattgaagaccaaagtttgagttc

SEQ ID NO: 95767 - DNA, 639 bp, Cannabis sativa
tattttaatttttattataatattaataatatattttgaattatctgtcacttaatttataatatagtttggcccccgttaaatttcgactctggctccgcccctagtggacaccattctctatgaattcaataaaattgttcttcatctaaacaatataggggtgaatgtagacgaatagcatcaagcaattatattgctaagatcattgtaaaaggcatatgaatactttgcggacaccattctctatggtaagaaaacattgacaatggtcaaggtaaaagctatattgaactcgaaggaaattcaaaagaactttgttgattcccacgattcaagtggagagtctatccgtgaaaggaagatagagaagaaaagtttcaagaaaactaaaggaggaaacataccaagatccaaatcaagaaccctactgataagaaatgcttttattgcaaaaaggatggacattttagctatgagtgttattttttaaagaacaaataattaattatttaaaaatttattatataagaagagatctctaatttgtgtaaaaagaaatttaatttttgtaaaaaataaataaagtattattgtaaatattataattaaatagcttaactattaaaataattatag

SEQ ID NO: 95768 - DNA, 597 bp, Cannabis sativa
ggtatgatactgattagacccacaaatttcaaattgttatcgatatagtttgtttaccatatttaaatgatgaattggattatatgaatgttgaaatcagttgaagatggaaaggttaatgctttgttggaactaagattttactgaagagaaatattaagggagaacagacaaaagaaaatatggagggaaacattttcctgaaattccatgacttattcttgtttttaatatatatgctatataaaatttccttttatatttatttctgaaactttcaaaattttataaaaatatataaatttgactctttaaaaaagcaaaagaaaaaaaaactattcctttcctttattatttgtttatgatccaaataagagaaagaaaaatctccttcaaatctaagtttgaaacagagggaaaagtctctatatggaataaggacttgaaactttattgttgttttttccccgcagagtacatattcctactatttaatgttctactctgtttatgtttagtatttattattcagtgaatggcaacaaggatttgtttcatattggtcagcgcgctaaaattgccttacaagtgtttgat

SEQ ID NO: 95769 - DNA, 598 bp, Cannabis sativa
atatgtagtgaactaaaatacgatcatcacagttagctaagatgttttgagatgtgtttcgaattgactccttagatattttatagtactaattaaactctacttttattgtccattacttttcctcccggcatcgaagaaatatccgtttaaatccttaagcgtgtttttattagaaatcagacatgaattaataatcatatataaattcattttacaccattttacgttaccataatttatgctctgttgttttgaagtaatggatttgaccgggtcaatacgcggtcttttatttatttatttgtttacaaaagaaattatatgtatcttaactagataggtaaattatcaataattataagtacacgtaattttaatatacaataatcaaaatgatatgttgaatttggatttggattcaacatattcctttttctattttatttaatttttaaatgtcgacagggttggggtgcccaatttttgtttgatgtatatagatatgtgttactgctgtagataatatattataaatgtaaatgtatgataagaattagaatatgatccgttgtcttatacaaaagttctttcttcc

SEQ ID NO: 95770 - DNA, 784 bp, Cannabis sativa
cttgtttataaagtaaaagttaggtttccatgcaatattttggtgttagcttctgtatgagtttgagatgttgggatttgaattccaaagctgtttttgagataattatactgttctatgctgattttgttggttgttagtgagttgagttggttcaagtttggagcttttaagctcaaatgtgacgctttaatggtgatttttaatttacaagcttgatgttggatttttcaattagtatatgttgtgtatggccaagtaggtgatctggagcatttggtacgatttggggtaaaattttaggagaaatgagatttcttgtgtttttacagtaaaaaacgaaagattgtttctacagaaacgatctaccatttttagcattataggaccaaaaaaacagcctgtcgtttgtagcaaacggcctaccgtttttatggtattttctcaggaatctcattgtttagtgttttcttgatatttagtgcattgccatgctatctatcgatatggaaacttttaattttgagtttaagtccctgaaaagtgatttagtgtatcacttatcaattttacgtatgttgtgacttaggggcctgtagattattaagcagcagtttccactaaggttgaccagcacaattgaattcagaatcaagataagattagtataataattgcatcaatgaatacatatttagcgtgcatgtcagttgccattagaataacgtatcagggtatgggtgaggtgtacataaagttacaccgagataccaatagatatatg

SEQ ID NO: 95771 - DNA, 614 bp, Cannabis sativa
  modified_base (27)..(37): a, c, t, g, unknown or other
gttaaaccaagaaatgccgttagatannnnnnnnnnntatataaagatatatatatattactcttgagcaaataattaaacacacaccttatcttattttttattatttttgagatctatctcccctattcaccttcttcttcctttttctttccctaagtctgcaaaattacccaaataaaagctaacctctccttttgtagtaggtgaaaaaaaagagtatgtgaaggaggaagaagaagaataagatttgggaaagataagagtgtgattgtgtgtgtgtgaaagatagctggagagtttgctctttgatgagcttcttgtaaaaatcttttagaaactcctactaagttcatatttttcagtctttttggtctcaaagtgttggctccatctctaccgtacttccaagtccacgctctttctctaacttgcccttgttactagtttattttgttactattttattattattttaatattattttactgttgtttcttttatttttttatcatattttttcaaatattattgtacttgtgtatttttaatagtaataagaaaataataaaatttgtatgtaagttattttttttagtatcctatgctccaa

SEQ ID NO: 95772 - DNA, 4926 bp, Cannabis sativa
  modified_base (42)..(60): a, c, t, g, unknown or other
ttgttttagaattcatattatgatgttaatgaaacatacttnnnnnnnnnnnnnnnnnnnggtaaaatatttccaacacctccgcccctacaacacccacaaacttgagtttcgttcatctccttgcacctttcttggctacagcagtaaacataaaggatacttgtgtcttcatcctacttctgggcgtctttttgtcactcgtcatgtaatttttaatgaatcgtgttttccttttgcaactccttcggctccttcactcccctctcataaacctcattcggttatcacttcacttcctctctctattctcacatccacacatgtccccaatatacatttccatcaaccatctccacctgattctcctatccaaccgcagccccaaaatatcccatcaacccctgtttctcaacatgtctctgcccatcctgaaccgctccaactcactccttcaccatctcatttttcgcctcctagtgttattcttcctactcctatgtcccatacttcttcaacttcatcatctacatcctctcctcccaccattcccttgatggtagatttacatggtccatgtgaacttcctcttgcccataataatgtgcatcctatgattactcgtgctaaatcgggcattcataagccccgtttgttttttagtgttgcagcaagtattccggtggaaccatctaattttcgggaggctagcaaagatcccaaatggttggcggcaatggacaccgaagttgtggccttaaagtctcaaggaacttggattctagttccccctccccacggtttcaaggtcattggctgcaagtgggtgtatcgcattaaacttaatgcggatgggtccgtggaacgttataaggctcgcttagtggccaaaggtttccatcaaactcaaggtccatgaaacatttagtccggttgttaaaccgaattccattcggttggttctttccttggcggtttcattgaattgggtggttgaacaaattgatatccaaaatgctttcattcatggcgatctcaccgagactgtgtacatgactcaacccgaaggttttgttgatcccgaccatcctcatcatgtttgcaagctcactaagtccctttatggtttgaaacaatctccacgggcatggtttttcaagcttagtacagcaatccttgattggggttttgttgcctcccaagccgatgcatcactcttcatctacagatctggttttgatgtcattatcctattgatatacgtggatgatattatagtggaagggtcatcttcttcaacaattaatgcactccttgcattcctccacacacggtttgctgtcaaagaccttggacccctacatttttttctcggtattcaagtccatcgttctccggctagtattcacttgtctcaaaccaaatatatccgagatcttcttaccaaaaccggtttccttgataccaagcatgtccacacgccgatggctcttacacctttgtccatgtatgacggtgaaccccttcatgatcctacagcctatcgcagccttgtaggtgcattgcaatattgcaccttaacttggtcggatgtctcctttacggtaaacaaattatgccaatttcttcattcacccaccactactcactatcaagctgccaaacgtgttcttcgatatctcaatggcacggctcaccttggaattcttctccaacccgacccttcacctgagcttcattactttacggatgctgattgggcttcctgtcccgatgatcgccgcagcactagtgcatactacgtctacttcgatttcaatctcatctcttggtcctcgactaaacagaaggtagtatctcgatcgagtaccgaatcggagtatcgcgctcttgccaatagagcctccgaagtttcatggcttcaatcacttctcaaagaactcagctttccgctgcccgtccctcctactcttcattgtgacaacattagtactctccatcttgcttccaatccggttctccatgctcggactaagcatgttgaaattgactaccactttgttcgtgaatgagtcaagaatggtcttctacagctgcgttcactccctccgaagaccaagttgctgattgtttaactaagcctctcactgcctctcggtttcaggagctttgaaccaaactcactgtgcttcccagccccgtgagtttgaggggggatgttaaacaataaaatatttcctatggtatttccttgtatcttttcttactttatttgtgtaggtgacatgtgtcctttaatgggtctttactttactatatatttgcttgtactgtgcactattttcttaagaaatagcaatacatttttcattccttctgacacatgatcatatttctttcgatacatttctgaacatcgtacgaatgcttaactaataatttaaactttgcttgaaaagtatactcaataacagtatgaaaataatgttaaattagttgactcatctgaccttacacaaaccaagactgagaatattctacactctcaaatataaattaaattacaacacaaaatataaattagaatattaaaagcctacactgtttatcttccacatcacatatatataatgtaaatataaaaatctgcttattatgaaattatgtaaaagtataattcaaatataatatcatgagactatataaaagtataatcgcaatatgacttataattttaatttaatcgtaatactttttaatatttttaaaaataagaaattgaaaagtgaattcttatagaaatatatatcttaaactctttctctattttttgtttttatttttttaataaaaataataaaaaaatattttcactataagaaaagcaattttgtttgccttggcaaaagttaattaaacttgtcggtaaagttttgttggtgagttaatctaccggcaaaagctgacgacaataaatagttggaaaagtgatttttttttggcgcatataattattttgctagtaaaaattacttttgttgacgtgacaagtcgatggcgtaaatgtggttgctggcattgacgcgacggttgagcctcttcgacaaagttttcccaacgagctaggtccctggcaaaatgtttccaaccaatttcttaactcacgggaaagttttaccggtgcatgtaattttgctggtaaaactttttttatatatttttcaaaaagataatttgtttgatattttaaaatataaatataattaaaattaaaatttcataactaataatacaataacatgatctcactgtatattataattatactaaattcaagtaagcattataaaactaattaaaaagtcgttgtcatagtttatagaaaatagtaatatttcaaaatagtaaaataaaagtcacatgaatcaacaacatcgtcgtcatcgtcgtcgttctggctaggaggggcggcctatggtgaagatcataatgccaggtggacgtattggtagaatcagggacatttcggaggtgttgaagccaagaataatgtcggacaaatacctaaactactcttggaatgaattcaggtactaattcagagtttgcatcatgttttgctgataattattacgtgcttcatgctcttccatgcttctcttcaatgcgtcatatttctcggggttgatagtaggttgcccaaagaggcctgccttgtgagtttcccttttggcccctgccctaagtctaggcaaagggacaatgcctcttaggtggcgtgactgctcaccaagcacctgtatcataacaggcaagtctgcgggaaactgggtgagatatacatcgtattgaaaggggacatccaggttgagtttcacgtctctcaactatttgggcctacaaaaaatattaataaactgttaaaattgaatataaattaaatttagaacatacgattaaaaatataaaattatttacatacagttgttgcgtgtatttattttgagaagtgttgttcttgtggtgaaacttcttaaaagtacccacggtactggaaagtttctcctctcgggattagtttattttttaaaaaaaaaatagtaatatattattaagatcttatcaatttttgggcaataatatttaaaataatatactttgttgatgatgtgcccgattatggtcttagaccccatccacattaaatctttatcttgttttatttttttgcgttctgtttggctcttccttgttatttaaaataattttatttcaactaaatacttaaaaattattagttaatgaaaattcaattttagaatttttaatccgtacctgttgttttgggtccttccagtaggcgatgacctatgtccacgcctcctatgtcaccccctctggacgtctcctatttgcctccgcctatacttgtttgataatattatttttccatatttttttcgagttcgatctccagttgcgtagcctttttaattttgctaataaaccgtagtctacaaatttaggattgtcaagtggaaactcaaatttaatttgcaaaaaagataaacactaaagtcatatatattttatttgtacaatagttttgtttgaaatattataatagaaattgaatgttactgttagtctatccaagatagtctgaaggtctgctttgtcaatgctctccttaatgaacctattcatgggaatggtattgcaaataaaaaatttaaccatgttgttaaacttgttcccataattttttatggagcccatgtacatgcacgcatggctggactatgtcatgcatgtaacatgattcgctatgaaatcttgcctttctcttattttttttttttattttaagccactaaggctagcttagtggtgagggggggataggaaaaagggagaggtcatggg

SEQ ID NO: 95773 - DNA, 602 bp, Cannabis sativa
  modified_base (420)..(429): a, c, t, g, unknown or other
  modified_base (552)..(556): a, c, t, g, unknown or other
cgcataacatcctcgactgggcatacaacaacaacaccaccttcgcttcagtctctcaaatggcgctcgactagagtgtgctggacgactatgttgaatgatctctcaattctggatagttattgttttcttgttttatttctttagtttgcggttttttcttttttcttatattgtgactctggttatactggtacttatttatgttgctgggtgttcgtttgacacctctttcccataaaaaaaaattttttaaaaaaatatcatatttattgtaattaaatttttatgctatatatatcaacatttatttctttttcatatagttttataaatagctcttataaaattggtggacccatttttcatccataagcaatgctttctctcaaatatttatagggattatttcacaaatannnnnnnnnnacaaaaaaaattacaaaaatacgattttacaaaattttaaatatttttacaatttttttaattttatcttcagaaaatacggtctttttatgttgtactcatgttaatttgttgttgattttnnnnnatctgtatgttattttttgttgttttgatgttatttttatgtaatt

SEQ ID NO: 95774 - DNA, 553 bp, Cannabis sativa
ttttctctgatttggacaaccaaaaggcgaactctctcatcaccatttcttacgcaagcatcagcatcttttaagaaagcactcatacattgaagcttgatttgtgcattcccaacttgcgcttcaactccatgcaagaattgagcttcagaaatcaccaagtctccaagcctttcaatcacaaatgaaacaatagcatctgccatttgatgatttttctcagtaactaaattagattgaattgaattgtatggtatgatatgatctaagaacataacagatcactcatttaagcatttctatcccaagtggtgttgttggtattcaataatgggtgctgattttgttcttttctgtgattttttttcttatccttacagtgatttagaggtggtcctattcgtatatgtgtggagtagctaaaaggcattaagcattattggtaggcccaccataataagtcacttccaaggagtaacccatctttaattggttgacttgactctccttattactctcttaagtcacatttctaactgtggctgtggctcat

SEQ ID NO: 95775 - DNA, 597 bp, Cannabis sativa
caacaatgaagatacaagtgctttgcaaaataaacgaagtcatttggagcccaaatgaaaagttgggcgcccatgctggcaactcccctctcactaggcaccaaggttgacatgttctaaatgaacacatagttccgtcgatccgattacgattatgtctcgaacattaatcttgttttgctcccaaaacaagatatgatacttgaaattagaataaaatattatccaagtggtggttcaacccccgggcaccaccaggcatcacaatgggcgcccaggttgacattcaacctggagctcagtgtttcttcaatcaaacgatagttttgcttcgggcatcgatcttatttttcccctaaaataagatttagatgcatcggcagaccaatatctaatgtacatgtgccatgtgcaagtccaccgacaccatactagtgatcacccggacatcactcgtgcgtattgaataaaattgcaaagagaactttaccggtgtcaaagaatgaactaaggatagctattatattatccaagtatctcaaaatattcctaaagccaaataaacaagatttgggagcccaagttgacattctatgt

SEQ ID NO: 95776 - DNA, 611 bp, Cannabis sativa
  modified_base (352)..(352): a, c, t, g, unknown or other
tagttgcaataggggtttctatgcagaatttcgtaaaaatgcaaaaaaaaaaaaactgttttgaggtgtaaaaatgaaaaagccccttatattttttattatataaataaatagaaataattttttttgaatgttttattagatagaaacatccgctaatacaatgggcagaagagcaaggggaacatcgctcttagtaaaaaaacgacctgaccaataacaaacatcacgtgccatacagtgtgggactctgttagcagaccgtttaacatgaccaatagaaacattacttaaagaagataaaataaattgacaatcttgaacaaataaacaaaaaatagaaggcataganatcgaactaagaatagcttgaacaactaaaatgcaatccgtctctaaaatgacatttgacttgttattcttcttcatccaactaagtgcatctttgacacttagaatttctgcaattttgggtcagcaactgacagaataaatagttgaaaacgcttcaagtattcgaccatcacagccgcgtgctacaaaaccagtaccgatctcatttgtgtcttcaaaaaccgccccatccacattaatttttatctgttcagcag

SEQ ID NO: 95777 - DNA, 567 bp, Cannabis sativa
ttttccatagagaagttaatgtgtatgttggagaacccacatgccacttccattctcatgccgtgatttgctctataaactcctctttacaagttactcaatatgtacgtatgaacatagaaatgtattcaattaatgatatgtgctcacataaattttatatacacatagttacttagtctctttaataagtaggacatatctaaaataaaaatatgttgcatttacttgttatataagtatatatgtgtcgaatttatatgtgcacatatcattactctattgcataatgttaaacaagataaaagtaatgttaaatactcatttgaattgcatacttattacaacttttttttcgtgcgagtaaggttaaaataccctaaaaaaattcgtgttgatttaaaaagtcagtcattattatttcagaaagtaactaaagtgacataccaaatatatatactaagtagatacaaataaagaaggggcattatagtattatgcatgttgattaaagtttcatgtaatataaactcaatttggtgtatttgtacccttaattattaataa

SEQ ID NO: 95778 - DNA, 510 bp, Cannabis sativa
  modified_base (167)..(204): a, c, t, g, unknown or other
aaaaaaaaaaaacaaaataaatatcctaaattccaaaattatttttttaaaaacaataacatatatttatactaaaaatgatatatggtaaatttaataacgaacttcattttcatcattccacctttactcttaataccaaacaacatataataataataataatnnnnnnnnnnnnnnnnnnnnnnnnnnnnnnnnnnnnnntaataataataataataatcctctatgttcttcctataaattttccatccatcttgctctccttcattcttaccaaacatagcctaaagcatcttcaacaacttgtagtagattgaaggagattcttgagtggtatagtgaagcttcaggctaattgctcattttgtaagtcactttgtttgttttgtaataaaaatgtttgtaagattgtcttcgcatgacctctattatcggcgttgttaaggtgggttgtcatacttttgtttggctttaatggcataaaaataacatggtgtttggttttta

SEQ ID NO: 95779 - DNA, 2859 bp, Cannabis sativa
tatttttatttaatttttaaattactcacaactgtttataataatgatccaacaactaaataaatctaatcacggtgattacatatttaatataaccatcaaaatctcttccctaacatgtttcaatagttttcaatgttgaattcattttgtaacccaaaaagatatttagcattataaagaatacttaattaagagttaattagacaacatgtctagtcttgtcaagcttatatctatacatatttattttaagagacaattataattaattatttgcacctaatcttatctcctttcataatttaattaaatagatatttttggtcaagtgagaaataacaagctcaaaaatttgcaatttatgaatgatctcatgagatatctgtggaaagtaattaataataatgagtgaatatatttataaataatgattattgttacacaatacatacactatttacacacaatttttaattaaatctctaatcatgtaactaattatataaataatccaccaaataataaaaatgttagtgcaatactaacttactaaatttttctttagatctctaaaacaaaagtagattaatagatcaacaaaagtatatacacaactctgatgagacaatgtgtatttataaagttaaaaagatgacgatgtagcaacaaagccctagctgaactaagtctcttcgttagaggttcaattaatttggaaaaactcacattttagcttcaattagactttacacatatatttaaggagtaagttgaagaatatctcttttttcaattagttaaccaaaaatagctacacattaaaattaattgatttatacctacttttacgagaaatgtacctaaaatacccttacataacttaattagcctcaataaattgcattcaacattcagcatagtaaaaataaaatgagataataaaaaataggtatagagtgtatgtaattcttgtatatttaacccattaactagagatcacaaactatataactatttattaatccatatttttataaaacatttagaacattaattaatataaattcaaataaaagtctaacatatatagaattatacgttttattattattatagcttgagtttaatttaatatacaattagttggatttttctccacgaaaattaacttaccaaacaaccagaatatatataaaaaaaaaaatgtaattttaaaagagaaagattgtccaaatatggagtggctaaatcaaaatattgttcaaaaatagtatagaaaaaataatatataaataactaaaactaacatatatatgttgtatatgggatcaagaaccaacctgagtaaaaaatatatattaattcgttctttatacaagtataactagatataattatcattttggttaaattaatctaaaatataatgtcatattttttaatattaaaatcatatattttctttacaatattacttttcatttcttactttgtacttaaaaaaaaaaaatcccttggtgttgatccaaatccccccaacccttcaatcttaaacttgtaccattattacaccatgcaaaaataaatggtagtaaattgtatcgaagtgattatcaaaataatttttaccgatacatgtaaattattgacaaacaaaacttttgctaagaaatattcattcaaaaacactaacaaaagagttatttattggcgtgacatgctgaaaatatcgacaaatatatttttccaccttgtcataaaatggataaaatatggtgaaaaaataatctttgctagcaaattcatgctaaaatggtttttctatatattgttacattatttaaagttgccctataggcctttcattaccttgtagtagtttttatagcatttttgtaaataattctctctaataggctttagctataaatggggtttgagttagaaatgagaaatgttaaaaagacattagtataatactagtgctttagtacttttattattgatattatattgttattaatgtaattaagtatcgaatttcatataatttaaaattatccttgtaagacaatacctataaattgtgtgctaagcactgatatctaataaaaatacttgaaataataatagatatataataagtgtgtgattcaaattttagttcaccgactatatagctaataattaattagaaaaaaaaaagataatttagcaaaaaaatgcaatatctaaattctaagttaataaattaaatgtatttaagtttaaattaataaattatagaagtggtattaaattaataatttattatatatacatgaaagtctttgtctaacagatcatttaaattaatcaaatattacatcattatttatatttcataatatccaagattttttttttctacatttttgtcttgatgatgatataacttatatatttatatgttaagttggtctgtctcataaaaagtatgcatctaccaatttttctgtatatattatatttaattgatcattgtttttaacttaaacagtcttgtaaatcatgtattaagatttttatcgttttaaatatttctttttaaatcataaaatcttaatacatgatttgtgtttcattatgtacgtatatatatattttctacatgcatgatgacttaataatattaaattttatttataaatattttactataaatttgttgactaattgattaaatttatgtatatctttcttccataaaaactggttttaagttgcaattattaattacacattactaatttgaatacacaacttatagattattcgggtaattataatatttgtatataaacacatatttattac

SEQ ID NO: 95780 - DNA, 637 bp, Cannabis sativa
attatcttttgccacattaaaaaaaatcaataattttttttttagaatcagaagcaaattacttaaagattatgatatatctatattagttttgtaaaaaaaaaaattattcgaaagttacgttgatttttctttaattttttatgagctgttgtaggttgttggtaacttggtatataattttattgaaatactacatatatttaattattattatatattttaattttatgatatattatttattttaaataatatttaattaatttctattttattatatacaatggtagtatataattctattatcatcgtatatatattttaattgtagtatataatttgattagtatagtatatatatttttatatatattaatatatatttctattattattattgttagtatatatatttaagtgaatggtatatgtatttttaatatacggtatattattttttaaataatatttaagttatattttttattatacttttattgacatgatatgttattggtttttttacataaaatgacgaaaaatttatattgctataccgcaattttatcttttttaatgtttataaggtctgctttttcatttttacacttcaaaacatttttttttttcattt

SEQ ID NO: 95781 - DNA, 562 bp, Cannabis sativa
aggacactcatggtagcacttgtgatatgtaatatcctttttagtatatttatgagtatctctaataggatattatttatagttgtcaaaatacacacatcatcgtaaaatattatttgttttatattttctctcatccacgttaaatttgttacattttcttaaaaaaattactccaattgttgacaactctaaaagtgtctactatagtatcacatcacattaaattaataattttttaggtaaaaaataacttttttcttataaaaaaatgacatgtggtcattctctaaattgagcaacacttaatataaaatttgtgataattacttaggattttctataatatatattaaagtgaaataagggagatctaatattaaattttactaatagcgatattacatttgctaaacattatgagggcatttaacatttctctttactttaataaaaattataaaaaatcccttactaattataaaaaaaattgataaaaaaataattaatttttttttcttgttacattggaatggtcattccttcctttttaaaatggaat

SEQ ID NO: 95782 - DNA, 587 bp, Cannabis sativa
aaaaataagtaatcactattaaaaattcttacaaactaatagcacatttattatagagtattaataaaataataaagaaatgtaatagaatgaataaaaaataatcggaactaatttttgtaatacattatttactaaaactgtttagaaattgaatgatagtgatttatcttgtttactttatcaaaaaaagtaatcagaatgcttaaaattgactaaattactcttctgagttttttttttttttttttgaataaaaacgtttgtagattaaaaggatttagacctcgtgatcattacaaaagataacattcaggatagtaaaaacatctaccataccggtaacattattgacaaacgctcatttgaccacattatgggtcgcaaaaattacaatttctagtaataaaagaaaattacagctagtcataaaagtagagagaagtttgcattgtcttgtatagttctcaatcccccaaaaagattcgacaccttttaagttcttgatcacactctcaaaatcactctccaccacaacaaaagaatgatgcattgagaccgccgtctccaaagctaacagacaagcc

SEQ ID NO: 95783 - DNA, 512 bp, Cannabis sativa
gcacacatcttccccacttcagcatctccatcttcattgatttctcaaccgtcttcatcaagaacagttaggttgttagtctgagatagtagatcttccatggttgtcacgggcttgttcagcaatccttccggcaggctcttctcgggagagagcatattcatcaagagtcgggttctatttctatattaattttttttaattggtttcactttatctttttaattgtgaataactatatgcagtggcggagccaggccaacattttagtgggggcaaaaaaaaaattttgaagcattaatgacaaatataatttttattaaaaaaacacaaattctatgagaataaaagtaaatatatgtgagaacaaaagtgaaaaatataaattttatggggataaatataaaaatatgtaataacaaagatgaaaaaaaattatttttatgggtcaaaatataaaataccccaaaaaaatatatgcaaaatttatatttataacaaattgagggggg

SEQ ID NO: 95784 - DNA, 552 bp, Cannabis sativa
tacgagtctcgagatgcgtccaagcaaggaccaaccccggggtgatccacaaacaagggatggcaaaaggtgaggatgtgaatgtgaagttaagtatggggaccaagtcgcagatgcatgtgtgagtgtgtgtgtgtgtgtgtgtgtgtgtgtgtcgtcgcgtgtgcgtgcgagtgggggctcgcatgtgagtcgtgaatgtgtgaaggtgtgtgtcgaggtgtgtgtgtgtatgtgtgtgcgagagggggctcgcatgcgagtcgtgggtgtgtgagtgtgttgcatgagtgtgtgtgtgtgggggggctcgcgtgcgagcccatgtggggtgctcacagcgagctgtgggatgcatgtgtgtgtaagtgtgtgcgtcgtgtgtgtaagggctcgcatgcaagcctatggtgcatgggggctcgcatgcgagcccatatgcatgtgtgtgtgtgttgtgttgtgtcgggtgtcttgtgttgtgtcgagtgtgttttgtgtgtaaggtgaaattcaaacacatgttgaagagaatatcgttggaggaggaat

SEQ ID NO: 95785 - DNA, 556 bp, Cannabis sativa
ttattactattaattgtaatcaacctttctttttttttagttttctttttcttattaactcttgtatttgtataaatacgagttcactctattagaataaataactgagaaattttcattcactttctctttctctcttcttctttcttctcatctattctatattattttatattattttataacacgttattattttattttatgtccattaaatattatttctttatttatttttttacatatataattatttgttaaaaatattattatttcctttaaaaaaattagcattcacttctctttttttctcctccgtttttctctctaaaagttcttaaaaattatttatcaaagaacataaactataaccaaaactaaaagttttgattatttttttaaaagaaaaatagacgttgagattcagaaattctttattggcgaagttaaaaaataatggaattttttttttgtacatgtctctcttctcagatcatatccaaaaaaaaaatggtggatatgagtgtctctaacaaataattataaaaaaaaataa

SEQ ID NO: 95786 - DNA, 517 bp, Cannabis sativa
gaaacacgaaccaatagcactgctctataatactatagtagaacactccaagaacacgaacacggactatatatatacatatactcatgttttactagttaatttactacaagacaaaaaactgtacacatgaatatcacatcaaataatagtctccaaactccaatcttcaattcattaatcaataaataataatatcattgttacattttattaatcactaattatcttcgttaatttacagagagagagagtgatccttcgtggaaagtgcctacatatatttttctcctcaatttgaccaatgaacttaacaatatataataagtaattaatttaattatacatcaatattattgccttgtccaccactactctcttcgattataaatacaccacacaaccctcacaaaaaagttcaagctcacatatcaatatccaaacagacctacctacctatttatataaatcaattaattaatatttctatatatctatattgaagatcatcaagatc

SEQ ID NO: 95787 - DNA, 565 bp, Cannabis sativa
gaagggagaaggttgctaaagtctccccattagagtcaagcaaaactgctccaaaactaggtttctgatgcattgtatttatcgcaacatctgtattgagtttcagccttcctgaaggaggacacatccacttaggtgtagtagaagtggggcgttgattctgttgaatgtccatttgtcctcctttgtttatgttacaatttgcaacttggtattcagccacataattcagagcaaattgtaataaaatctcaggaggtttggattttttccatgaaagtcgttgtttcgttcattccaaatactccaacatatgcaagccacttgttccaattcttatgtagataatatatctgagatatagaagagaagtaacttacaagaagcatgatgattcataatatgtggtatttgaataccagaggaaagccacacttttttagctcttttgcaagcaaagagagcatgaaaggttgtttcctagtgataggagcagagtgggcatcggcttgaatcagcaacatgtcttctatttagagtggctggaactggcaggacatcttgt

SEQ ID NO: 95788 - DNA, 834 bp, Cannabis sativa
aaattagactaaaaaatttttctaaatgccgaaacaagttaagggtgcatcagtacatcccttttaaggaaatccattgtagaatcacctaatattattaatattctagatgccgaaacatgtatttttttttaataaaaaaaaaaagatattattatattattatctaggggcgtgaagtttcaaaattgtccaataattggaaattaaatattagtagagaaagaggaaaatgagcaaaatattaaaaaaaaaaatagaaaaaaaaaatcaatttaccatgtttgatatgaaaagaattgtatgaaaaaaattcagttcaactcaaaatttcatattgaacataaaaattaatatcttttgaacactttaattattttttttatttttaaaatagcaaaataaaaatattttccaatattctataaaactatttttactttttaatttttatactatattaaaaattaaaattttaaaaacaaaaaaaaaaaaatcacttttaaattttttttaaacaatttttttatcaatattttagactctcactccaacttagactttaaactttagaacccgaaccccaacccagaccaaccccaacttaaataaaatcaacaaataaaaataaaaataaccgcacattttattttttatttctaaaattaaaaaataaaaataattataaaacacatttttgtttttcaaaaacaatctttaaaaacaatattttacttttatttttataattaagaaatttaaaaacaaaaatattaccaaaagccacttttatttttccctaattttccacacttttttcttctacattttcct

SEQ ID NO: 95789 - DNA, 518 bp, Cannabis sativa
tgatagaggatcaccttgtcttatgcctcttgatggagtaattgggccaacttcgttgttaccatgaataacactgtattttgtagacttgacacacttcatgatgagctgaatccaattgtcaacgaagcctaacttctgtaacattgcctcaagaaagtcccactcaatgcgatcatatgctttgctcatatccaattttagggccataaaaccatccttgccctttctcttccttttgagataatgcaaaacctcaaaggaaactagaatgttgtcagaaatcaatcttctcgggataaaagcgctttggttctcagatatgatggaatccatataaggcttcatcctattcaccataactttggttataatcttgaacaaaacattacataaagctataggacgaagatcagacatacgctctggatttttcttctttgggataagcactacattcgcatcaccacacccatcagtaaggatcccatttgcaaagaaagaacggacattcttga

SEQ ID NO: 95790 - DNA, 830 bp, Cannabis sativa
  modified_base (798)..(802): a, c, t, g, unknown or other
tatgcatactttcttggtatttatttaaaattatcttttactattcctaccatattaactaataaagataattattgttaatttaggtttgagcaatttcaaaattttgaggcaaatttcagacttttatttagtaatgagaaattaaagtctgcacatatcagtcttacaaacttaatgaagtatggtgtgatttcaaatcttgacagtgatgactataccaagagttatatatgttgcgttaaaatttaccaaaagaaattaaaagttatagatgtattgagttacataaaagaagtagatggtagttatccaaatgcttgaattactcataggattttgctaactattcatgtcactgttgcgcatacagaatagagttttttcaaactgaccttgatcaaccttttctccgttcaatcatgtatattcaaaaggatatgattgcaaaacttgactatgcaaatttaattattacttttaaatttaaaaatgaaagacacataatatttcagtaatatattgaattttataagtatatgtaatgatttattagtttaaaatatatttattttacttagtatatttgaattttattaaaaattacacttttatatatatgatgtaatatatttttttaataaaatatatatacataaaatatattgtcaggccaccctgatgccaacatatcacgtgtctcattttttttttttttgtttgtaacactttttttttgggattttgttaagaatatactaaattaagtaactttttacaaaaataacgttttttttnnnnngaaaacaaaatgacgtgacacgtacaaa

SEQ ID NO: 95791 - DNA, 640 bp, Cannabis sativa
tacaatatataaagcaaaaaaaaacttaatacattaatatatatatatgtataatggttagtttcggttttttcgatcgatttattatctaaaaaaaaccaaccgttcaatgataattttaaccgtgagcagttttttcgattttcggttccgtcggtttcgattccaacagtgttcggcaggtcaatttgaactgtttttttcagttttctggatttcatgctcagccctcctaagagctttacatgttagggtgaagtttcttctcctccacaaacaagtcagttgctccataatcggtgaagcttctccaaacaattctagatttgaaatcaacaaaaccatcagcgatgtagaagtttttgtcgatcaccatgaatgtcactgagaagattttttaaaatctcgatgaatgtcggtgagaagctttgcttcaagatttaatcatggcaacatcgaccaacaaaaagagatctccataaaagccaacgaaagaagatcaactattaaggagatctccttcatacttgcccaaaaaatctggttttatatatatctttatatattaaaagtacattcttggtttaacagaatatactttacaaataaaagaatattctgttaaatttaacgtaggttt

SEQ ID NO: 95792 - DNA, 805 bp, Cannabis sativa
atttttccctctaaattttgatatgtatcaaattatattttttaaacttttcaattataagcagttaaaagtttttttttctgaactattaaaattatttaatttaaggacctatatctaattttgtttaatgttgttaatgtgatgattgtccatatactaaatcttaccctcgaactttaatatctactaaattatagtctctaaactttaacctgtactattaaatagtactttttaaatttttatctacgttacactttctttaataaaattcgataaaagttcatgaacaacaaaacttagcatttttttatttgaatatatatgatagattttcataggagaacatgccaaattggatattgatacatcaaactcaattatagatacacaacacatgttggaacatgcatatcttaggtgtcttatatatgagtttattactttatttctattttctccattagtgtcaatattgtcaactataatacatatgtgttttttttttcttcaagaaaattcaatattgtcaaccttaaattttagtctatggtaaattggtaagtaagtaagttccttgttcaaattttttttgtcaaaattgatgataaaataaataaaagaagtttttttcatgtaaaaaatttactagggcaacaatattgatgatattctctctccaataatcttttttcacttttattagttttgaaataaaaaaatatatatattagaaatgaaattatatgtatagtaataatttatttttttataagatcatatacattatttataagtaatt

SEQ ID NO: 95793 - DNA, 617 bp, Cannabis sativa
attaaataaatactacgtatgtgcaattgagatctatccaaaaaagacattctcttacactatgattatgtttggtaagaaagttttttgagtggaaagagagggatagaaggaaagagttggaaggagagaatataagtcggtagggaggaaaggagggagagaaaagatagaaggatacattttcccttcaaatgtacaaaatccaatcctttcaaaagtggaaggaaaggaaaaatagacaaaataaagtatattaaataaataattatctttcatcctaaaatactcttcataataaataaataatatatatttgaagagaataatatagtaattttaataaataattatctttcatccttctactttcaatatcaaacaacatggagacttgttagttatcctctccttccatcacactctccatcattcttaaactctccctctttcctaatctccttccctttcaccaaacatattgttaatctcaaccactcacactaaaactcactctcttaccccaaacactccattacaccatgtttggtaagaaggaaagaagaatggatatggaaaggggtagaagaaaaaacatggagggatatgtcgaatcc

SEQ ID NO: 95794 - DNA, 1584 bp, Cannabis sativa
cttaacctaaatgttagaaccaaaaaactttgttcatacagacgctcatatcgacaaaattaaatggaaaaaaatccccagcagtactctagttccaaaggtatactcccaaagttcatgcaaaccggtttcacacaaaacaaccctaatattcaaatctaaaccctatgcatgcaaaaaaatgttttttttacaaaatctagatcatatttcttagtcaaagctaaaaataacagtgtttataaaaagaatacttacttgtagacggtttacagaagaattatcggttgcttatggttgtttaaggtcttgtgggccgctcaatggtctggttatgactcgcctcaacagaaaacttgttgtctatgtgagcttcaactattggaaaatctagcaaaaaggttggaaaaagaaatgaggtttctaattcaatgaagtgtgtaagggtgagtgttcttctaggtcgagggtttttctgaggaagctttgtgggttataacatgtagactaaagtgagaaaggaaaaattgaacttctttgccaagttttttatttatatgggtgacaagttttgaaatggatggtccagatcgtatcgatcaaaagctgctccatccaatggctggggactcaaaaagtttgcatttaatgcacctggggagagaaaagggggcattcattacttatgattttgcgatggcaagaccaacgtaccacaaacctaccatcttttcaagtctagccgccattcttttcccacaaggaacgcacttgggcctggcacgttagtcccacggcttcacaaaatggacaccacgtttcaataaaatgacatttgtatcgcatggcatatcaactctttagttgtccaaagtactacagaaggctacttccacatttcaagatatttttagcataccataataataaatcaagcatccaaaaggaagctacaagctcccaccactcaaaagtctcgagagcttagggttaaatgttatctgtattctcagatgcctggtacgtgacaatcacgtaaaggtgccactttggatgatctatgatcaatatatgcttatcgcttgaagatgctgaagattattatattttggaagccaatcaaaggtccctaatgtgagcgtgtacggatagggctcaaggactcttactatccatccgtaattgggaaggatcagagttacttagagcttcaagtattccagaaaggtagtaagtcagtgttatctgggaaggcttttactcgttgatcctagagcttatttgacagtaccctatctagaacctaaagtgattgttatccatcctctaacaccgaatcagatcttgtcccctacgtcagaccatggtagtgcgtgtacgttcctctaaagccccttttttgtctaatggcttgtctaggcatcaaactttcaaggtgaaacctttgagtgacacgtgtccctgtccatacaagatcattcacgacagtcgacaccatacgatggggaagtttcctaccaaccaacggtcagatcatcatgttgtagtgacagcccttatagcatgttgagtacaaaaccctag

SEQ ID NO: 95795 - DNA, 506 bp, Cannabis sativa
ttgacaaaaaatcagttcagagtcttatttgtacaattttagaaaatacatagtccatttttaacaaaacaaaagggtctaattgataacttttacaaaacacataattcaaaatggtaatttcctttaaatttttcttaaaaaaaaaacccgcatgacaagacataaaaaaaaaagtaaaagagaaaaagacgaatattgaaaaaagaaaaatgctagatgaatggtgttagaattatgggttccatttcaaaattaaaatggaagaatccgtgttttttatatatatatatatataacttaatatttttacatttaatcgtgtaaggatattttccaataaataatataacaccctctaacatctaatatatctattaatagaaagattctgtataattcaaatagtttttagggaaatttgaattaatatgcttacattaccttataatttttctcctaaacttatacttaacataatgtgttatatatgacatttttttttg

SEQ ID NO: 95796 - DNA, 730 bp, Cannabis sativa
atatgttgttgtagaacttgttaataatttggcatatcctcatcatttattgtaatgattttcattgtatcttatgcatccaaatccaatcacgtaagcaagatgcaacaaggtgataaatttatgccaagatagctgctgctatcgatgtgttaaattactcaagagtgactaaccaattcatcacaatgtttgatggttacctatcgtacctcataaatgatcggcttgacttgtaaattttcaaaagaaattctatatattattcatcactaattgtatatatttcactcatcaaaccacaaaatgctcattcaaaaagaaaaggacatgtattggtaaatgttaatagttgaaatactacaattaacaatatgtattatttcaagcattatagtctcactctggtcctactacaattaacaattatttcataaaaatacataaatgaaaaaaaaaaataactaaagtatttttccaaatagggatgtaaacaaggcgaggcgggacgggctaggtgtggtgattgctccccactcccatacccactttctaaattcacaccatacccgcttcaatacttgtttaaattaatgcggggataggactgtgattgctctatagggaaagaattctcattaggtacccattacatatatatttttgaaaaagaatgatgtctcaaaaagaatttaaaaaaaaaaaaaaacacaatcataaaaactcatta

SEQ ID NO: 95797 - DNA, 888 bp, Cannabis sativa
aaatgtaattgtactcatttaatttttataaaataatgcagaaaaaggacctcgaggttcaaaatccccaagccaccatgtttggatcaaatctcgaactaagagaacgaaacttgtcattgattacgacaaggaaatttccgaaaagatagtaagtatatattaatcgttgattaagtaagaataatgagttaatatatataaatcatatactaattgcttgaatatgtgtattaggctcagctagaggagcaagttagtcaggaacaagttcaggtctatggccaaaatgacattctgacgtaggcgctcgggacaccagagtatcctagacgtgtcagagctgttgggtatgctagtacttgaaaaatgttatttccttagttataccaaataaattatagctaattttatctattgatttgcatgttccttgccaagacatctaaactgtttggtaggaagaaaatggaagtttatgatgttgtggctcagaaacggaggatgattgaaaaattaaaagctaaaatcaaatcccttaaacagaagaaaaatattgtcgaacaagagcagaacaaggatgaggatgagaaagaacgagaggtggctcatcaggcatatgttccacaacaatatgctcatgaggatgaggatcgaccaaaaaattatgcgtaggagtttgtttccctaaatgagccacctctcatgtacaatttcgatgaatagagggtagctaatcagttagtatatctccgctcagacaatatcagcaacatagtggcctgagcttatttgtacgaacatgagggtccaatcaaacttcacaacaaagactatgatgattcacatgcccgggttctgatttcaaaaatgctgcaagaggatgct

SEQ ID NO: 95798 - DNA, 577 bp, Cannabis sativa
gttgaagctgtatttatagtgctatatgatgaaccatatagcatacctaaatagttctatacataataatactgcacgtacaccaatattccaaaccaactagtcataaatctaattcatgactcaacaactagttaaattgcaagtaatttttttttattttgtacttttttttaaaaaaaaaaaaaaaaaaaagaaatttctattaaaatatggcacaaagatgaaaaaatcaatacaaagatttactttggaaaatctgaagaaaaacccggcaaccaaaccttggattcatctagtaagtctggctaaggaattattcgagacgatggccccaagccctactttaaagttgttagtaataacaagttctctgcgactgaacgaattattaatattgcaattacgtaccttacacaataattgggtgctcaagttatgagtttgaataagcctgatgcaaccgttgttactattatattttcgaaatagtacatgaaacagaatataagtattcttaaggttaattgtgatgttttaattttttcatctaatattattttagtatttttgtcaa

SEQ ID NO: 95799 - DNA, 503 bp, Cannabis sativa
cttatgaggtggaattaatgggcctgatttgttgtcacggtgatggaagatatggaaaatggatgtgctgttttgactaggaacgtataataatgttttccctgagcaaagagtcattgaaaaaaaattgaattaacaataacagcaacaacaaaaacaacaataatgataatacaaccttaatcattgtagaatttaataatcaatagggagttcgtgttaaattagtgaggtatcctacccattatcagattctgcccaaaaagtcaaagcatcaaacaaaactaatgagggaacgatacattttaaggcagctccattattatatttctcaccggccaagactattaatacctcacttttcttttctttctttttctgcttcgcatatagacacagagctaagcaaacaaaacgattaaacagagtcattcatatacgtaccactttagcctttacaacgcattgtttatcatatgctcatattaacaaatttttctagg

SEQ ID NO: 95800 - DNA, 531 bp, Cannabis sativa
tatatacatacacaacaacataatattgataaaatggaaaaattccaaaaacaattataaaaactaaaataaagcaatgtacattactaaaatgaatagaaatcataattatacattaattgacattgagattcaatattttctctactagaatctgtggcaggggttaaaaccactactttttttcaatagcttcgatttacagtgaaataggcaaaaaaaaaactttttgggtatatagatttacatataaaaaaaaatagaagatttaaaaaaagggataaaatggtgtaaaaatggtatagatattgggttttagggttgtggtttgcgagagttttcgtggtggtttctgggctggtggttgctgtgtgtatcgtgttgaagaagacggagtgaggctgttaggctaaaggggttagataaataaccctatgaccttgattatttgaaaataactgatgccatagtgtaaaaatttaacacgtgtcagcattatgataaaattacactatatatatgtatatatat

SEQ ID NO: 95801 - DNA, 543 bp, Cannabis sativa
atgtggtttattggacaatattgccccacgtggatcatatgtaaaaatattgagccatttattataaaaacacgggctactctcattatcaattagttttgaaatggaacttcatgaatattcttaacatgttatcagagtcatatttctagcggactttcgatctacacttatcagataattagccagtcacaaatgagcaaaaatagaactcccacccgcgaacaagaataagcgagcaaatgagactctcagccgcaaataaaaataaattaacaaatggcactactgtgataaggtgactcaagattggtgcgcaaaaaaataaccactatcttgaagtagaatattgaacatgtattattcacatggatcaaatgtaaaaatattgagctatatataaaaatatggactacttcattcattaccaattggtgttaaaagataaaatctcataataacatggtccaataaacagcccaacgtcctaataatacacaatacatttgtaaccaagtggggtctaaagcaaaacaaaacaaa

SEQ ID NO: 95802 - DNA, 2520 bp, Cannabis sativa
  modified_base (2453)..(2463): a, c, t, g, unknown or other
attttttcagttttgttagctctaaaacttttaataatgggaaggtatttttttaacgtgatagggtgttgttgaagacgttatagttttattgtttaaatttctggagcaattttgtcccatgtgacttgcgattagatattgcagctcatagtccccgagacaacccaatcaaaaactcacaaacataaagataaacaatgggcaaaaagaacatatgataagtaaaatattttactatgcaataaacataattattagataattaggagtatttaattaattgaaatacataaatataattaattatgaattaattcatgttgagatatttggaatttatttaattaagaaattgaagaatcaaaaggcacatatgtcctccatggcatgtgacatatgcgtgtaacttagtatcatctcactatgtgtacatgcatataatttttcaaaagagaattttgattcaataatttttaattattaaatataaagttaaataataaattattttaatatatgattaaaatattatatattatttaataaataaaattcaaaattggaataattcagttagatgattaaaatggattgaattgttttaaatcagttaaaactaataatatttaattattgattaattaaataaaatttatttttgaattaaataaattctctccattaattaattttttaattaattaatttatttatatatatatgtatatatagagaaaatgatataaaaaaaaagatacgatactttttcctaaatccctaaagcacacgcataggcttttctctgaagaaaaactaagttttcaaatttatcagatctcatgtgttgagcatattcaataaatggaaattcttatttcgttgtattacaagcccacactcgtctttgggttgtgagactgtcgaggaagcataagcaaactatttgttgaatgcggaaggaagtacaagggaatattgaaagaaaaaaatagtgatgctaatcgggaactggaaagtctaatgacaatgttgaaactctcttcaatgggaaaccagatgtgacaaactagtaatcccgaaagttcgagacatgccttatgctgctggttgggcaaactaccccagagcgttgcttcagctagtaaaacccaatcttggacttattcttctgcatgagttgggatctaatgctatagaaatacaatacctacaccggagtggggacctcaatctttcggtctacgcagagcatgtgccatctgtcaagaagtttgtatacttgcagaatgaactggatgggtgcaattcccacttcagcgcaaatattggagaagtagcactgagaggcaattgtgctctgcacagaatatgtgctcagctctagacatcgaatccatgtgtgtacacggttggtgactccccaagcacgaaggcctattccaacaaaggcctgatatatgatggacccgttccatggagtaatgttttagcaccttgtagttaagaaacttgttagagatctgatccatctcccattaagaggagttatatactattttaggagcagccatttaagattgctcctcattcggttccactccttgagtcgcatcctcaatcaactccactccctcgaggtcaaagatgtctgacatgatggttaatttgagagaaattaaaagaaaaccaagcagttaaatacccacgctaaagaaaatagtcagggtacgggagaatcgtcccctagaacttcttggagaggtcgccgctagacccgacatttggaagcaaaatccccatagaactttgctcccaaataatcagatcgggaacacaagagtaaacagaaagttcctagtgcttcatcaggaaccttaagagttccaaacaaagggtttcaaattcaaacatgttcaacaacatttagaattcgattcacagaaaatggataatcaatagagtttacaaatctttatttaagttatagacattatacatgccaaattatacacacaatctcaagaaagttctagacggtccaaaaacctaaattccacttaccatattctataacccacatgcaaaataccacctaaatcatcaacaagaaattcgtatgttctccctagaatttgaacaagcattttgaggaaagaaatcataatttaaaaagagtgaagtacttacttgttgaaggcgaaggatgtgggggtggcaagactcttggtggtgacacagtaacataaacctcatcgagatggcgaagtcaggcctgaagctcacaagcccaagagattagtctaatatctgctaaaatgaacttcacttattaactaaaataaaataaaaattgtaaagcggtaactaatcagtatgattggtataataaacaatctaatattttgtttttgaaaatagtaaaaatatatatattgttataaaataatatnnnnnnnnnnnaagtagatgagaagaaagaagaaaaagatgaagagagaaagagaaagatcggaagag

SEQ ID NO: 95803 - DNA, 1075 bp, Cannabis sativa
cacgtgcacacccctaaacctactccttaagttttgcttcaaatggtaagcacatatcccatggtatattccagaaaagacttctgcagtcgcattctttatgctgatgtgcctatcaaatattatgcacatctcttttcgttcacctattgcttctttaagccttttgaaaaaccattttcatgctttatcattctcagagtctccaattccaaaggcaagaggaaagatttggttattttcatctttagcgcaagctgcagataatgttcctacatatattgtttttaaaaatgttccatcaaccactacaacaggtctgcaatgtttccatccatccaacaagcaaccaaaagcagaaatatataatcgtggacgaaccttgcagaggaacccttaggttttcagggttttaaacctgcaaaaaaaataaaaagcaaccaccaaatatggaacttaaatacctaaaaataattccactattgtatacatatattttgagcttcccatgttcttaaaatccttttttaatagaatgtctataccattaatcaataatgatgatgatgatcatgaatctatgaaaataatgagaaaataaaacttggcttggatatcagtgttggtgtattgttaaactatgaacatgtttcatttagtgtaatgatcaagctgttttaacatggaaggaaagcaactaaagaaaaaaaaattattgaagacctattcattataagatttcaaacttccaatattaaactagcaatagcaatttcatccttaattttattaacaaaaacatgaattgtaccatcaattaaattaaaaaaaataataatcctacttcttttggctttgttgtagtttatacgaattatgtattttatgaaagatgcattgtatatcaatgccaaaaaaaaattatttcaagaatattgtaatcaatcttccagataaataatcataaaagaaaaaaaatgagcaaaatatacaacacttgttgtagaaacaaaacaacatagactcaaaggaaaagatttgagttggaacgaaattttgtacctattgtcatcat

SEQ ID NO: 95804 - DNA, 621 bp, Cannabis sativa
cacgatgataacatgctcacctttagacataggtggtgtgtggacctattttaccagaacttgacatggtagttttttgtagggttttctaatgttattcatatacacataaactccccttttgtaattgtattataatctcactaaaattatatataacaaaaaaatttaaagctatttaaattgttgcttgtatcaatttctttatttttttaatttttgataaatacctatcaaatcatgacatcttgaaaaattatttttgtaagaattgcattaacatcgcacattaattgcataatatcgccaaaaaacacagaaccaaacaaactaaacaatcacgattattttgacatcgcacaaacatcgcacactaatcgcacaatatcgccaaaaaatacagaagcaaactaaaaaacaagatcatgtgcaattaacatcgcacaaaatcacacaataatcgcatcatatcgccagaaattacagaacaaaacaaactaaaaaccaagtttctgttagttaaaaatcgcacagtaatcgcataatgtcgcctaaaagtcggtaaacaaaccaaaaaagtattaatctaggagaaaattgcacaatatccaactaccacca

SEQ ID NO: 95805 - DNA, 567 bp, Cannabis sativa
gagaagggaacaaaaatcatattttattgaatgtaatttgtggtataaatatttaaattaaattttaaataaaaataaatatttaagttttatttttttatgataataatacttaatttataattcttgaacttatgtaaatacttaaatgttaagtgataagtaaattgttaagtgacaatcactgattggttcaagtcattaattttttttaaaaaaaaaattagtttaaatatactaataaaaaaaataacacttgacgttttatggtcaggtacttacggaagttctaaaaatataacttaggtattattaccgttaaaattaaacttaagtatttatttacaaatggaagttaaatttaagtatttatgccgcaaattactctatttattttattgtttatctatttaataggttgtgtatttaataggctatttaggctcgatgagagttatggttgatctttgaagcttatttaggccgtgtattattaacatgtagaaattacataaagtataagaaaatttaagggttcgtttggtacgctgtattacaccgtattgt

SEQ ID NO: 95806 - DNA, 542 bp, Cannabis sativa
gttatttcttagtagaaaaatctaatctacactttttggtattttatcattttttaatttttttttccataattttatttgttgtaattttttaagatcgcggtatatatatttttgaaaaattgcaaatttaaccattaaacttataaggtagttaaacttagaatagcacatttgttctctaatatataggtaaattataacataaccattaagcaaacctaatactttgttaataaaatataacatttagttaaaaagatatgttgcaactaatcaaattaatttaagatggatctcaatttcttttcgaaaaattacataaattgttattttggtaaaatatttacacttttacgtttaaagttttttttaacatttttacggtattctataaaatacaagaaaaccacatgaaagtaacggaaaataatatcaaaacaactaaaaaaataatatacggataacaaaaaattaataaaagaatataagagtacaacataaaaatacaccaaaaaattatattctatgtaaataaaatc

SEQ ID NO: 95807 - DNA, 692 bp, Cannabis sativa
tcactttgattcctttttatattttcaggtcaaaagggatttcatgtgtttgtactgtaatgatagatgccaccgctttagcagcttggaagcagttcggaagcatatgattgcgaaaagccattgcaaagtacactatggtgacggcggtgatgatgaggaactcgagctagaagagttctatgattacagcagcaggtttttttctcctcctttctcataactccgaagttctgcttatgtatctgtcgaacgttatgtttttgtgatttgttagattgtatctaatcgggatgcttgttttatctattttgatacagctatatggatgaggatggtaaccaactggttgtgtcaggtgaaaccaatgctgtggaacttgctgggcctgagctccttataacaagaagatctagcaatggagtttcaagcaaaacacttggttcccgggatttcttgcgttactatcgccagaaaccacgcccatcaccaatgcatgataaggccatatcagccgccctggcctcaaggtttgctttctttttcttctacattgcctatctatggccgttctccgttgtgtgaaccgacaactaaaagaagatttcctgaatgttggctttcaggtacaagagcatgggactggcgactgtgcaatcaagagacaatatggtgaggatgaaagtgatgaa

SEQ ID NO: 95808 - DNA, 853 bp, Cannabis sativa
gccacataggctgtgacggtgtgcaccaccaaacctcgcttagtcgcatttcccaattttcgagtaaaatgcactatctttccttgtaagctaattttggacccgatacttcagaattgagtcatagctatgagaaagactttgattcgttttgaaattatctttccaacgcaagttaaactaggtcatttgaataaaaattgagagagttatgcatattttactgaagtgagtttatcatgtcttgtaccagttgcgagcactgccatgaacaaatggtagaggttagaaatgcatgttctcagaccccttgaggtgtgttttgacttgttttttgatggcaagtcatactttggaggtcttgtgacccaaaaacctcatttcaacgtctgagaccctaaaaggtgaccattgctattagttggggccggataatggcactgtcacccatggctcgtgagaagtcatgggtgatgtctctcacttgtatttggtacatggatgttgaaaatataacttagtcaataaatttctcttcctagtgtggtaatcgacctgtgccatttcactatggcacaggtctccaatttggagagcactgtcattctctatggcacaggtctccaaggctggagagcactgccattgcttatggcacaggtctccaaggccggagagcactgccatcgcttatggcacaggtctccaaggctagagagtattaccattgcatgtggtacaggtctccaagaccggagagcactgtcattgcatgtggtacaggtctccaaggccggagagcactgcaattgttgtgccacaggtctcaaaggccggagagcactgccattgc

SEQ ID NO: 95809 - DNA, 669 bp, Cannabis sativa
gtttctagtcgccttctattctcaattttttgagatggttttggctgatcatttggttgttcattttcaagggaaatctcagtttccccaggttgctcatttttagggggaccctcagtttccctaggttgttcttcctgagcgttctgagggttctcttgagctgtcacctaccttctggtttgttagccacgaggtctacctcgtggtcttctcactccaaggtcaggttgattttgagcattattctcctgtgtcgccctggtcgcggctgcctcacgctccacctttgcattccacctgttttcctcctccagacgatgcctgagttggcatttttctaactcgacgaatggcacgtatcttgttggatcatagttgccatcctcaccagttggcctaggatgggctctaccaatgttcatttcaggttcttcataccttgttcctggattctgggtcctccttgaacgtgtgggccgtgtacttgggccaccctcaggttgggtcctcctagaacgagtggtgcgtgtacctgggccaacttcgggttgagttctcctggaatgagtggtccgtttagatcgtgaattgggaggcctccgggagcccattggctcttttccaggatggtgagtggtttcatcatgaggagtgtcgacgttttct

SEQ ID NO: 95810 - DNA, 731 bp, Cannabis sativa
attttgttttattttaggtattatataatttatttttaaataatacaagaaataatcatatataatttaactttttttattataagaataaaccttaaaattaacaattttttttttcttttttataaattagcaagattattattactccaaatatataaccaattacaacttaaacatctcaaagtagagacatgagaaaaaaaactactagcggtacaacaatgacatcgtatatgtatatttctattacaaattctcaaagcatattctattcttagcactaactcttttaggctaaacacttttaactctatacaaaatatctatttttgttctagctagctactatatgactagtttggacattttttccactccacggaatttcattccgagcttgccaatattataggctaaggctgctaatgcagcaacataaatcttagttttaaacctatttgtcttgtctctttgcaaccacctcactagtctaagaagtgaaaatgacacaaccctctaatgaacccactctttaatttgttgtaagcaatttgctgcaacattgcagctaaaaaggagatgctcgaagttctccttaccagtcctgcagagtaaacaagtgtatgtcttttgcagttatattgatttttcacaccttgtctttaactgatcttgcactgctaaccataagaagaaattatgtgtcacgaccccagccctaggccgtg

SEQ ID NO: 95811 - DNA, 505 bp, Cannabis sativa
aaaatacgagcaatagaaatgcctaatgtattttaaatttgatcaaaatatagtagttcaagttgtgaatgaaaacgaaaacaaacatatatatattaaggtaaaatataaaaatacgaagcattcaataaagataaaataaaagcaaagttggccatccaaccttaaaaatttgtctttacaaaagtgccacaatgggcaaactattgtctcggccttaaggccatatgcctagataaaactaaaataaattataactaagcctacatagtaggatacttggacagttcttcttcttctgttgcctcggaaacctcgtcttccttcttagtcttctcgcagtaggcaaggacttcctcctcaaactcacctaagaaacttgtatccatccatggatttgccatccaagcttggtagatggaactttggccaacagcgttgcatcgttcaatggtttcagcttctttcccatcgaccgttactttggctgcattaagttcctcct

SEQ ID NO: 95812 - DNA, 612 bp, Cannabis sativa
  modified_base (45)..(71): a, c, t, g, unknown or other
tttttaaatatatatatataataaaattaatttttttatataaannnnnnnnnnnnnnnnnnnnnnnnnnnatatatatataataatattgtaaaattaataaaacaaatattctcttaagtaattgggatattttgttaaagttgacgtagaaagtaaaaaaatatcgttaaacctaaaatttccttacataatatattaatattatatattttaaataaataaattaatatattataatttgaaaaaagtggatttttcgtaatgtattttaaagaagtcaatgtgtggggtaatataaaagtgtgttgtaaattagaaaaaatagaattttagtaggatagcactttaaaaaatctcaatctctctaatcatcgtgttttttactttatcgtttaaaagtaatacatcactaaaatcttatttttctattttacctcaattttttttttatattatactatacatcaatttttaatcaaaatacatcaccaaaattatactttttcaaaatttaatatacttcaacaaaattaattcacttgtattcattattgacaaatctatgaagcagccataacgaataatgtagatacacatttaaattgcaca

SEQ ID NO: 95813 - DNA, 1326 bp, Cannabis sativa
tggtaaaataaattccaacatcctcatcttcacaagctgggggaaaactcaactttgtagctgcttttgagaacagcttgcgaagtcaggccaaaaaggtccttgttgaacctgtgagtaaaaccaatggaaaaaaagagacatgaggtgagcaaaagcattcagtcccaagaaagatttattcttgtgtgtctttttgcaatagaagagggtatatcagacctaagtgttacaaactagacacttccttgaggaacatgattatcggcactcattagaagaaaattctcttaatcattttggaggagctctaggtagaaattgggttcctaagtcataggatttggcacttgttgctcatacttctctgtctgctatggaagcaaatcattggtactttgaaagtggttgtttgaggcacatgattggttctcatgattgtttaagtaatttcaaagaaaatcaagagagctcgattacatttggaggatgaaataaagggaaaataatggtttatggagatttgaaactttcaagagaattccctttgattggtgtgctgtttgtttagggactaaaagcaaaaatgataagtattgggcaactatgtgatgctgattatgatgtatgattcaccaaaacacaatgcttggtatcttcatctagtagtgcagtattgattggcaatagaatttttgatcattgttatactcttagtagtcaagcgagatgtcattgcattttactttaaaaactcgacttgtgacattgtaaattgggacatctaaatttcagggatctaaaaagaattttcaaacaaaaacctgtttgtgggattcctgaattaaaaatgagcagagatagactctatggaccatgccaacaaggaaaataaactcagtcttctcatcctcatatcaatgcactactgacatctcgtgtgctataactaattcatgtcgacttaatggggcctatgcaaactaaaagtattgctaaaagaagatatgtgatggtttgtgtggatgatttctctcgattgacatgggtgaatttttggaaagaaaagtcagacacttttggtgcattttcatctctgtgctaagactataaactgagtagaattcttctattggaaaagtgttttaaattagaagtgatcatggaaggaattcaaaaatttaatattttctcaattttgtgataaattggggattagtcatgaattctctgcccttaaaactcctcagggaatggggtagtggagcaaaaaaatcaaactctacaagaaatggctcgtgtcatgttgtgcgcttaagatgttgc

SEQ ID NO: 95814 - DNA, 577 bp, Cannabis sativa
ctatagcctgttgaatgttattatatattttaattgtttattttttttaatgctagatgttaagacttggttattcatgttatagttctatagttgttttttctttttgtttaagaacagaatatcagattgttatctttttttgagacaatgtagtactttaggttataatgcatatgtttttgtgcgagtttctcattatgttgatatataaaatgtttgattcaactgtgggacaacgtttattcaacatgtctaattattatatctatgaaagtagttagataaatcacttgaatcttttgaacaatgtgttatgtgtaacatctgctatacaactatcattcaacagattgacaattgttgaataaccaacatgcttgtcaatgtaataagaaaagtttttttttaacttctattaatgtttcaaatatggtgttgctaatgctttacatttttgataatattttagatttaacattcaactacaaaataactattatggaacttttttcaaaactaataatgtattaaatgtaataacaatgtattaacattttctgcctgtaaaagttca

SEQ ID NO: 95815 - DNA, 1146 bp, Cannabis sativa
aatgaaacttaggaatttcatgcagtgatttctttttattcttgttggcggtcttcttaactttgggcattttcttttctttccacttgcacactaccccaacaaaatgaatttcttctttgttgccttactcactgctgcccctaaacacaacaagaactcgtacaatgtacttcactgtctccaacccacttgtgttcaaaaactactacttttgccaacccacaccacaccaagtaacttttgacaccttacacacaatccacgtagtacttggccatgatactttccctgtggaactcttccaatgtctaatttatccaatcaccacaaatcagttcaaacttgcactatttctaacatcaccactgccaattcaaccccatttcactaagaatcaccatcatacaaacacggtagagaacagtaaagcattcaaaaccacactgaaaaaaaaaattccaaattacaaccccaattgcacaatcactacttttctcagatttaccaatctttctcagcccaatattcaaaaattccaccaaattccaattcaaatcttccaaaccaacattatcacactcggtgaccacccgtgaatcataaggataatgtttaacaccatttgaatatagcatatactagcagtccaactacacccaccaagtatgcaattcaaccaaaaaaaaaaattcaatttacctcaccaaaccagaacgtagctcgggctggctgaaatttgctagtgttgattctctggctcaattttttttttctgtgcaaccgagctattgattcgagtacggcaatatgtgttggctatgaatttccttctcttcttgtgctcgacaactgggttagtggagggagcctggctgtgtggagtttgctgcttcggtcatcggttcgtgtttgggagaatcgagtgtgggctctggtttgaattggaagtgggtgtagtgtggttcgaatgggaatttctaggctggtgcttgggtgcttcgaagtcaggtggaatggtgtcgactggagctggttcggtgcagggcgaaaatggtgaacaaaggtaaagattgggtcgagttggggggtttgctcgtggtgttggtttgagcttgacttgaactgggttgatttggtggttcg

SEQ ID NO: 95816 - DNA, 553 bp, Cannabis sativa
ggtcaaaccctggcaggagcatggccgaccagaccccaacctgcaagcattgtatggccaaccagcctatacctggcaggtgcatggccggacagcttttatttggcaggcctttggtgcgtagccttcatccgtagacagcaagttaagcacgaattgggccttgatagcccatgaaaatagagagaaaatattagcaactttcctatttttgagggataatttagtcatttaaagtttattaattaattatgtaaatataactttatttacctatttttaagggatatgagggatgtatgctctactatatgaagagcattagtcaaaccctaaatctctaagtcttaagcctctaatctccttaagctctcaattttaagtctgaaaccctaattctctcttctccctctcttctacacgctctagattctctctctcacactcgagatttgccaacttaattctcacattgtaatcttaagagaggcactcccaattctataacacttgtgatttgagtggtatgatctttggtatcaatacaactaaa

SEQ ID NO: 95817 - DNA, 707 bp, Cannabis sativa
  modified_base (671)..(678): a, c, t, g, unknown or other
atagtattacgcctacctctaatggtagctgacagaaagaaaaatttgaaacttttgcgaataattaatcaaatcaacaaaatatagatatttgcacttgtatgaggattaaattgaattaaattcatctacttgtgcaaataattcaaaaattagaaagtaaataataatttaatggaacttttgcataaatatacatcaaatttaaaataataaataaaataccataaaaaaattaattaaaaaaaaatattttgcccaatcagcatatacctgattaaaatttaatacataccaaaatctaaaacttatgaaaattatctcagatcctatctcttgagtattccaataactggttaccttttaaataaaataaaattatgtataaaaaatctatctatatacatattgccattatcgaaaatactatttttagaaataactttttagtcacaatatagaatttttataaatgaatatatgttatttttagccacaataaatattacttgtcactagctaaaaagaattatttagatacaagttatcactaatttaattttaatcacaataagtcttttggataaaaacgcatttagagacaacaaattataatttttttaaccacgaactttttagtgataacataggaatgatgatttatgtttagnnnnnnnnttttcacttttaatcataaattttgttgt

SEQ ID NO: 95818 - DNA, 507 bp, Cannabis sativa
atacataattatttatcttttgttaacaactaaataagatcgaatatataattaaataacaaccttattctatatgcaaccatacatcaacatattattttaaccaaaaaaaaaaaaaacttgaaaacagcaccaaaacaactcctttacaataaagaaaaattaactacaaatcacctatacagcaactcattatattaacaaaaacaaatatataactaaaaatcaattcattacaatttaatttctaacaaataactaggaattagaaataagctagatgtgatttgtattacgttgtgaaaaaatacttaaataaatattattaaaaaaaatatacttttaaatagtataatttttttattattattttgaataaaaataatagaaaaaaaacggaccttttagattgttctctttttggcaactaaataacaacaataacaacaaaccaaaaaaaattactgaacaacaatacaattttaatacatacaaaaatcaaatatg

SEQ ID NO: 95819 - DNA, 556 bp, Cannabis sativa
aagtgtacataaatttttgtaaataataaattgagataattcgaccaaaaatataaattgaaaattcaaaaaaaaaaaaaaatataattcgttcaatctttatattagacaagttgaatataatactaacccgccaatcaacttaaactaacccgatcaacttaattaagagattttttttttatatatttatatatttttattatctatatttatacatcatataatttatatgactatttaaaaaaaaataaaataaaatttaaactaattatattttttatagtagttgatttgaactttgaagttaatctatatatatttatcttattattacaattaattaaaatataataattaaatataaaattttaaaaaaatattagtagtcgatttggacgggttaactcaaaattgaccaatttcattagacaggttactattttcttttttcttggacaggttgcacttagatttttgtaaccatatctttatattgggttaaataaacatagtacaaactgaccaaactgactgacctacacccctagttagt

SEQ ID NO: 95820 - DNA, 537 bp, Cannabis sativa
ttgtattctgtaactacggaaaatctgctttcagtaccagtttcattattccatatttaattaatcacttaattaaataattaaactgggaatattaaaatacggaatttcaagttccaaccgcaccaatttaattggtaagtccctctctgtatagtcgttcgcacagggacttggggggtaaatgttatccgaattttcgcccaccatacgtggcagatcttacatggacaaaatcagtgtgacgtggcaatacaactgaccaacaagaaggccaagtcagcacctcaacaaacgggacgccagcactcaaatagacatcaagtgacagaccagcttcctcatagaagatgaccagctagtctctagacaataccattgccggccagcctgctccctgtaggtgtttggctggccaagagaaggcctggcaaaatttcttgtacaattctacacatggactgctaattgggttgcgaattgggccctaaaagcccaataaagtagctgaacaatatctatgtttaagggtatttt

SEQ ID NO: 95821 - DNA, 562 bp, Cannabis sativa
  modified_base (525)..(536): a, c, t, g, unknown or other
attaattactgctccaagtttgatttttaattttttcacagaaaattgaatcatcatatttgctaatgtttacagatataaatgcatatttgattgttgatctttttttatctcaaacttgtttgataatcatttaaggagaaatgtataaattacacataattttgagataggatatatgcaatttctttgatacgattgagctttaaagcctaccctatttgttgaatcacttgttatccaatttgagaattaaatgatgaaattttattatttttctttttaaccttgtacaaccttttgagcaaaaaaagaaattgttctttatcatttttgacactatagtatattgatattttatgtttataaaagtgagagttttgttgaggggagaatattgatgatcgtctaagctaagatgatgagaaaaaaattaatattctcttagaatgaatgctcataagttgcaagtattttattaaaaaaatatatagaaatagaaaaatatatatatatctttatatnnnnnnnnnnnntatctaacggcatttcttggtttaac

SEQ ID NO: 95822 - DNA, 840 bp, Cannabis sativa
  modified_base (677)..(681): a, c, t, g, unknown or other
aaacaaaagtgttaccaaacagcaccttagtttccaaatttaagaccattttgcatctcaaccatttggttaattctcacgcctatatgggattgatactttcttaagatcccagttttagcccaggtctcaaattatctaagcagctatgatagtgggcttagtctagaggcccaatgttgcttcttttttattatatttatatacttccccaatatgaaaataaataattttgaatctatttagagtacaatagctcttttaaaatcagaggagtgccattttttaaaaaaaaaaatgagaggagattgtaaatacatcgagtaatgtattttatatttcttttacttttctgtatacgtattttatatttccttacaataatttaaatttaaatatttgaaaaagtacctatttttttaaaaatacctatttttggaaggggaattttcaaaaatacccttttttatattttatttacaattttacagtctaattttattaattacaaaaatactctttgtaaagttttaaaattacaaaaatacactttgtttagcaaataataataaaaaaaaaaactaaaaaataacatgaaatcaacctcacaacaactataaattaattataaaaacaactaaaaagaaaatcccataacaactataatacaactatannnnnactataaaataactaaaaaaaatagtttagtatttttacagaagtgatatttttgtaaataaaaaaattcaaagagtaaaaataaaaaaatttccgtgttaatttatttttgtaaattttttcaaatttttgacatatcatgtaaatttttctttttgg

SEQ ID NO: 95823 - DNA, 1116 bp, Cannabis sativa
  modified_base (542)..(542): a, c, t, g, unknown or other
tatattatgaacaaccaatggacttttattttccactaataccacatccgccatattgtattctctacgagctaccaacgtttttttttccaagctcaccatgcaaagtcttgtgttattggtgtgggttttgttcaaacttataattgcatgccaaacttgagggtattttcaaaaataacttttaagttgtcctgacgccatcttattgaaattgcaaataatatgagaaataattgtatcttcaaaaaatttaaacactaaaattttaatatccaaaaagatatttgccatcatattttggtatactatgggccagttgggcacatttgtattgtggaaaaatcagttatgattgtgttgtgagaaaaaatagctacagtagaactgtagaaaaaaactgagtagagtgtttggtaaattttaaaatgctataaattattaagatttaattataatgataataataatgacaatgttttagttaagttataatcataaatatatagaaatttacgttataattttttattttttttttntatatttttaattattttttcttccaaagtgtaaattaaaatatttttagagagaaaataaaaaaaaaataagagaattaaatattaattattttattgttgttaatttattttaatttttttttttaatttttaatgtataataaatatgtagatatatatttttagtataaataaatttattatagtctttcgatcaaaaatagttttttttttttttaaaaaaaaaaaaaattaggttgtaccaactttacatattagttgtagcttcttttattatttttttaataaaatttttttgaactatttctaaaatatttttttatcataacttttaaaaaataggttttaatttttccaaaatatgtgtgaaatagccctatgtgaaggtcaaatacaacaatataataatgggtaaatggcggcaaaaccccccaatactttcgttttggtttcattaaacccccacaatccaaagttctgtgggtaaacccccaaaccaggaaactgttagcaatttaacacttccgtccaaatttagctattaattgtcaggttggattgtccacgtgga

SEQ ID NO: 95824 - DNA, 715 bp, Cannabis sativa
ttagagttcaaacaatatattataaacgattttattttattgtatacttttgtaaaatagatagattgaactcaattttttttacagcaaattatattaaatttcttaagtatttacagtattgtatataacaataatgaacattactatattatataaaaaaattagaattaaaactatctaaataaaaaaaaaaaaatatatgaaagggtgtattaatacattaatttttagaaatgcactgtagattagtgttggcaattcgtgtaattgtattgtgtttcgggctagcaagatttcgtcatgacgcgatgtataacacaaatatggttaaataacgtgttacaaaatgtatatgtaaatacgacataattctaaattgataatgacaagatacaattaacataatatttaaagaagttcatattaatcgtgtctaatcatacttaacctattttgactcatatttgcttatgctaaacccaaactcactaatttcataccctttttaattaagtcgtgtcatatagtatcatgatttatattatcaccctcaaataaaataatgttgtggcatgcttgatcagatgctcatcatagccaaatgacattttgttttaaataaatttaattttttatgcatataattagccaataatctatatatatttatctatagatattaactggtgttagttattggttcttggttctt

SEQ ID NO: 95825 - DNA, 1269 bp, Cannabis sativa
tttctaacttttttacttttttacggtgaggcggaatttttttcaaaaatactttattttttaaaaaaaatatactgtgtaagttttatattgtgtactgttttaagtttttacggttgatttttagctgttctattttgttattttacggttcttttgtaaaagagtattttgtaaaatattctgtgtgacagtaaaattataaacttttaccaaaatccaatatttttgtaaaaactccttaatttttttggctgactccaattgggcttgggctactaaaacttaaactatcttatggattcttgcaaaagtatacagagtcatttggaaaaattacatctcgatacatatttttgtaaataattataattataacgttattttttgtctttacatttataccttctttttttcatattgttaaatgatcataccaaaaatagttactattatcattagtaacgtaataaataaataaaaaaacagctaaatattagtttgtacttaatttagaattagtttctataaattatatatttcctttaagaaatttattttattttctaaaaatatttagaggtataacataaatatgccttgacatataaatatatataacttattctcttatgtattttcttattatagtataaattatttatattattatttattttttctacattaatttttttgaaatagataactttcaatgtttatttatttattttactcattagtatatgaaatataatatttatttcttattatatttcttacacttttaatattctcatttggtagatatattaataaatattattaacaaataacaatcaatactaacaaataatatatactaatagatatatatttaaaatcgcatatactaattagtatgtgttaagaatatataatagttactattaacaagtaggaattaattaatacaatgtttaaaattgtacatactaattagtacatatttaaaattatatagatactaaaaagtaatagatacaattaggtatacatttaaaaatatacatactaattagtctatatttaaatttaaaactgtatatatatagagaaaaacaagtaatatatattgttaggtatacatttaaaatcaaaaatactaattggtatatatttaatactaagtagatcctaataaattataaatagtttaaaattatatattaattggtataaatttaaaattgtaaaatattaacaagtaaaagatactattcggtatat

SEQ ID NO: 95826 - DNA, 509 bp, Cannabis sativa
ttggattatttgctagatatggttaaaacttgacagtgttgatattatttgttttctgtgttattttagtctagtttgatgttaattagttctcctttcttagtccttgggatccctaggttttctttgtttcattcggtcttgggctacgcctttgttttttgctgaaacttcgtactttacttcatatttgtttttcctttaataaattttcttatttttttcttgaagcggtgattagagtcacacataatttacaatgcagcaaattacattcgatggtaaaatctcctcaaaccagggtagctcgtctaaccgaaggacatgttttgtcaaaccgtaaactgcaaaattcttatcgcgggacagatgggacaagtttacaagtttgttctctagattctaattttcgctgtatgatattatagcatatatccttaacataaaaaaaatgtagagtaaatgttgattatatacttgcaattttaatttctttttaaacatatttg

SEQ ID NO: 95827 - DNA, 934 bp, Cannabis sativa
atagattagactataaggttgagagttgcatacataaagggcttggttacatagagtcttgattattgcatttgtggataaaggcctatgtatggaatcttgattgttatgcttatacatataggactcaactagagcttagctaaaaaaattattttgagtagattaaatacatgattgagacttctaattacttgcactggttgtaaacttgtaatatttctctgtcacataggtcataaattaatctatatttggtagcaagggggagaaaaaaaataatagcagggaaaaaaaagtaaggacacataattttaagggaaagttttaaaaataccctttttatattttatttacaatttcttacagcctaaagtttttgtttgtttagcaaaatgtaaaaagacaactaaaaataacaataaataaatctcatgaaaacaataaataaactataaacaaccaaaaataatataaaaaaccttataacaattataatataactataaataaactataaaataaccaaaagagtgctttattatttttactgaatatgtatttttgtaaataaaaaagttcaaagcgtaaaaaaaaaaaaatccgtgttaatgtatttttatgatgattttcatatttctgataatttatgtaattttttctaattttaatataataagatatgattatttcaaatttggcaattaacttaatattttcaaagtaaggagtagtaaaccattttttgaggtcattttcctgctatgactccccacggagtctacgtaattggcgatgggctcatcaaaatcctgataataaggcccaaataataagggaattttataaaaatactgcttttggaccaaaactttacaattatactgggacacggcaaaaataacatttttactgccccagcccaatttcatta

SEQ ID NO: 95828 - DNA, 545 bp, Cannabis sativa
cttggccatgatacttcccctgtggaactcttccaatgtctaatttatccaacaccacaactcagttcacacttgcactatgtcgaacactaccactgtcaattcaacaccattgcactaagaatcaccagcatacaaacacagcagagaacagtgacacactcaaaaccacacaaaaaaacaattccaaattacaaccccaatttcacaatcactactttgctcaaattttccaatctcctcagcccaatacttaaaaattccaccaaattccaattcaaatcttccaaaccaacattatcacactcggttaccacccgtgaatcataatgagaatgttcaacaccattttaatatagcatatactagcagtccaactacacccaccaagtatgcaattcaaccaaaataattttcaatttacctcaccaaaccagaactgagcttgggctggctgaaatttgctagacagagaactctcggttgttgtgttttgaatgaagttcgaataagatggcttaggcgtatgggtgcaagctgaaggg

SEQ ID NO: 95829 - DNA, 1434 bp, Cannabis sativa
ttggagcttctaatacttagcctaattctgtaacaccatcttgtgagaaataaaaactcaaagtagatgtagctccattactgtcgcgatacagggagtgaaacactataaatttgtgtctctcttataactgcttaactacttttttattctcgtcaatctaacgagcgggtgtgacttagaattatagtccagatttattagtcaacatgcaagatagcacgatagtggtatgatagttactttgtcatgacataaattttaagcaacaacttaaacctattgtaccctattgagcactatttgtattcatcaactattgcaccactattataccctattgagcatatattcctaacctgttgattatactattatcgtacccacaatcataccctatcgtcgagcattcacaaaaaaaatcagcaaactttatcatgctataaattttatcatggcataaattttagcaacaacttaaacactatcgtaccatatcctacatatatcaactatcgtgtcctatgcatatttcaccaaaacttaatttttcccaaaagaaatcagaaataaacacaaaaactacatctcaaacatctaaactacattataaatcatcaaaatgtgtaataacaataatatttaaagaaaaccacttaaccattaatttttttcatcgtgaacataaatgtaacaaaaattttgtttctcctacagcttcctaaaatgtacctccggtggtgaggacgaagacaaggccgatggtgggagttgggtttctctcagtgggaaaaggaaaaggaaagagagaggaatagagagaaattgagttagagaaaagggagactgttggggtatcaatccatgtcccatatcgaaagaataagaaagagttgcctcctttgatataagtgttccacctattctagtaagagatattttgggaaggtgcccaaaaataaaaccgtgagggtttaggcccaaagcagacaatatcatacaaatttgtgagttaaggtgaggtggcaacccaacaagatagaagaacggggtccaaaaagtagtatcaaagccaaaggttcaagagcgttgggatagtgggctacatttgcgatgtgtgggagaagcccttaatgtgatgacctcataattgaagatctatatggtgcctctatcaaaagtctatcaaatattgaggtagtcaggtggcgtgtcccgttgatgcttacggctgtataagatggagatcagtgttaggacttttgataaaagtcttcctaacaaagttgatggtcagacgaaaagtttcgttggtgatagctccaacataagctgctttcactagaggggaggccacgagtatgtggtccttgatttaaagggagaattattgtgtaatgaccgctttagtaaattgaattagtaaaggcaatt

SEQ ID NO: 95830 - DNA, 522 bp, Cannabis sativa
gtttatggtcctccctatatgaacgccaagaaaaagttttggtctgagttcttgaagttaagggataaatttggtggcccgtggcttattttgggagatactaactttgtgctcagtgattctgaaagggaaggttcctcgggtcgagatccctttatcccagtcatctctaatctagttgattcttgtggccttatcaatatgcctattcaaggggataagatgacttgggataatcactgctctggtcggagtcatgtaaagtcagcccttgataaagggttagttaatggagcctggctcaatctatttcctagagcgcttctctgctctattcagacttgtaactctgaccacaggcctctttgtcttctttcgggcggcaaggaaccgaggttccagagaagctttaaatttgaagaagggtggactcgtgatgagagaagcaagttggtagctgccaatgctttgaactcagttaaccattcttggccccccgcccgtgtgtttaaaaaggtgggt

SEQ ID NO: 95831 - DNA, 748 bp, Cannabis sativa
caaaatagattgcatagcctgaagaagacctctgtcatcaatgtctgcagcccaatcagcgtcacagaacgcagctttttcagtgtgtggaggtttctttagatgaagaccatagctcattgtgccattgaaataccttagaatccgcttgacagcaacccagtgaatttacagagggtgttgcatgaattgacaaactttgctcacactataggaaatcccaggtcgagttatagtgagatattgaagtgccccaacagtagacctgtagagttgaacatctttaacatgatcactcccataagctgaaagtttgaggccactggtcataggagtagatgtagacttggctccttgcatttgagtcttgaccaacagatctctgatatatttcccttgagagagatgcaaaccatctgaagtgtgctgaacttcaattcctaagaagtagttaagttctccaaggtccttgagtgaaaatttagcgttaaaattagtgacaagttgagacaaaacctcactgttgctgcctgtaatgataatgtcatcgacataaactaacaccaatgttgtagccttaggtgagtgttgaatgaatagggagtgatctaatttgatgagacaaaaccaaacttggaaagtgaaagttgtagcctttcaaaactgctcggagcttgcttgagcccatatagggctttatgaagcttgcaaacaaggttaggcattgttgtaacttcaaacccaggtg

SEQ ID NO: 95832 - DNA, 3354 bp, Cannabis sativa
cgaattatttttcctaaatttaagataaagagataaaatttagttattgtaataatttacgagaaatttaaaacagtgtaaaaaatttcaagaacataattaaatagtgactactattcagagaaaaaaatcatacttatttctgcaagtacaatataaattgttggcgatcaatataaataaattttaaattgtagtggcctttcttagtgtgtgtttattgatcataaccatgaagaaatttcaaattactagctaattatgtcattggccagtgaaacataagtttcaattgacaattagtctccatgatcaagttaattttagattcattatcacaagtttagtattaaataacacttatatgactctaatggattaaaagttcaatttttctaacattatctaaattttcaggatcatctccttcttataattgtcgtaattttttactataactcatagattgatttagcatgccttttaactactcccatttcgtattcttgacccaaaaaagaatcagtactgaacagagttaaaaatagctcacaaaaaacccacactaattctttgattatgcaatgcaaacttggaaaaactattacaacaacagtatattttttcaacattttccaggcatgtacagtacatattagtaagtatttggccaaaatcatcaaaattaatgatgacaagtccaatccaactttattacaacataaacaaaaatcatccaatcatctttataatacattcaacaaatcatcaccaccaacatgtacatccaagaaattctctgtatggtaaaatttagtatataatgttcactgcctgagaaaccaccaacaaaaataagagcttaaaccacaacagcaaagaatatcactagccaattccgaggaggagacgggttatgttgacttggtggaatgtgctcttctccttgccaagaacataagaaatcgcgggaacaaagatttcttctttttctttccagccttggtttcttgaaatgaatcagtttcactgtcattcccgcgtgcatatgaattcgggcttggagcgtaatgtacgggaggaggaacagtagcatcagatactcggtcagaggtggttgcttcttttctcccctcgaaactagcccttggactttttatgggattcactgcagtatgaccagtttcaccggccttgcgtcgttgctcgtgttctgccctccattttcttagctcctgttctactcccaacttcccttccttggccttctcggccttatccattgcgattttcaatgcttctcttctcgaagccatctcccgattaacttcgtccaacttttccaagctccttaactcagattctttagctagttcaatttcagagttggctgatgcaaccctcgcgtttgccaactcttctgcctcgtgtgctcgcttgcttagttcatagtactcctctaaagaaagtgttacccctgaaggtgaatccacatcgttagatgatctagctgattcactctcttgcaaggccttgatagctgccaaagccaatttttccgaagctttggcagcctcaatttcttttcgtgctgcaagtaatctactctccatagtgcttgctgtagcctttgcttgttctgtttcttcctttgcctttcgtagctcttcacgagccatttgagcaagtgtcttggcctgatcagcgtcctgcgctgcttgctgtagtttcctcggtagttctaccatcttctcagcgacttctttctccttcgactgaacaagagctatctctgatttagtcctgtccagatcggcttcaagagatgaaacagctatcgatgccattccttctctctgtctcatcgaggcaagagctgatttctcagtttcaacttccacttttaatgattgagcagccatctttaagcaattgacttcagccaatgctttttctatgttgacctttacttcctcgagctcattcttggccgaagcaactgctgcttgaatgttggtatgagttttttcctctgatccctctatttcactatttgattttccttcaccagattcctccttcaacttcgattccatgtaagcagctaactcggctttcaaatcaactagtaaggctgaggcagcatcgagcttcgatttgagatccttagctgatagaatttgttggttaagtctctggatctcctcatcagcttgttttagttccttatcccaattaagagaatcttgctccctcgccatggacgctccaattctttgttcctctgcttccaaatgtgcagcatgtgcagactccaacgactccttcgttgcaatcagctcgatagtgagttcctcaactgttttctcaacttccttggaggcagcaacagcctctgcggctctcttggcagccacgtctttgtcagttaccaaagaagaatattctttacgcaatgcttctaactcctcttttacaaatttcagctctgaaaccgcagctgtatgcctggccttagcaacctcgagctgtgccttggcagcaacactagcctcatcagcaatcccttgctccatctcttccacacgtagcttcgcgagttctgagtcttgtttcgcctgatcttcttctgtttgtgccctctcgagattaagctttaattcttcaatgagtctcttagtgctgtccaactctttcaatacttgtacttttgactgctctgcggtctctgatattttcctgtattcggggatctccccctgcgccttctcaagttcttgctccacaagcttccgtctctgtaaagccaaagacgaaaagtcagcacaatagttcataaataaaccttgtgttttgcaaaagttaccgattgaaccatttgttcaaaatggtacaaaataatactgtgtttaactttcgtctcaataaaacttaataataatctaacctgaaggtgttatgatcaggctggttaccttttttctgcattggttcatactagagacgggcttcaagttggttattttaaaaacaaattgacgaaaattgaacttagagtattattttgtaccattttaaaaaatacaggtccaatttttcatttaacataatagagagtctgatcggtaacttttacaagcaaagctgttagaaaagaaatgtatgaaagtcataagaaaatcgatgtatacctctactgtctgaattttatgtgctttccaatcaacaattcctccaaacttagaaacagcctctttaacagactcaaaaggagctgttgtatcaataagacctctatttgcaataagttgcttaacaagtttaggagaatcaacaaaatcttcttttcggaca

SEQ ID NO: 95833 - DNA, 853 bp, Cannabis sativa
  modified_base (809)..(809): a, c, t, g, unknown or other
tatatatatatgttagagaatattgatgaaaaatatatattttttttatttttatttattaaaaaaaatataagtttgtcatgtttatgtttattaaatagtataaatttctgcacttttaaattttttttccttataattcctcataaatattaaatagactaatttagatttttgactcctgaatgttgacacggtaccaaatcatgcttagaactattgagattgttagattgaagaatttttgtctaattttactaaacaaagtctaccgtggatgaaataccccctgattaggataggcatgtaagatttactccacattatgcgggtaggtcttgatctataacgatcgagtaagtttaaaagcatattatcatagagaattacagttatttgagccatcccttgagtagctagtttctgctacctgatcggactgtgcgatagttctgaaataccccttaattagaataggcgtgtatgatttactccacactgccaagtaggtctttgatccttataacgatcaagtaagtttgaaagcatatcgtcacagagaatgacagttatttaagcgatccaccgagtagctagtttgtgctacctgattgaactgtacgatcgttccgaaatactccctaataaggataggcgtgtaagatttactccacatgtgccggtaggtcttgatctataacaatcaagtaagtttgagagcatatcgtattagagaattatagttatttgagagatccaacaagtagctagtttttgctatctgatcgctcccactcaattgaactacnatgttcccaagatgtaagtatccgccagaaccattggttagctt

SEQ ID NO: 95834 - DNA, 3009 bp, Cannabis sativa
cgtcgctttctctctcctcgctccctcccctgttatccaccatcaccactctgtaattctctctcttaccctctctttcttatatatatatatgtatataatcaaattcctatggttcactgtgtttttttttccttcttcttcagaatattaatggcgacgtggaacgggaatcctattctgatcagaagactgcgtttcatgttccggtacgtttttctttaatcggtctctgatatgtatttttatttttgtgcaaaaaaaaaaaaaaactcttcgttgcttccggttataaacgtgatgcaggtattgacgaatttaaatttgtgattgatcttatttttatttttagactagtggagtgagtttaggtcgtgatatatggagctcggtcggatcggaactgtactatggttgcagtaatggtgcccgtaacttcatgagtaagtgtcttatattcttctttttcattttcaatcttgaaaatggtttattaattaggaatggaagattcaaaatgagagaattagctatcatttgtaccattttattgattttggctctgtttgaatactctgtattaaccgtaagaattcaattcaaaactagtttcttcatgaatcttgaatcatttttggataatagaaatcatttgcatttttaatttgatgcgagcttttttatagagatcatttggatttttaatttgatgcaagctttttctctttgtatattgtatagcttcggatatgaaaacgaatcctagtcgacacctggtgattgctactagtggtggcttgaatcaacaaagaacaggggtaagtttctttggctcggacgcatttcttattttcccaacttctaagttcttctgtaattgaagaattaatttgcaaacccatgtatacgactattctctttagtagaaatctatgtttcggaggtctcgatctcaattagacaattaatatagttatactgaaagaaaatgaagttagtttccaactgtggttgcagataacagatgctgttgttgcagcttatatcctaaatgccactttagttgttcccaagttggaccaaaaatccttttggcacgatagcaggtttttctcataatgccactttagtgttgttatatttgtttgactagatgtaatgatttattctggtttcattaatatgagttcgtgtttgcctcagtaactttgctgaaatatttgatgtggatcggtttatatcatttctctccaaagatgttcatattataaaagagcttccactgaagggagggaaagttttgactccacactccatgcgtgttccaagaaagtgcactccaaaatgctacctaaaccgagttttacctgttctgaacaaaagacatgtaagtagtatgtacagaactttgcttattttacgagcaaattaaaaaatcttaattgggatctttcagcttagaacttctcaggtgcattaaaatcaattttaagaaattagagaaatttgtgtgaatatgtttgtattattcagcataattcatttcccaatctttttcatctttttctgttttcattccaatgcagtaggcaggatgaatgtccatctatgcgccgtttattaaataacaagtcttgcactgaatatttatatatttaaacaaagaaatatttatttttatatttttttactttagatatgcattaaggaattcagaaatgaattaaatattgaatttaactgtcatcgatgaatttacattttccatttacaggttgttcagctctcaaagttcgattacagactttcgaataagctgagcaaacatctacaaaagctaagatgtagagttaactatcacgctctaaaatttacagattccattcttgagatgggagaaaagttggttgaaaggatgaggaagaaaagcaaccattttattgccctccatttaaggtaaagtacaattagtgtgtgacccttttccgattagtcttctctatgtttacttttcagtataacactactctgtattgatacatttttagccactaactgtagtagttcttcactctgcatcataataatttaggcgacagtaatgtgatacgtagaaaacaaaaacgtttttatctgtgtatatttctttaaagcacaaaaatctgtagctaagctagttatgacaataacttttgcactttttagcctaaaaacagatccaacgggaaagtttgcttaacctgatacgaaagtttgttttgattgtagatatgaacctgatatgcttgcattctccggatgcgattttggtgggggagataaagaaaaagaagaacttggcctaatccggaagaggtggaaaagtttacatgtgagtcttcaatagtatcttagaatttgtcatttacttgttaagtgtcatgtaactgatatctctgtcttgggatatgtcatgcaggtgagcaatccagataaagtgagaagaaatggaagatgcccacttactccaggggaagttggtcttatgcttagagccttgggttttggaagtgatgttcacttgtacgtggcatctggtgaggtatatggaggtgaggagacattggcacctctcaaagaactcttcccaaacttccatactaaagagactatagcaagtaagaatgagctggcaccattcacatccttctcttctcgcatggctgcactagactttattgtctgtgatgaaagtgatgttttcgtcaccaacaacaatggcaacatggcaagaatcttagccggacgaaggtaccaacaatacttgggattcgggttcttttttcgatttatttttctttaattggctttcttttcttagttagttggtgataagacccgagatctccaaactcaagaacacaatagaatagtagcaaatagcacaaacagcagcaataataggagtagaacagtagcaaaacaataggaaatgtatattgaatgtatgagaaacccaattacaaagta

SEQ ID NO: 95835 - DNA, 521 bp, Cannabis sativa
aaaatttaatacatataatataaagcttaataaatcaaatatataatcaattttaatatataatttatttctttttctacatataaaatttaaacaattttttttcttcttttaaattttttattttatttattataatttattattagacataaaataaatataatttattttattttaaattatgtgaagagagatacttttttaataaatattaaataattaaaattaaaaaataacaaatccaaaacatccaattcattttctcaaattaatgaattcaatgcattatgagggcggattaaattgaataaatactcctaattgaagtataaagatgtgtactacgtatcattactctttgagttagctataatattactacagtctatagctatatagcaaataatataaccatataattataaaacataatttcctgaatacaaatatgggcgatacatttggattaaattaacaccaactccgcagagcattatatgttgagtcaaaaatgaaac

SEQ ID NO: 95836 - DNA, 750 bp, Cannabis sativa
  modified_base (688)..(688): a, c, t, g, unknown or other
gcttcgatccctctttttgtgacgaggtaacctaagaattttcctgaagagacaccaaaagagcatttagtaggattaagtttcatattgtatttttctaatacctagaatgcttgcttgaggtggtcgaggtgattctctgctgctaaagatttgacaagcatgtagtcaatgtaaatttccatcgtctttccaagcatatcggcaaacattcgattgaccagcctttggtacgtggcacctgcattctttagtccgaacggcatgactttgtagcaaaaagtccctcgctcagttatgaatgatgtcttttcttgatcattggatgcattaagatttggttataaccagagaaggcatccatgaaactcaacaattcatgtccagctgttacgtctaccatcatgccaatgtgaggaagtggaaacgaatccttcggacatgccttgttgagatcagtaaagtcaatacataccctccattttccattcttcttcttcacaactactacgtttgctaatcagttgggatagtcaacctctctgactgatcccacgtcgattagtttttgcatctcttcatttattaccttgttgcgattgggtgcgaatttacgtattttttgcctcaccggtggataattagggtcaacctacaacttgtgaacaataatgttagaatcaatacntgtcatgtcctcatgggaccatgcaaagcagtgatggtgtttgattaagaattcgatcagcc

SEQ ID NO: 95837 - DNA, 995 bp, Cannabis sativa
gggagctttgaggaggtccggttaagcttgtggtaggagcggagtgagacagggcttgtccactcatccctgaggggttacttaggggattcttgtaatgcgacgatgcgggagccaaggttgggctctggttgtatcctggggtggcggagaattgtattccgctcatttgaggagtaaccggagatagggcccccgagagctttgctccgggtacataccctgatactccagttggatagtaccctctataggccactatttgggcctcttccaagttgatgtacttttgaaccctcttctggaagtcttggagattggcagctccctcctattgtaattgattccaaaatggggtccctatacggatcccagcttgaagaagtgaaagatgttgtccgtcatcaaccttcttagttatcgaggcttcttctttgaacctctttataaaattcttcaaggtttttgtgggtatttgcttgatgttagttatggcgctgacttcgagattaatctttctcgccacgacaaactgtctccggaaacttacttccaacctgttccaggaatccacagatcccggttctaactttttgaaccattcctccgcggagccgctcaatgttagcggaaagcataaacatttggcgtcatcactgaccctcatgactgtcattacctggttgaaacaagataaatggtcgctggggtccgagtctccagtatatgttgccattttaggcatcttaaagtttttgggaagctctgcctccaatatgtgccgggcgcatgactcccggtcctcgtagtcggagtctgagtcatcccctttttgcgcaatgtcaccaacttagctaaaattccttcatttagtctccccacagagactgctagtatgtgtttctttttgtccaggtgatcccgcaaatcaccgtgcttttcgtttatttggtgtcttaaatcaacgggaaggtatctccggtttccccttcctc

SEQ ID NO: 95838 - DNA, 669 bp, Cannabis sativa
ggtagagaaggaggctttcagtttgtttcttgtctcttttttctcttaaaaaatggacacaaacatacaacaggttcataaactccaggcgctcttttcttcgtacctttgtaagtatgattattttattgtaatataatatgaatgtatgtgtatgtttatataatccttactaataatatacacataaatgtgcaagtatacataaaaagtatataaaacataatcttgatttgcattttgttcatttgatacatatcagtatgttacatgattatgttttattgttttgacacatattatggataaatattattttatgtaatgttattaactgagtacttgtttgtttgactaatacgtatatttaaaaataaaaaatatatccggtgaaattcaaaataaataatgacaaagaatgaagaaaagatgaagaaaaaaaaggaaagataaagaagggcgaaattcgtatttttcttttattagccttatttatctttaattactactttattaatttataaccaatatctaactgctaaaatcacccggatcttcaatcaactagatcaaacaatacaaaaatgaagggaaatttacaaaaatactaaaatttgggttaacttctacaaaaatactgtcacgcggaaaagttttcaaaaatactgt

SEQ ID NO: 95839 - DNA, 520 bp, Cannabis sativa
aataaatattataaaaaaaatcattaattcttcataaggtgttactgtcaggtagccttagaccatctttaataattgcacaattttagtatatatgtattttttttttctaatttagtgccctagtgtgtttagcatttctcaaattcgacattaatttggtggaatggtttaagttaaaaagaaaaagatgagtgctaattacaattttttaatcagcttctacgcttgaaataacatgtatttgttatagttgcagtatcatccatttaaatttttgatacagtactgaaaacagaatttctgatattccaatttaccacgtgtgttaaaaaatttcaaacgttattgtaaattattttaaattttacaaaaaaatttacaagaataatgttgtaagtgaataccactattagaaaaattaaaaaaatatttcaacatatattttttaaatacaaaaattaattaaaagattgtactagaaagtaaatggtaactctcaagaaaaaaaaaaaaaaaa

SEQ ID NO: 95840 - DNA, 735 bp, Cannabis sativa
gtaaagtgttgtagctcaaagttacatccaattacctatctatgccaatagagtaaacaagtcagtgaagtttctcgtagtagattgcccgtcagcctagaacgcgattttggaccgaccgtggatccatgctatgaaggcaataacatcctcctatcaacaagtaatcaagtttccatgtacggggaaaataagtgaaatccagggagatcaattaagtgcctgaaaatgttacacctcatcactaaggtgcaaaaagaagttatagcaattactcaactcatcacccccaatagagagacaaccctctgcaatcgaggggttacgggaagtgtccaactgttatagtgagatttctctcacctagaaactcgagacaagactcctatttaaaggacacgtatattccgatttccaatgaaagctaaaatgtccatgagagactcctcgaagtttaaacctcgcccaggataaagccagcgagatattgcgagtaggaccaaagtcggatcgcataactgtaactcgcatgtgtcgggacacatgcgagtatcctctctatacttctatgaaagaatagagatcaactctctataatgcgatttggtcccaacgacccaatagccttgatcaatcgatataaactcgcatgtctaggttctatcagctcgacatgtgatgtctacaagaggcgattacctaaggacgcagacattccaaacgtaatgataaccc

SEQ ID NO: 95841 - DNA, 571 bp, Cannabis sativa
tttataaaaaatagactaatccaaataaagcatgatacgagttcacgaagcacggtactaaaatatgaatttacagaccgtgctgacttaccttttaaaatattaatacaatacgatttatatttttttatattattgcgagttttttaaaatatgaaccgagccgacacgcacatatactgtatttgcagctatggcaccacccaaaaataatgataataataaatttaaatagagtaaatatatattttgttttaaattgccaacgtgaaagtatagtgacagtactagcttaattaatatatgcagtattattattttgacccattctttacgtttctaagaaaatatattttaattttatttactaaatttggattatttctaaaagttgtgtattaacatatataacaacatgttcaaagtattattacacatattataagtgagtatgacatgtcaaaatatgattagtcaaaagagtaattaataataaagaaaaattaaaaattattaccgcgattaattaacaatattttttcataataaatctaaaattaaaatatataac

SEQ ID NO: 95842 - DNA, 501 bp, Cannabis sativa
aagaacaccatcacatggagtacatcatgtcctttctcatgggactctctgatcatttttcacaagttcgaagtagcatccttctaatggatccactgcctgagatcaaccgtgtatttcatctcatatctcaagaagagcatcagaaaggaaatcttgccaaagatggtgacagtaatcagaacttagcctttgcattccaaggtgacaaaaataacactagaaagcctgattctgaaggggctaagacacatcaacccaaatgcaataggcctttctgcactcattgtcgtatccttggccataccatggagagatgctacaaaatccatggatatcctcctggatataaatcaaatccccctaaagaagccactgcgaaccaggttcaaaccagtagcaattcgaaaggaacctgtgatgaaggaactaccctatttccccaactcaatgctatgcaataccaacaacttctcaatcttcttgctggtcaacataatg

SEQ ID NO: 95843 - DNA, 764 bp, Cannabis sativa
gtaatgggttttatttagggcacaaaatccaacagagtataggttgatattatggttaatggtactatcgtacaaacgttctagacttgaagttagaacttgaagtttccttatcgatggatagtattacaataccctaaatattgctaaaacataaaaaactagggttccaaaattactaaaatcggtaaatcaaattcccaaaatgaaaaactagcttctaaggttcttcctggggaaatggttaacccgttcactgcaggaaaccctaaaaacttcaccatgaactaaattttaccccaaattttgccaaactctcaagaccacctaattaagctacaacaaatgtaattgaagaaataaaaatataaataagcccctaagataaaattcaccattaaagagcaatgtttgaactcaaaagctcaaatcttgtctaagcccaacaacaaggaacaaaagtgtaagtagataccttagtggggcgtgcgagtgaccctgcttctcccatggcgaagaagaaaagggtcgtctgaaagctagcatcgtcgagcacggtggtcgtcgaagctgatgaggagcctccttcaatcctggatatagtcgctgaaccgtgggcgggtgaagagttccacgactcagtggaaaacctggagaatgagttagggctggagggaggttcgacgatcgcagtccgatcccccaaatctgtaagctgggcagaggaggctgagaaggctgattaccagaccaatgcgagcgag

SEQ ID NO: 95844 - DNA, 681 bp, Cannabis sativa
ttttaaagtgtaaaagtaaaaaaagttgtattttaaatcccaactatatataccattaattattaaatatatatattaaaatcaatttttttttcttttaagaaatggtgtttacttatttagttttgtaattttaataatatttatttggtatttatatttaaaatcatacatattttatatatatatatttaataaataatggaattttagtaaaagcaaacgactaaagtaatacattgcaatttaattgggacatctcttcattagagacacgattaggattagaattagaaaaatgagtcaaataattagctgcttaatttctaaatcatttaaaaataatttaaaatcagattaaaaaaattgtagcatcacaattaacctttaaaacacctatgttctgtttcatccaccgctcggaagacacaacatgataaaaactgttgcagcgggttcattcaacttcgtagcatgatcactctattatgtaaagtacgtaactgtactactaacaaccccttcagttgcaaagaacttgttattcccaactactaacaacgatttgattgcgagctatcgaaaaataaagaagaaccgacaacgaaacaaaacaaaacaagattatgtcatatagacaaggctaaaacagtacttaaagccatgtcacagagacaatgt

SEQ ID NO: 95845 - DNA, 575 bp, Cannabis sativa
actcaaaatataagattaagaaaccaattatatttatcaactaattaaaatctgagacaaagaaattggttccttaaagtaatcaagataaaaacttacatacaaaaccaatttaataaaataaataaatcaaaaagggattccttgaattaactaaattaaaaatcagttcccaaaataactaaattaaaaaccagttccttgaatcaattaaatcaaaaataggtttctaaaataaataattcaagaaccgtcttctgaaatgacttaaataaaaaaccatctgcaacataaaataaagtagaactagttctacaacaaaatgactaaaaataaataacacacaataactcaaaaaccagttataattaaaaaaaatataagagtgaattggttccaaaaatattgatacataaattaaaactgaaatggttacacaacaaaatgagtaaagttaaataacaaacaataactcaaaaatttgttctaattaaaaaaaaaatgagagaatcggtttcaacaatacggaagcataaattatatagaaccacttttacaaccaaatgagtaaaaat

SEQ ID NO: 95846 - DNA, 714 bp, Cannabis sativa
  modified_base (497)..(499): a, c, t, g, unknown or other
aaatatcttcaataatggagaatatcaacaatgttatgtacatataaatagctacatgaccaattgcttgtaacacatcactagacactaaacttttggagagcatagctcgaagaacttttcgtaagcattgaaaataataaaatcacaatatagattggcttattaccatccataataaactactataaatttggtattcatttttttttttttctatttattattcataaacaatttacttaacatttaatactcatgtatttagtctgattgttatgatttgttttgaaaaaataaatccacatcaacattattgatttatactttattaagacaacaataataataattgtgtattgtttatgtaactcacaaatgttatataactacaaaaaatcttacttttagttacaataaaatttgtaactaaatgttaaaaacttgtgactaattataattaacatttttatgttgtgactaaatgtattagtcannnaaattataatttattgtgactagatgtgtttttagtcacaattctttttatgactaaaattaaattaatgacaacttgcatctaaatactatatatagtttattagtcacaagtaattttttattgtgactaaaaattacatttagttacaaaaaaattatattataactaaaaaagtatcactgtttatttttttttttgtatatgtaactact

SEQ ID NO: 95847 - DNA, 519 bp, Cannabis sativa
taatggtttaactcaaaagataagtattaagtagtcggttgctgaatccaactaatgccttgtttgctacgtacaatttttttttagaaacggcgtttttgctgcatatgaatcggaaagctgactaagattaaaggcatttgactctctactctctttttcttgattttttttttctttaaaaaaaaagttggttgttggattttattttatttaattatcatttgaattctttactttcacaaaaaaataaataataataatttgtattgttatctttcaaaaaaaaaaaaaacatggtcaaattagcatattctagaataaaataatttttccttaaaaaaaaaataaatcagtagtttcctatttatagatttcatcacacattaattctatttccaaaataaatatattgctagttacttttctatttaggaaatcgctctaaattttttgagttgaattaataaaggaaacataataactgatcatttgatatgataatttaaattagatatt

SEQ ID NO: 95848 - DNA, 1284 bp, Cannabis sativa
attacataatataatctttaactcgactttggtaattttatcctctttgaaaataactcaatgaagatggatagtaatatattgaaagaatgattgctcttgagaactttgtactgcatcaactttactaaaatatttttttaattataaacttaacgtgttacaaaaatgaacctaacatattacaaaattaacaaattaacaaattttatcaattaccactcaatgtttaaacttttaaaaaatacattcatatctcaaatcctcaattgctacttaatttcttcacaaaaaatatactctaaacttcaagacaactatttcacattatttttttttttgaatacacattaacttacacaaccacactcacacactcatatatatacatatcgatacttactttcacacatacatatttatatatatactacatatatatacatatgcatacacactacaaaaaatcttacttttactgacaacaagatttgtaactaaaagtaaaaaaattatgactaattataaaatatcattcttatgttgtgattaaaagatccatgactaaaggtattagtcacaaaaattacaacttgttgtgactaaagctaaattagtgacaacttgtaactaaatgttatgtttttttagtcaagtaatattttattgtgactaaaagtgactagatagtcacaaaaatttatgttttgactaaaaagttatcactaaaaattattaatttttgtagtcacacataaaacatacaacataaaaaaaaaactctgttgtcgtggctagctataaaattaatacaaatacacacatatacatatggataaaataataaaaatatatatatatataaaatatatacatgcactgatataaatatatatttacataaaaaataagtaattttagattttctcctgtcttgctttggtttgagtttctcggcttggagattttgaatgtcatagaccacggaggggtggtctgcctgggttgatggcagcgacacgaggctccatcagagctaggttgtgcgcgaaggatgcaatgaagaagaataataaagacatgttgagggaaaattggatcgggaatcaccattttgatgttcgagggagaaaacagaaaggattagtgttttcttttaattacgttgatattaaatatcttttagggatttttttaataatatacataatatcaacaatttatttacaaaaatgacattatacaaataattagtaaataataacgttccatgtcagcaagaat

SEQ ID NO: 95849 - DNA, 1810 bp, Cannabis sativa
ggtgaaacaaaagggaagggaagtacggggtactactcattatattttgctcatatatagtgcatttttttttaattagttattttttaaatcaacaacaaaataaattcaattattattattttatatctctaacaacaaattaaaataaattaaaaaagtcatacttatataaaaaatatttaatttaattaaaaattaaatattctttataaatacatttgatctatattaatttttgaaatatatatataaatatgtctgaattagatttaatcaattatttttacatgtaaattaacacatctgacccgcacaaatacaaattttatattttttaatacaattcaatccataccttataaaacgcccctaagtgttcggtggtgggttcactagctcagttgtttagtattaatattacttttatatatataagtaatataggtttgcaataattattatagtattagtaataaaatggaggagcttgattcgaaaacttggtaatggtattttgatttataagattagttttatataattaacacttttattatatattagggttattttgttagacggattaattaggggctagcttattatattatatataggtatatagattgtcttaggtaactatatggagataaaatgtttacgcacgtatgtgcatgaaatgaatagtactcttaacagtttagaatcttatggggaccttatttttgtaatgttgagattaactactattcatctttgtaataatataataattgtaaatatttggaaaagcctttattatatgcatgtattatattaattaatttacatatttgagaaatatatattattattggtggtgtttgtccagattttatgctactttttctctctcagctggtcaatcctataaatacgcatacgtaaagttgtaaaaataatattatttttattttttgttaacataacagtaaagtttcaattcaaagatttaaaaacttaacgtcaagtctaaaattgtagccttttgtataaaatgggttacaatcataatatctatctagaacaactatactctcctaaaggaataaacaaagaaaaaaaaaactactcatattgttgaattccagctaaagaaaaaaggagaaaaaaaaaactataatgcaattacaaactacacaaaaataataatattaatgatgcaattaattttggtacaactacgtcacatagtgcatatattgcatcattatatataattttaaggtaattaattaattaaagcacatcatttttccatgtaattaattgattaatttgacatatatatttatatcttggggtctgattgagttgatacttgatagaaaactaaatgctatctacttattaccttattttatcattatcattaaaacgtaaacctttttctttcccattatcacttatttttgttcttctttttattatactgacttgcacaatcattatttcaaatcttatatccatgttctccttttatttttagccaaaatcttacaatttagagtaattaatcttacaaatgtttatgtaaagcttccacctattctctatcttatttcctactcattttctttaaattcatattacaaacaatctgagtaatcttcctaaacagtactacctgatcatcaagagtagggagggaatgatcccataaaactttgttcttactatgcaaaattactataattaaatcacgtaaatcttcctttttgatcctcttgaggttttaccattcagaatccactttaacacttgatgc

SEQ ID NO: 95850 - DNA, 509 bp, Cannabis sativa
aatgtgtaacccatagccttgaaagttttggatccgaatatgtcattagaggtgggttcagctttcttttcatgtgagagagggatttccaaaagaggaaaaggtagctaaaaaggaaatcaaatgggatagttttgaccatagcaggtttgaacatatcaataattactttgagaatgagatagcctaggttgatgggtgtaacttttgctatcatgaggtgcagtgtaattgatctatggaatttatctcatcttgatgtccactcctaggtgcaaggttagccataatgaatttatgaagtattttggcttctatggtgagttgatgtctgtttgatctcatgataatgggactatcaccacaaaggttcctagaacactcatcaaagttataggttctatcattttaagagaaagtttagggtcaagcaaaataccgttattaggtgcttttaacaattcattgagcgagtcaatattaagttcaaaagctacccctctaagtgt

SEQ ID NO: 95851 - DNA, 2167 bp, Cannabis sativa
aagtaaccctttgcaactaaccttgatttgtatctgtccaaggttccatctacttttaacttgattctatgcacctagtttttatcaataacaattattcgtggctgatatgacaccaaggtccatgtattgtttttgatgagtgcattgttctcttgctgcattgaagcataccctttaggatcaagaagagtagcttttacaaatctagtgttggcaataatgagtttggaagaggatgtgttgttgacaagtaaatcttggatttggagagatgctactttgagacgtggttctcattagatgagttctaggagctgtagtaacatcttttttattttttggatcattagtactagtttcaggtaacgcattgggtatagtattttgtgcattatttgggacagtaggtgatatagtaggtaagtactaggtgcatgatgtgggaatagagacaggttgcagggtggtttctagtatagtattggacatgttaggtaaatgttagttgcagtgtataggatttgataaaggagacatatgatctctagtggaatgagatagtgtatttgggataagtggtggaattataggaggagcaaggtgcacggtttgggtttctagagaaggttgtgtaacatgagatgtgtttgggataacaggctacaatgtaggctgagaaaaagatctcaagtaaaacattagatgacaacaaagaaccagcaactggattagtgtattgatgatcaggtatagttgacaaaatagtagcaggaaaacatggttgagaagtgttgtttacctgagagggagctgtagcagtggtagcaggaaaatgatgttcattaaaaatcacattcctagcaatgtagatcctgccttcagagttctcacagatgtaccctttgtgattaggagaatcactaaggaacaaacactgctcagatctgaaatcaagtgtgtaaagcaagcagatccaatgggttttagaattctcataatcagatttggtaccaaatagagtttcataagagcacaagtaatcaagtacagttgtggaaagcctgattatggtgaacactgcactctgaaaagccaactatcaacatgaaaaatccaaacctgattgagccaaaagagtaagtccattttctgttgcttttcctctactcttccattttgttcatgatcatgagggcatggatgagtaaacttgatcccttgatcctttgagaaccttacaaaggtctatattcaccccagtcagcttgaacacctttaatggggaggttgaactgatttttaaccatactcttgaacttgaaaaacacatcaaatgcttaagatttaagggtaagagggaatatccatgtatatctactatagtcatccataaagtgaacatagtatttaaaaccttctttggagacctcatgagtaggccctcaaagatctgtatgaattaattcaagaggctaagtggcatgatttgtggatgaagagtatggttgtttgtggctttttcctagtttacaagctacacaaaattgaagatctttaagggaaccagtgtgaggaacaagttttaaaattctagacagtgtagtaggtccagggtgtcccaatttattatgccatgtgttaatgtcattttgtaattgagaaatgaaaacttgagagcaagattctggaaagtattcaaaagaagaatctttatacatagtaatcaagttacaagatttcattttattatagcaagaacggaaagatggatcagtaactgttgtaagataacattcaaaagcataagcaactttgcttgaaccatcatctggaagcatgtatagaccttccttgagccttcctttaataagaactttccccgtgtcattgtccttgacaaaacaacaattctttaaaactcaagaaaaatatcattgtcattagtgagcttatagacatacttataagattctttttcatctcaggcacttgaagaacaaaatttaactgtaataaattattagaggaagatggtaatgttgcagaaccaatgtgagtaatgagcaaacctttacaatttcccactgctatagtttatgttccagagtaagcagttgtagaatctaagttgtcatgtccattggagagatgtgatttgtggctc

SEQ ID NO: 95852 - DNA, 651 bp, Cannabis sativa
tagccggaattccagcttaacacattcataactcctggcgggtctgtccaacagaacccgccccattcaagttttttgggttgacaattttctcagcagacattgtctcattctggcccatagtctcctcattcaagtcttttgaattgtcattttcctcaattaccattgcttcaaattggcccacagcaggcccaataactttttccaaagtggttttccttctcttcaaatctagtatcattagacgattagtctttgccacctcatcattagagattaccccatgagctgttgacttgtcatttaaaggactttctatagttggcactccttgtccacaattaatactgatatcctttccaggattttttcctattcccccatatttcggctgttgactaggaaaacttgatatggtatcattattattattaaccaaaatcgtgggagagatcacaggcgatatctcctccttgtccgtcgtagtggtggtgttcgacgtcgccgccgcaggtttcagagctactcccgacttcagccatttggatcctatagaataatgccgtcttctaggaaccgctttcaaatctaaatcatagttctttgtcaagagatgggctggtatatcaaataacttatcacagaact

SEQ ID NO: 95853 - DNA, 2381 bp, Cannabis sativa
tagctattatatataaatagaaatgtctcacatctttcaaatattacatatatattatatctatactaactagctaatatattattacaaagctaataatttaaaataagaggatatatatgtcatataaaacaattagtggatctagtttgattataggtttaattccgtaaaaataattcattattagggcgtgatagggataaaaactaatattttttattcaaaatgctaattaatatttttgtaaagtaattatttagttttaatattttgtgtgttgaatttattaattttaggtaccaaatggaactgggttcattcttggaatagcacagctggtactatatgcaatatacaaaaatgcaaaaccatctataaatataaatgttgtatcagattcagatgctcttttggaacaaggatggcatacagagagcctcattacctcttcatcccccactaattaaattaactacatacatatatgtatatttacttttatatatatatatttatatatatgagattaattttcatgagaggtctgcagcaaattacacaacttaatatttggcttgtttaaattttatttgacaaaaaagaaaagggaagataagttgcatttagattaaacacagttttggtaattaatcaccttatttatttctttatttaattcattatattgtgcatgttgcggttgtaaattgtttttaatttcatacgcttggtttaaatatatggtttacgtttgttacatagatatatatataaatgataataataatattggatgatgcttcatgcttatgtgcaatcacaaatatgtttcttattacatgtatttttttagtatgtgttaccttatttttatactctatatttagttaattattttatattccttttatgaattgtttttcttctaatattccttttatgtattgatacatataagcaattttcattaatttattagcttcgtaagtttctttgtactgatatttagtaaaccttatttattattattgtttttagagaataattgaaaaccaaatcaaggttttttaattgttgatttaaaaatctagactagacttctaaattacacctgtttgctaaattgatgataatgaaaaaataattaagtaataagagagatacaacaaatttatattagttcactcctttatcgggacattaatggagctacgtttacttcaaatttttattttttacaagatggtattatagaaaaaggttaagtgattgcactgagaatgattatggtaaatctcttgagaatcgccggagactcattagccacattctggaagctcttccaggagcttaactcacattttgctagctcagggaatcaagagctggataaaatatacaagtccggtcgctaggtcctggacctgagtcagtgtggatgcattaaatgcaacatggagaaaacatcgcaagtggtcttaaaaagacatgtcaaaggctttaaactcattattctgtgattacacactgccccatatgacagttgcataatgaactatcacatcaatcaacaagggttaagaacctatctcaccaaacacctagagaaagcctatatagcataccaaaaagataaaaatgtcctattttccaaatttgagaacttgtataactaatgctcgtacaattacgacaatagtaactttttcaccattttaatgaggatatcaatatcccaaccacattttaagaaagaggtcggaaaaaatagagtgtaaaaaccctctataaataactactacattaatattagtgactcgtggactaagagtcattaatgtccaaaccacgtaaaaatctttcgtattaaattttttataatcattaaaacaactctaatatagttgccaaaaatcttggtctacaataccaatctgcatttttaataaggaatatttaaaaaataaaaaatacggttgtatgacattttaaatatttttacgatgtttaagattttgtttacataaaaatatagtcttttgatatatttttatgttgtactcttattattttgttattgattttttgttatttttgtatattattttttatgttgttttgatgttattttgttattattttcatattactttcatgtggttttattattattttattgtgtctttataaataccgtaaaaaatattaaaaaagaacattagtaaaaataaaattttatgtaatttttcatttttaataaacataaaattgttattaaagaaaacaatactgtcattattttttaaaaaatatcatgggccaccgaaatacaacgcccaactcttgggcctgaacatattcaacaaaacgttgggccc

SEQ ID NO: 95854 - DNA, 1335 bp, Cannabis sativa
  modified_base (169)..(169): a, c, t, g, unknown or other
taattataattattaaataaatagtttttacatttattgtattgaattgaaaaatatggtattattgaaaaaagaataaatggttaaaataaagtggcaaaattgtatctagggattggtcctattagtgggtggccctagtgttgattttttcccaatattttattcntttttaatccatataattcagccctaagccctaagaaaatggtttatagaataattctcctattttttatggcacaacccatattttcttatggtcccgtatgaaacaacccatcgaaaaatatggatagtatgggtgtttattggatcacatctaaatggatttggactcaactgatccaattcgatcttatccaatcgaattgagtcatccgattcgatccaatagatgtattagattagatcgattttaaccattagatgtattagttgattttctattgaattggatttggatccatccaatctattttactatttaagttgatttcatgaaaaagaaaaatatattaaaacataatctaaaacttaataatccaacatacataataattattagtttagtccaacctaattctcatgattccataataaaattgccaaaaaataaaatttattcaatacgcattgacaattttattagcgtttaagaagataagaataaatattttaaatgtaaggtttttttttcattaatctcatgtgttaaatatatatcaaatcaattaatatatatttttaaataaaatacatcaatatataaaattataaatgtattttaaaaatatataaatataattagataataattggattggtttggttatcgattcgattcagttatccattagatgggatgtcacatccaataatcgatccgatgtgattggatttttaaaagtaaaaattgcattgcatacccattttactttatttatttttatttttaccttcatttctatattttttaaaatatacctacttttattaataatgtcctcattataccctttagattaatataaatcatgtgctacatttaagtagagggcaagggggtaaattttaatgaaatacaatatgaggatatttttgattaatggatgaaaaaaagagttattcctcaatttatgcctttttaaaatttacattcgatctaattataattgattatccaattttattaaattgattagaattggatgtatttgaatgagatgactctgtgcacatcgtaatgggtcgggttagcaatgttgaacaaagaggaaattacactctatactatttttatattgttctcttttatttttaccctctttttta

SEQ ID NO: 95855 - DNA, 724 bp, Cannabis sativa
gtttaatataatagcttttaggaatatcactggtcaatcgcaacgcgacatgttgaggaaatgctaggcactactggtgcctaatagcaatgctcttaagagaatggctaaaaggcacgtgacgcctaacaccttcatatgtgtcaatattgttattggtttaattaaatatcatgttctatatagtttaatataataacttttaaagagtatcgttagccaatcgcaagacaacatgtctagaggtactacgcactattagtgcccaatagcattactcgagtatttaagtattgtctacccttatggcacgtttactaaattgcaatcaaaatgggaataacagaatggctaaaatgaaagagaacaaagtattaaacaaacggaatcaatattttattatgttgtttactaaattaattggaaataaaatcagaatcgttttattttgtttacataattaagaaaagtaattggaatggtttagatggattaaattacccttcacaaaaaatatttatttttttatgtctttattttaaaattgacttataaaaataaaaaactaaattcataaataattagagagtatatatgttaaaaaattaaaaaaaatatttttttacccgtaatgtcaatacttgacaaattgggaggagaatttctctcttacttttctccttaatttaggtaggatcactaagtttttccattactaagtgaa

SEQ ID NO: 95856 - DNA, 779 bp, Cannabis sativa
tgagacataatatagtttggtagtacaatactaacatattaagtcttcctttatagatctataaaacagagcagatccaatagatcaattaagacatacaattgtaataagacaatatgtattggtaaaattagagaggagacctaacaacaaaaccctagttgcactggcctccttatcaaaagcttcggtttactaaaaaatttcacacttctacttcaactaaacataattcaaatgttaagtccattaattatagtatacccccattaaggggtgttttagtagagcacccaagagaacttttagtttaattttttttttatgattgtgtatgttatagttatttagaaccacttgtagatttttagaaaatttcaaataatttactatgccaaaatcaaaatttacatattttgttatacgcgcgactgctttttcttatacgcatggtaagtaactgtttaaatcttattgtaaactattcagaattttcttaaaatttacaattagtcttaaatagttacaacgtatacaatcatgaaaaaaaaaattatactaaaaaagttttttagatgtcgaaaagagataaaaaaatctattagaacaatcttttaaaagagtttactagtgaaattttaaaactttaatgtaagatcatataaaaagtctaatatatattaataatactaaatatgaaaaatagagatgcatgagttgacaaagtcaaaagcagagtagtatgtccatcatcgtcacctgaacttaggagggttttc

SEQ ID NO: 95857 - DNA, 1278 bp, Cannabis sativa
ttttttttttttttttttggtctaacatgacttataaataataaatcatgagaataaccttacaaaaaaaaaaaaaataaatcacgataaagattaataactatgacaagcaaaaatagtataaagttacatatatattcaccccacaagtattcaactaatacatttcgattttcgaatattgactaatatgtttgatatgtctaactataatttaagtttgaatgtatttaattttatttttttattcttacaaaaaaaaaaatatatatatattttaatatatatttaagtttgtaatgtttttattatgtaatattaaacaatatcatacaaaatttaattcttatttatttaattaaataataatagtttataatattattgtttttcacatatagtttataatatttacaatttaacattcacaaaataaattaaatttttaaactttataataaaaataaatatataatataatgatacgtttgagcacttgaataccaaccatcccattattgtctcacataaagacaaatggtctggaacagaaaaacatggtgacaaaactattggaataaagtattaaaaagggttgaaaaacagaccaaaatcaatactattgtaatattgttattagtataattatttctataagagtatctctaatagggcaatatttatagttgtcaaaatacacacatcattttaaaatattatttgttttatatttcctctcattcacgttaaatttgttacattttcttaaaaaaattactccaattgttgacaactttaaaagtgtccactatagtatcatatcacattaaattaataattttgtaggtaaaaaataacttttttattataaaaaaatgacatgtggtcattctctaaattgagcaacacttaatataaaatttgtgataagaccactttaatgagtaactctcttggagatgctctaagatactcatggtgatgaagtgtcaccctataattgattaggattttctataatatatattaaaatgaaataagtgagatctaatattaaattatactaatagcaatattacatgtgctaaacactatgagtggcctttaacatttctcttaaagattatagaaaatcccttactaattataaagtattacctcataataatgctagagatcttagtgtcccataataatactcttatctaaaacaataatggcacgtttactatacagtaatcagaatcggaataaattaatggagaaatgtaacggaat

SEQ ID NO: 95858 - DNA, 683 bp, Cannabis sativa
ttagcttaactatactatatggttttattgacttgttcgtcgcctgcttactcataggactagcccatacttacatcttaggaactcgctagtgtgattgagtgggagcattgatcataaataggactgagcatcggttggtttggtcatttttttctatataaaaatctaataggttttcgatctggattggtgcaatctaaaaactgaccgaccaatccagaacctatcttaaaatcgaccgttttgaacctcagtttagtctatttaaactgcccaaaccgaacttttttttaagaaaaaatatgatccaatttattctataaacatattattctacattttacaactacaaacatacaaattaattgtttaagaactaattatcttattcttttaactttaatattataaataataatatattattagtatttataatacataaagcaaaagaaacttaataaattaatatatatgtataatggccgcttatgatttttttggtcggtttattaccccaaaaaccgaatgtgttcaatggcaattttaaccattaccggtttttttggtttttgattctgccggtttcggttccgacggtgttcggtaggtcaatttaaacagttttttcagttttttggattttatgctcagccctaatcataaatatagaatttata

SEQ ID NO: 95859 - DNA, 605 bp, Cannabis sativa
ggttcagtcgatggtagtggttactggtttggtgattccttgaccaggattttatggttcgtgtctaggtattttgcggatctctcgagctttgtttaaagagaattagggtgtggtcggtgaaacatgggttgttgcctgttggtgtggttcctttggtgattagtgccatgtttaaatgtggttattacaatacctaccaacaccaccatgctttgccaccacccacctaccatcgccactacacctctaatcaaaaaatcaaacacaaacattaatcacaaactcatatttttttcaccattaccaccaccccaatattaaaaaaccaaatccgaactcaaattccaaatcaaaataaaaagggtaaatcaaactattctgccatacataaatattaaatttaaattatataaaaaaatagtttttttatttaatgagggattttataaaatttctaatcccaaatgtcaattccctgtcagatccgacgagccctctccaatgcactcccttaaaatagatatattgatgcacccttatctgttttagcacctgaaataattttctagtcaaattttttttttctcatatacgttatagtt

SEQ ID NO: 95860 - DNA, 574 bp, Cannabis sativa
ttcttcgtgttcagcaaggtgtgaaatgaggaagacgatacccaagggtctgatatataaccctatggcgtcggttattgtgtagtaaccggctccataggtgccacgtgtcgaataaaggcatcacctatggcgtcggttaatacccaataaccgacgccatagggttattaaaaacaccctcattttccccaatccccaaccgacggcatagatatatatatattctatacctacggtttttttacctaaaaaactgcctctaaatgtcaatgcagatatttttacaccctttagcttccctttttataaattgggttgaaaaaagggaagctaaaggcctacattgtagtagtggcgattatgttacgtagttgtattatagatgaaattttatgttattcatattttatatccagtaatagtggaatgaggcgttcggcctacagagtcacttagaaaggatatagtatcttagaattaatgggccaatataattatacatttgaaattttgaattattttaggattatagtttcgactattttacccctagttggtttatttacttatt

SEQ ID NO: 95861 - DNA, 569 bp, Cannabis sativa
tattcctgaaccgagcctgattggcatgtttggcaatagctacggtgaatgtagcaatgggcatacctgcaatagcagggtttggatggcttataggcaaagtatcaactgtatttggtcagacaatatatgtccagatggacggtaaatatcacctacagcacttcctatgctcctagataaaacgtccatagccttgaccttcgatctggccggggtaataatggtgttgcagttcgggttccagggaacatgtatgttcgctacttatatcccaatcttcaaagcttgaattggagagaccgccactagataaggacaaactatcacgaagaagaaggtgatcctcgtacagaagttgaagaagatcctagtcgatatgacgttcgcttccctaaaactcacgagggcttatctataataggtaggacacaagatgtgtattttgctgggataacaaacagaaacagattggctatatcgaccaggtccgatcaaggatcaaaaatagaaattttgcatgatattgaggtttacaatctagaatttcaaaacttcaaattaagggt

SEQ ID NO: 95862 - DNA, 987 bp, Cannabis sativa
ttttattttcctaatggtatatttcttttaaaaaaataaaattatgaacaaaattcagtatttttatttttaaataggaaaaatcaaaattttcggttaaaagtcaaataattgtgtaaaaataaagaacttatcgaattagaaatataataatgctaattaaataacgggtctctcatattcagaaacggacccacttgtgttaatgtggggctatagccccactaacaaaaatattatcttttaattttttttaatttgataattatagaccaaaatagtagaaaagctcccacaaaattgaataaatctaataaaagtgattacaatatatataaatattttttaataataaaaagccccacaaaaaaaaaattctcgatctgctcatatttctatttagtaattattacgaaaaactgctttagtattggacaccactagacaattaaaatcctaaacaaaaacaaagcaatttgcttaatctcaattggattctatccttatatttctattcttcttcctatttgtagattggcttgtaaggagattcaacttggttggacagatgctaacttggtaagatatggtgatgttaattcaataatgataaacaaattatgtctttttttttttttattatttcttttaaattgaatattcaaagagatgagtttataagggctttgaatgcagaggactctagaggtgataacaataatagtgagtggaacacaaatgttttccatatttgctatccatggtggtgtggaggaagctattgctcatgaaagggccagaacaggaagagtttgaagtccctcatattgatcttcaattaacaaatgctttcatatattctttcattctctaagttcatgaagattgatgcttataaattatatgtaacttttgttctctctcatatttttttcttttttaaagcaataaagttgtaatgtaaattcttttgattttaataaaaat

SEQ ID NO: 95863 - DNA, 1763 bp, Cannabis sativa
tatccaccaaaagtgaagtgaatttagctcacaccaaatctgcccatggtcgtggatcaggaccatctccaccaaaccccacatcatccaatcagtcacgtggtggtcccccctggtttcacctacccaccacaaagcttcaatggtccccctagttttccccaatttccatccaattcttctcgtggctcttcccaagctcgtggacagtatggtaatttcaggggtggtccatctcgtggcatgggcatcttttcggtttggggccaaaggccacaatgtcaattatgccataaaatgggtcacacagtgcagcattacttttaccattttgacaagaacttcactggccctgaatcgtttcaataattcaatggttctgctaacattgttgagttgcaagcctcacttgccacagctcaaaccgtagcaaacccctgctggtaccctgatacctgtgctacaaatcacctaacacccatagctcaaaacttgaacaccaacaatgagttctttggagatcaacaaatccacatgggcaatagagcaggtttttgcatattaaacatattggtcattcatcttttatttcactttactcatctcaacatatggttctcaataacttgttgcatgtttcctccattacaaaaaatctaattagtgtatcccaatttgcccatgataatagtgttttctttgagtttcaccccacttattgtgttgtgaaagatcaggttacttcgaggattttactccatggaaacttgacaatggcctttacaagtttgacacaactcaacttgacttgcttgcctccagcacacaacatcccagtatgttaaagagtcaagattctcctagtcttaattcttcttcctctcactgtaatacacacattggttctcacaataataactcttttaatttgtggcacaagagacttggacacccctcctcaaggattgtccaagctgctatctcctcttgtaacatcaaattgaatgataatagtaagaaagactttaatgttactgaactgtgtcaagcttgttgtttaggaaaattgcacaagttaccctttcctatttctgccattgtttacaataagccattacaacttgttcactctgatctatagggtccagcccccataacatcatctaatggaaataagctttgttgatgccttttctaaacatacatggctttacttattaagaaccaaagttgaggctctatccactttcataactttcaaaaatcaagttgagaaccaactaaacactcgcattaaacttatacagtctgactggggttagggagattaccaagctttcactagttttttacaagaatgtggtattctacatagagtgtcatatccccacacacatgaacaaaatggtgttgttaagagaaaacataggcacattgtagaaagtggccttacccttctagcacaagcatacttacctataaagttttgggatgaagcatatagggcatctgttttcctcataaacagaatgcctacagcccaactgaaatacctctcacccattaaaatcctttttcacactaaacctgactatgatatcctcaaggtgtttgggtgtctctgttaccccaacctaaggccttacaataaaatcaaacttcaatttaggtctcagccctgcacttttataggatatagtaaaacacataaacgttataaatgcccagctaaagatgggagagtgtacatttctagagatgtt

SEQ ID NO: 95864 - DNA, 533 bp, Cannabis sativa
tgttcatactttttattttataacttttatttttttgtgtgagatagtcacgactagactcaaatttagttaacgaaaatttgcgttaacattaatatatttgaagaaattattttttaaattttaatattttcaccaagattaaaatataaaataataaatattgcattcttctagtgaaaaaatgattaattgggctacattaattttattaatcacccataatactatcatttacaatgatttctaaacatcattatatagccaataatatattatccttaatagttttcaaattaataactcattaatatgaattaaattggcaaagttaattaaaaaatgtaaaaaaaaaaaaaaaaatgctcgtgcattcctgtatatattgatattaattcttattaatctcctatgcttttcaaaccatgtcaattatgcacaattcctcataagaaattggcccaccctataaaaccacaatgccctatggctgagcaacttctgatatagttgagaaacaaccaaatttccca

SEQ ID NO: 95865 - DNA, 540 bp, Cannabis sativa
tttggtcacccactctcataggtttagtatacgaatgtttggaagagggagtgggtacctgatttgttttaaatttgctccacaggtctctcttgcatcagattagaagtcagcttgttccatttcatcagcccaggaagctggtctcgaatcctctcgaacagcctgctgcatctctcgaacattctgctccaaatcgcctctctccgttccattctctggtgctaattcttcgattgagtcatgaaattcctcacttaactctggttcgattccctctatttggcttaaagggacatcctctcctgtgattttgacctctgtagcagggatggctggctttcggccaacccttttcttcttcaccatgggagaaaaaagggcaagctcgcacgccttgtctatttattctatttattactaaagcgaaagttcaaaatatgatacttatgttctaagaattagatgtaaacaatttaatggaagacatttaatcaaagaatatcatatttttgcataatgaagaaccaagtgtaacat

SEQ ID NO: 95866 - DNA, 597 bp, Cannabis sativa
cccgagccacataatcctgatcttcctcgtcggctgggacaggaacctgctaccaagaagaatacttgggatatttataatcacaagtaaactccttgtccctaaggagactcacagacctcaggttgacctcgttcaaaaggaactcagatgataaaagacgaaagggaagatccagcaggagcctacatcgttcagccatctcaggagtacgaactggtctttttgagacagttgttgaaaacaaaagaaaaattaaaattagaaaaattagagtaaaatacgtggaataatttaaccaagtcttaagcaagacatcacttacgtattatgcgagaggtgattgtgccaattggggaaagaccagtcgtctagaaagattaatctttacaaggagttttatttggcaaacctaaaatgatcttacgatcacctgtgtgagtcccaagatagtaaaaaacccctgttacattgttcctcgcaagaatggtcttgacggagtaaagatgctctttttctaggggagtagggcattcccaattcaaaattttttacagattcttcaaacttgcgaggattttgttggaaatagaattt

SEQ ID NO: 95867 - DNA, 661 bp, Cannabis sativa
ccaccctaaatgcgtgcacaactaattcatgcgtagccataatggctgaatgatatgcataaataagggacgccttaggaaaattggacagtaaactaaaaaatacatcaaattgatagcttaaaacaatcagactcaaaagaaaagagacgaagtccaatttcgacaaccaatctaatgcaaccattattaaagctacaccttccttatattttaattttacacacttaattttctgatcttatttttttggtggcaatatatttacttttgtttgtaaatttgagacactaattaaattttaccatatatagtatttaaattgtcattgtgtacacatgtgcatacgtaacatgtttttattggatttgaatttttagtgtcacgtgtacagttgttcacattgaaaatttcatttagtatttaacaataaaatttaactgacacttcaaatttacaggcaaaagtaaatttaaaaggtattgtcacaaaaaaaaaaaatcaggaaattaagtgcataataattaaaacataaacaatagatttcaacgcaaattcaaataattaggatttttgtccccaaattttgacatgtatcaaatcatgtcccttgaacttttaagattgttaaaaattctttatgaactattgagattattaa

SEQ ID NO: 95868 - DNA, 598 bp, Cannabis sativa
atacacttaagtggattctgaaccgttaataatatccccaaatatcactgaaaatatttgttactgttatttttaccgtaaaaatattttattttattttattttgctaccaaaaacttcaccattttcgaaactaggttagagttataataacttagattaaataagtattttctttgatctcacgcaattcacatgggttcgacctcattcttcataatctctaactacaataaagattcgtgcgcttgcgagttcacaatctgtcgaggttagcaggtcatgtaatcatctgatattcacgagtgtgtatgtgttttagtggaacactttttttatcctggtggttctaataagtgttaaaaacaaccgggataaaagggtttcacactgaacccttttatctcggtttttaactaataaccaggataaaaggttcccctaaaaacattaatccctatttggctaaccaataaaaatcgaaacttgaacttatttttttacctttgatatttttaacgttctaccaaatagggcccttgtctaaaaaaaattttgctgcatatttgatgcaccaaatctaaaagtgagataaaaa

SEQ ID NO: 95869 - DNA, 859 bp, Cannabis sativa
gacgggaacttggaagagaagaccagcggtggttaaagcgactgatgagaaagataaggggaaggagacgaagccgttttgggggaggccaactggcgagtaactattacaggaacaggggacaaaggacaaattcgagtacgagaatgtcagtaatagtacaagtagtggcaatagtgtagtgatggatgagaatgttggtgtacaacaagaaaacatggcaaatgaaaatttgaacgtggagaacgagaatacccttcaaattcggcctcatttattggagctccctagcctagactttgttaataacggtaacccagattgattcctgatgtagggccttcagttgcacaaactttggagataccacatgagtgggtgtgtaggtccgaaactcctcacctattccatgagcccatccctctgagctggcccaatcatgttgtggatgcccaacaaatgttcttaaacctatacgggcctgagttcctaaatctatacaaggcccaacagtccctcatctcaaaccccctgacttatctgctatgatacttcatatcttgggaaagaacaggaaaagaaaggctcacacctggtatcagccatacccgacagttgcaaacttcactcctccggaatactctgagaaaatagacaatcaaggagatacttagaatgatagaaccaacaagttctgtattggtttgggggacaaactcgcgagtgccactactagcagagggcaaccgagaaagaacaaggagaagggcaaagatagcgccaaccgcagatgtaacatccccgcttcaaacctccattgggtcattacacccacgtaatgaatggctcttatacacga

SEQ ID NO: 95870 - DNA, 690 bp, Cannabis sativa
aatcggtataatgataaaatatgacattgcagattgtttagcactttctttttcgtatgttacgtttcgattggttagcgatatttcttaaattatataagatccgataattagttggaccaataacgatattgacacgtaagaaagtactagacaccgctgtgctctttagcatttctcataaaatattcacactcatttctttgctctaattaggacaatcataagggatcctattcctattcctacattattacaatcaattaaagcaatgaaagatgagagatatttatcattttattataaaatgatgttttctaaattgtcgttcagcttttcaaaagggaaattttgggttatgtagggggattaaggaaaaaactatagtatactgtatactcctcaaaaggagtattttggaacattctaaaaagttttttagtctctggttttttataattgtgtatgttgtaattatttaagaccaattataaattttagataattttaaataatttacatgctgaaaatttagtttaaatattatactacctacatgactattttgtattatacatacagtaagtgactatttactttaaaatatttattgttaggctatttttagcctaagtttcgggtcacattttatagttgtttttcttctttattattatttttggaatagaa

SEQ ID NO: 95871 - DNA, 617 bp, Cannabis sativa
catgaatctggatttcgatattagggggagttgttttgatcgaataaaacagaaaataaatgtgcaatttcagtttttccacagtttttctgatttttttttttgtcattttctgtttagatcattgcaggtcttcttttccagttgatttcccaggaattaatggttgtatttccttcgttttggtttcattttagttgttttgctgttttgaaacgatcgaggtatgttcatcttcatcgttcgctccgtgcagctgaaggtttagtgcatgtggtattattgtaaatatttgtatgtggactatataaatatttaatgggccggcccatagtatttttgtaattttttttttcgttttttgtatttttctgttttcttatttatatatattttgttgtatattttttttatatttttaatttatttctataattgaaaatatttaattttaattattttcagattgagcaaaaggacttttaacaacttggagaaggtgtacacaaaattttttttgtgaaatgtatgttttattaatgtgtaatagagttagagttttgatctcacacacacctttgatggtgtggaatcatcatgagagagagagagagaga

SEQ ID NO: 95872 - DNA, 531 bp, Cannabis sativa
acctccatcgtcccccaaatcaagatttttatcttgtcttgggatcttaaggttcaccatgagcttctatcggaacttgttcaatcacaggttcccacataataatattttcaaagtaatatgtattgtacatagtgagtgagaatatatatatataatttaaaagtcttcatgttttgaagtgaggttactaacttagctagttctttcactgtttgttttctcattgtgttataggaacttacttgtaatgatgcattctagcttacaatggttacataattcacagtataaagatatatctaaactgaaatcttcttagggatgtgtgattatataagtttgttggttgattagattttggttattcaaacttgatggagctccccacaccacaaagacctaaactgccttcacgtcagcctccatctgctgctgaggtacctgtttaaggacagtctgtacgaggttgttgttctccatttgatggtgcgtggaatgaatatgaattttgggtgggacacttatcat

SEQ ID NO: 95873 - DNA, 756 bp, Cannabis sativa
taattctatcttgttgtgattcttttatcactcatgaaatgagtcatccctttttgtgttatctctatatccaaagttgatgtaattgatgtaagagtaattaaaaaattattcaacaaaactaattaaaaattgatcattacctaaaaaaaattattgaccattataaaagtaagtttataaatataaataaaactaactataaaaaaattactgaattagacaaaaattaatcaaagtaaattcaaataattaaaaacatatatgaataattagttgtgatattttgtttatcttttatattttttaattataaaacttaaatagatggggaatggttataaactaatcaatattttaaagttaaatctttaaactaatacactaattgagacaaatttgaaataatttaattaaaaatataaattatcttaacaaaaatttatttatattttaaaaaaaaaaaaaatcttaaaattatacttggctattttaaaattataagtatttggtttgattattttaaaaatagaaaaatagttaattattattattagtggaggtaagtaaggtacgtaataaaaattaaatttacaaggaaaaaataaataaaatattgaaaaatagagtggtatagaaaaaattagagtgctattattagttgagtaaataccattttagatcagtattttgaaaaaaaattaccaattggaccctctgttttgttaaattacaaaatagactctgtattttcta

SEQ ID NO: 95874 - DNA, 775 bp, Cannabis sativa
  modified_base (83)..(83): a, c, t, g, unknown or other
aaagtgtaacggaaggtatttatgctgccaaaattttaacttaggtattaaattgcaaccgaatgataaacttaggtatttangccgcaaattactcttaaaaatatgcacttgtgccgctagctttgctgtgtcggtagattcgatgatgtccttacaccgttacacgtgttactgatgaagacatcgaaccaaatcctctatggaggtaccaaattaaattcaatattactattccatcagaaaaaataaaatcaataatactaggatttgcaaataaaacttaattgttattatacacaatgcgtaggttggaaggtagaactttattaacttgtggtctctagataattaatattacttctaaattatacacctcatagagattgaagatcaatttttactatatgtcaacagcttcattttatcaatagttaattaaatgagtttagagaaaaatagaaattacgagaagtactaaggagactctctatcccactctcttttgcactctctctttgatgtaatgacaaatgtcaaattttgagtaaggtttgtttttatttaatatttagttatgatattctaatattattacaattatgccattctaactaaattattttataatgactagttatttattataatctaatgactagttaatgacaaatctcaatattttttttaatttgctttactttttacagtaaaatatatttatagataaatgtttgaactattatttagcttatatatatacttatttttacta

SEQ ID NO: 95875 - DNA, 637 bp, Cannabis sativa
tcaacaaggtggatcttgttttttagtagcccattataaaagaacttcacaattaagcgtgcttgatttggagtaatttcaagatgggtgacttggtctgtagggtcagtcgtaagtccatgaagcagccaaagtgatatactcgtgtataagagccacaatttcatgagtgtaaagacccaatacaagcttgaagtagtgacgtacaaattaatattattattattatgggaaatgacaggtgttgaaacatgatgagctgttagtagtaaagattgatgagagtgacagtttgaatttttgctggttagagcaacagtatcagtactattcagtactctagattttcatttctcttttaaccatattagggttttgcaatcctctctattctaaaatatctatctatcaatactattctgcttttggtaataattaactttggttttgatttttttttaataccaaaaaattaatctttaatctttctattaaaagaaaataaatactttatttatgtagtacagtctatttttttaagatatattccatcagtctaaaaattaccccaaaaattaatatatattttttatctatttacaaaaaaaaaaaaaattatgtatatactgtagttatt

SEQ ID NO: 95876 - DNA, 1391 bp, Cannabis sativa
  modified_base (345)..(346): a, c, t, g, unknown or other
cgatcattttaggatagtttcaaccctttggtcagtgtcattaaagggatcattttgagtaaatttagtcaaaatataactgatataattgaggtttcctcgcgttattttttttttcaagtaaaaggtaaataataaagagaaaggaaaatctaaaaaataccaaaatattatacttactttcaaatattatatggacactagtattatttatcaccttttcttagtgtacgttatgattagttaaggatattgctattaggcaccagtggtgtctagcacttttgcgacatgtcgcgttgcgattggttagcgatactctttaaaagctattatattaaattnnatgggacccgatacttaattagaataattatgatattgacacataggaaggtgctaagcaccagtaccctttagcatttctcttaaagatattctctagaactatgtagaactcgctatttaattatactaacaattttgttttggtgcatataaaattacatacacgtgtaatttttttgggtgcataatttaatttgtatatacaaaagtgtaatgaagaaggtaaagagaaaaccctagaaataacttgacagagaataatcactctttgcttctgtcaaatttgacattgctgccggacgggagcagcctccgccagcgtcccctggtcgccactgccagctctgagctacaacgaatacccataggtctacgctaccgccagcgcacccccggtccagatctccactcatcccataacatggtaagtcataagtgtcccccattttggcatattcaacttttggaatctcggttgaaaatatgtcgaaattcctctgtactgtttgtttcagattgtgccttttgagattcatttctttcttcactctgttcaggataatgcgttttttctttagttgagacttgagagttcatagaaatagtgcgcattattttatcgtaaatttgtagctgtcttgattgcccagatgctccttgtatgtgattttttttctacatgatgtttacataaacagttcacagaaaaaagggaagctttttattttttattttttaaatgttgtattcttggggtgctgttgttattttgttcaaataacatttttatgtatttttcatgtaagctaaaatggatgtaggtgaagttcatgagtttgacgctgttaatgtttctgtgtgtgtatatattagttttgacttatattgtgggtaaatgcacatgatttaattttcctgtgctagtaatttttgaagcaaattgagttaaaaacttaatagtaaactaaaacgcttacaatttgtacaaaaatgatctaaagaattgccgaaaactaatgaagaaagtatttcacttaggtctc

SEQ ID NO: 95877 - DNA, 529 bp, Cannabis sativa
tttttaaaagtttcatactacagtatactgtgttaagttttcactggtgttttgtagttgttccaccattgtttttaattattctgttttgtgttctactggtgttttataaaaacacagtatttataaaaatatttttgtgtgacactatttttgtaaaaattatcttaaattttaatatttttttgtaagttttccttaccataacaacacgtagaagtgagtttgttacgtatgtgaatttaccagttttgaattgttatattataaaaataccagttttttgatatatgttaaagcccaagcccaaagcccaaagcccactagttttaaagggcatcattcctctctgaaaaaatcttgctcattcttcgttgtatttttagcttttaattttgttgtaatttttattagattttgctgagactttaatgaaatttattgataatcaaattacttgtcgttagtataaaccacatcgaatttttgcggtgcgatttctggttttttgatttgtatttattgttaa

SEQ ID NO: 95878 - DNA, 595 bp, Cannabis sativa
gaaacataattatcaagatttcaaatatagtgaagctctttcagcgctttgataaccgtttctgagtcactctttaccaagacatagttatgctttcttatgcgagccgaatctagtgcaagaagacatagttatttttcttcatctgattgttgttatcgatttgataattttatcattactaattgtttgattgtttgattgtttaatgttcaattattttaattatgcacatttagtcgtaatttgtccacatatattatatatattcattaaaacaaaataaaaataaagggacataattaacttaagaaaacaatgaaagtttctattttttatccaaaaaaatgagctcctacgcctttacctacttattaatagaagcattcattttaagtcataagatactcattaaatagtatacgtatcttcaatcttacaactaataactacttgcacttggctttccatttataattttttagtgtgatatagagatctttttgagcaaaggtttccctaataataagcaatgattcctatgtgagaaaatattattattatttttttccacttaatttcttcaattctaata

SEQ ID NO: 95879 - DNA, 548 bp, Cannabis sativa
gttcacaatttcatattataggaccgacaagtatgtattcagtatttgaattaaaaatagaatatctattaaattgtgaaatcgaatttattgtctatgtgaccatcattttgccttaatttttgaattaagattttagaatgttaactaaattgttgaaaaagtattgcaaaatagtgttaactctttgacaagtctattactggtttggattagatgatcgaatttgtatacaaaaagaaataagaatattctctgatagatatcaagagataaaatccctttcatgtagttagatttaatttatgttaattgtgttgagatcttgggtttattgttcatattaaattcaatacaattttttttaatacttgatccttttttatgcttccgctgagactctgatatgaaccataaataccaacacttaaaaacaacatttacaagctgccatcagaattctaaactatctcaaaggctctataggataatgattatttttttatgtagaaactctagaacctctctagcttcaagcctgtattgat

SEQ ID NO: 95880 - DNA, 630 bp, Cannabis sativa
attgaatagtcacccatatataaatatatatatatatattattgatttttttagtcgttgccaaactttgtagagctcctccttttttttggtggtctttcgagagagaggcttcttattatcggtaatatatatgtatttttagttcatacatatatatatttatatatataagttaatagtagttgtaaaatttgacattcaatcaatattaatttttttattattttttagatgttggattcttagtgttgattgaagagcgcaaaagtagctatctttattggagaaaaatataatcactaaaactttaaaaaaaatttaattagtaaagtttgaatatcttaaatcttcattcgtagtgaagtaggttctgcgattaattttaatacgatcggatgtgtggataatttttgtattgttaatgttattttgtttgttttgtattgtttagtgtacattttgtttcttattttttgcagctttgaaattttcgagaacgtctgattacaattgttatgttgtcaaaatttgatagaattaagataaatttcactaaaaaagcataaatattagaagaacagtgctagatgaaggtaaaaaatacttaagtattttctatagcatttt

SEQ ID NO: 95881 - DNA, 2307 bp, Cannabis sativa
  modified_base (301)..(304): a, c, t, g, unknown or other
  modified_base (617)..(624): a, c, t, g, unknown or other
  modified_base (1324)..(1325): a, c, t, g, unknown or other
  modified_base (2207)..(2220): a, c, t, g, unknown or other
atcaatgatctcaatcctaagatggttaggttctagttcaattatattatttatgttctttgacttgttcgttaaagttgaccaattaaatcttcccgatacttacatcttaagaatatagtagtacaattgagtgggagcgctaatcatagatacaaaatctctagcttctataaatgcatagaaatgaaacgataaatttcttcaagcttggctaaacgagattaaatggtggagtactcgtttcaataattatattagtttactgaaatattatttacaaggagctaagtgttttaannnnaaaatacattgaagggtagaatgtaggggtgtacgtcggtcggtttggtcggtttacgttatattttatttaactctatgtaaagatcgagttacaaaaatttaagtgcaacccgcccaattaagaaaaaaaaaaaagtttcaacctgcccaatgaattggtcggtttagtcgggttaacctgtccaaaccgagcactaatgtttatttttttttacattcaatttttatattttagttattgtgacaatgagataaatataaagattaaatttaaagttcaaatcatccaccataaaaaaaatatagtagtnnnnnnnntctatttttttataaatatgtatataaattatataatatatagattatatataattaaaatatatataaaaaaaaatctcttaatcaggttcgttgggttagttcggattgattgggtgggttaatattctttttaacctacccaatataaagattgggtgggttatattttcgtcgagttttttggtttgtatttttcgtcggataatctcagtttagtttgggcaagttatcgggttggatgatttacaaaaatttatgtacacccctagtagaatgataaatttgtcgctactcgatgtagataatctatagaagatcattgattatttgaattgaaacaatgaataattaatagtgtatctatatttaaaacatatagagtattctatataattaagagtgtaattctgaatctacagtggagtcaggagaaattaataagatagagaatttggaagcttgattatataggcacatgatccttgtactagttgagataatattagcttgtagactcagttaattaattagttttaattaatcaattaaaattctaaattagactatgtattatttatcaatttttactaagcaatggcttaattgtgaagaaaagaggttttatagtttatttgttaattaagagactttataaggtctaattgataaataagttaaatgataattttatttaatnnttaattataattattaaatcaataagtttgacttttataggattaaaattaaaaatatggcattagtgaaagaaaagataaattgttaaataaaatagcaaaattataactagtcaggttccactaagtgaggccagtcacttaagcatattttagccattattttttttttatttcatataattaaaattctaaccccagatcaaatactatataagaaataagatggctctcattctcataacattaacataacctagttttctaactttatcatacaactaaattgagagcctctttctatagaatttcgaaattccttcctcttcttcttcatcaattttgaacccctagtaaagagtacatgcctactcatatcaagtcactactcaatcatagtgtggaagattgtgaagaattctaacacctgaaggagatccaagttcagatcttgttattactctgcgcgcgacagattggaacaagggttagagatctaaatggaaggagccattacattcctctgccactaatgtaaggttttttagaactttaaatgtgtttattttattgttttaggaaattcatgtttagggtgttatagtatagaatataatcaaacatacttgttagtaaatttagatcttggcagaacccaactattggcagctatactgttaatgttgatgcagggattcaaactaagacaaatacttcagcaatgggtgatttgtagcactaatagggcggtggtgtttgcttatactactgttttgaaacaatgtagtgacccattaactattgaacttcatgcaattaaagagggaataaaggctggtattcagcggtgctgtggaaggttttgttggaatttattttacnnnnnnnnnnnnnntactcacaagtatgttatttaacaacctaaatatgaactttctaaaacgatcataaatacatataaagtgaagaaaaccttacattg

SEQ ID NO: 95882 - DNA, 1679 bp, Cannabis sativa
  modified_base (455)..(456): a, c, t, g, unknown or other
tacgggcgttacagaaaatgtacatatcgaccctttcggcctgtgtggctaggttgccataagttatttttggttgtatctgctgtgtattttgacttactattgtatatagtccttttgtaaaactttgtaacagggatcctcagaaccagggacggatgtacatggttatttatagtggtcatggcccccctaacatatacgtaattatgtatatgtaattctaagtcttaaactttagtatagtgtaattggccccctagcatacatgtaattatatatataattctaagtcttaaaatttaatatattgtaattgaatttttctaataattattatatagtggctcctttaaaaaagtcaaagtaaaatttaaagaaaataaaatatattttgtctacagtaatactaacaaattatacacaattattactttcctttataaaaagaatannaagtgtcatttttcttttaaagtatttatttatattctttaataatatttatttagtttatttgctagttagatcattacaacttcacaatgttttccaaataattggtttaaaaaaaagtggaaaacttcttcattttattattttagcaaccgtttctgatttatttatgtcagtcgttagcaagaacgaaaaaagaaaaaaaaaataaatttgtgtataaagtagtaactcttattctacacttccagctactacaaatcaatcttttttcgctatgaatatagtgaaaattacacttcgcaacaaaataaaagatatatttttaagtgattgtttgttagtgtatatagaaaaaaaaaattgctaaaaaaattagcataaattcacttatatatgacttttatgatatttaagagagacgtattatattttcattttaattataatattaataatatattttgaattatctaacactatttataatatagtttggcccccgttgaatttcgacactggctccgcccttgctcagaacaaattttcagtgttgttatgttcattactatggttttgttttagtaaagttttatatattatcatggattttaatagctaataatctattttactaaactagtttataaaactacacacgtggcgtccctatagattaaggcgttacaacttggtataagagtagtcatggttttaatggtcctaaagactggttggttttaaagtattgtaagggcgaagacaggtcgactcatagtattgtaagtgtttgtattaattgctattagattacttgtctagattattataaagcatgttggaaaagtaatgtaacgatgattgttataggaatatgtgtgtgacatatgcatattgatattgatatctattgaattttgaatggttggaaattttggatcgcaagtgcatgcagcagtagtctgggcgtttgaactttgagctggggctcggggtaagtggtgaggaagatcatccttaaccaccttagaactaggaacaagtgtttgttgccatgcaagaggcaattaggcagtaagggtagaaaattcgagacccgacagagcaacaggctcgtcctgcacctacattggaacctcagatagtgcagcacaatgttggagattgtacggaaccgattcgtgagcgcttcaggaaataaaatttgcctatgtttgagggtg

SEQ ID NO: 95883 - DNA, 649 bp, Cannabis sativa
taatatttcactcttgtatttgtataaataagagttcaccccattggaataaataactgagaaatttccattcgctttctctttctctctacatcttcttcttcttcttttttttattttttattttatattattttataacagatataagaatttagatttttttttattggtaataagaatttagactcaatatcatattttgaaacattatttgaaacatatggcatttttcactctgtccatttttcgtaggattgagcttttctatagcttttttatggtatgccatatttttgttatattttcttttgaataacgtagttttttttgtaatttattatattattattttgttttattttgaaggaaaaagctgtattattcaaaaggaatagacaacaatagcttttttttttggttataaaactattataaatatactaaatagaaaagaagaatagattaacaatcaagaattttcgtagtagtttatttcaatagagtaaatttttatttatataaaatatgattgaaaaaatagaaaattaaattaatgaaataaatagaaagacaatagtatttatggtaataattgatttgagtagtttgaacatccatatacaatatttaataacactatccttgg

SEQ ID NO: 95884 - DNA, 737 bp, Cannabis sativa
gggatcacacgggttctattttgtgggtggccactaacatgctaaacttcattgatcctctaattgacgaagcttcggcttatcagttggccatggagaaggcagtgcttttgaaacacccttttgtgctaattgagagtgactcggagatagttatcaaggcgttgaatgggacttgttctaattgggagatattgattccttcacacaacaatttgcttctcgtatcgacgaattagaagaattgttaactatgttcagcattgtaataagctctctagtttatttttagttgtaatttttcgttcatttccagatcttgtaactttgtagcccataatgtggctaagtgggcttatgccaacaataatatttgcatggttgacctgtcaaccatcccatcgaacattatttgtaacgactgtgaggtctagtttaatttatctataaacggttttctctcaaggagagagagagagagagagagagagagagagtaaataataataataataataataataataataataataataataataataaagaaatagtagaagaagaagataacatgatttaaaaaatatatatatatagaaaaaataggagaaagagacaaaattgagagaaactaagaattttttgttttgtttttttattaaaaaaaaaataaagtattgagggatcacatcagagcatctccaacctatacagcaaatttaatatcacactat

SEQ ID NO: 95885 - DNA, 525 bp, Cannabis sativa
aaggtccagaaacgggtgcggggttggaagcggagtttcttctcagcgggggggcgtgagattctaattaaggcggttctgcaggcggttccaaattaccttatgagtatgtttcgattacctgttgcgacgtgtgataagctccgttcgatcattcttcagttttggtggggtacaaagggtgataagaagaagattgcgtgggtgaaatgggatgatgtctgccagtcgaaagtgaaagggggtttaggctttaaggacttagtcctgtttaatcaagctatggtcacgaagcaagtgtggcggttgtttcattcgccggattcgttgcctggtcgggttttgaagcataaatatttcccgggaacgtcaattttggaggctaaggatcgccaaggttcgtctcatctgtggtccagtttggtgtggggtttagagttgttacggattgggatgcggaaggtggttggggatggtcatgctattgatgcgtttcgtgacccttggatccctcggccgaggact

SEQ ID NO: 95886 - DNA, 553 bp, Cannabis sativa
atagagtgtgcatttccttgtataatgtgcaaaacgatccgatggctgggaacaattgtaattcaaatgaggaaggccctagagtgacacgcgtccaaagcaccgtcagtcttgccagtacgatctcacatcggtaaagaccacatggaaaatatgcaacctacctatccgacggtgggggttcgtccttgtgaagatccatcaataacaatccttgcaagagaagcggcctataaatacccccaaagacacaccaggcgagggatcgggtatgaactttgaccatttctcctttagtccattcgcctctctaccgaaggcgaattctttataaacacattactatagttctattattaactccagaatatttctgctaagctccctctttttcaagagagagactagggatcggagtaaagtccattcctattgtatttgtatctgcattctacgactaaagagtctaataaaatggactcatggattaaggataattaacacctaaaccacgtaaaaatttattatgtatattcctgccacttacacttct

SEQ ID NO: 95887 - DNA, 550 bp, Cannabis sativa
ccttaatttatttatttattttctgcgaatgttatattctctacctttgtccctgattttatttagatggttaactattctttttaatgaattctttttaatgatgaaaaagaaaaaatgtttgaatataatttgatttagaatttggaaactgatttgtgtgtgcacattattaatttggtaaatagcggcataaatatctaaagttttatatttgtaagcgacataaatctaatgtttatttttagcggcataagtactgtaattttctttcttccagtttcattagtgcagactctgttttaaatttattaaaagaacatttagaagtaattgataatacacatttctatctagacccaatgatcaagaatttaggttttatatgtgccatgtttaagataataatagagtttgtattgacgaaattagagaaaaactacatgcaattttacaaacattgggtacttatgccgttaaaaataaacattaggcttaggtcgcttaccactacaacattaaggaccaatagcggcgggcccctcggccg

SEQ ID NO: 95888 - DNA, 1478 bp, Cannabis sativa
tttattattgttttaaacagagcatctagatagaaacatgtagtatcagttacttctaaatatttttttaataattttaaataaaatatatacagacaaaattaaaaaaaaattataattttataaatataaattatttatgctgctataaataaaaattaaatttacaccgttgataaatttaaaattttctgtacggctatttaccttttaaaaaaaaatatggggtacctttctatatttctgttttttttaactaacttttatctattttttattggaacgtgttggctccccaaatgtatggggaaagtatatatgcgcgtgggaagagtgagacagtgagagtgaagagtgaagaggaagaggtgaccagacggtgactttgttcgcatgtgatgctcttctcttctgttgtaccattcaaagttttccaccctctatcatgacccccctcccctcctaatcctacgcccatctatatattcaaatttatttatttatttcttttttaaataataataataataataatatctaacccaagggcaaaagccaaagggcactgatagccttacctgccctacctcatgaacttactacattatcatctgagaacgacaattatttatggttggactacacattatccaattggatttgccttttgctaatgtcactttatcaccattccacatatcttccatccacttaacttaatgtactttagttaggcctaattgtaacaagagtttgagtagaatctaagttacttttgtaatttttactaatcatatgtgcataaaatatatggtaaaagtattacacgtgttggaagacggtattttaatttagatgagcatacttgattaaaaaattataaccttaagttatgtaatttaagtgcacgtttcatcactcacatatacatattaatagaatatttattcctaaactaagatggtggtatgtatccaatattatattgtatattatttgtgcaatttaatatttacctacaaatttaatttaataatttatacaaaataattacagaaaaatatattgtacattttctaaaggattgatttttttttttttttttttatgatcgtgtgcactgtaattttttaagacaactcatatattttttaaaaattctaaataatatacattatcaaaaataaagttcaaataattacttaagagaaaactatcttagttaaaaaaaaaaaaaactattacaagtacaacttacacaattataaaaataaaaatggcaaaagataccaatagtgtttaatactctcttatgtgtcaatattgctattggtctaataaaggatcgggtcaatttaatataataatttttaaagaatatcactaattaattacaaaataacatatttagaggtactaaaaattattagtgctcaataacattgttcttataaaaaatgagatagactaaaaaaaat

SEQ ID NO: 95889 - DNA, 506 bp, Cannabis sativa
acataattttttgaccgattacaacgcgacatagatatgctactgaaagaattcttaatatgattaatatcattaagaataataccaaactcattgagacaagggaccttgttattgacatcaagaactatccgctgacaatcagagaaggcagtaatcaccgtataccccatctgcatgcagcaagaaagctgatagagcagagctttggcttcggcaatgtgaggttccaacaatcccgcgtaaggagccgcactcgagaataggacatgccccatacgattagaaaccaaagcccccagccctattttttgattctcaacacacatcccagcattcacaaaaagattgaactcaccaagaaccagatcagtctcagttgaggccagtcgattacttgcattgccagataccgaacccatagaagttggctcaacattattagcatcttgatatttccataaataatccatggcccacgcactaaccatgttatcagagaggag

SEQ ID NO: 95890 - DNA, 643 bp, Cannabis sativa
caattttatagtaatcaatgttttgtcaagctacaacccaataatgggaagaggatggctggatcgaatatagggtataacatccacggacctctatctcttggtcgtctcttacgtcatcatttccatcaaaacaaccttcagggtctggaccatcaccaaaatcatcatgaaaaggcatttgtgctacaatgtcaactattcatatcatagtgttcaatttaggtaactcatcatgaaaaggcatttgtgttataaggatcgatacaaacattcttcttcaccaacatcaccaatagggggggtaaactcatttggatcttcgtaagcatagacaaatataaacttagatacttatcatttcttataactttagggctatacattaaccctttcatgtacttgtaattcacttctatttcaagtcatactgcactttcttaacattgagttcttcatacaaaagctgaacaaaatgtgagtaggttatgttcatatcaatctcgaatgtcaaactttcagcttggttaaaaacccaatctccgtcctcaagctcccaaataccactatacataaagaacgcaaaaacagttgagcctatcatccacatacataaaatatagtattcagaaaaaaaaaaatc

SEQ ID NO: 95891 - DNA, 793 bp, Cannabis sativa
agcaacttgattatcacaccacaattttgctggtactacaatcctacttcagtcaaaagttgatctatcgacattatctcacacacagattgtctcatagccctacattctgattctgcactgtatctggacacatcattttgcttcttactcttctaagatgccaaattaccctcaacaaagacagaataacctgaagtggatcttctatttaccttggaaccagtccaatctgcatctaagaaacacactcaatttgggtgtgcccgtgatccctgtaaacaatacctcgtctgggtgctcctttcgagtaacacaaaataggttttaatgttgcccaatgataaatcgttggagatgacataaactgagtgacaacactaactgagactgcaatacctggacgaatctgcaatacttctcagggtcttcaaatggttcacaagattttgctcccaatctttctgtctcagttaacaaatcaagtatatactttctttgatatagaaaaataccttttttactccgagtgacttcaactctcaaaaaatacttgagcaccccaaattcttcgtgttaaattgggtaagaaggaatgatttaagagatgagatgcctctagtatcatctccagtaataacaatatcatccacatacacaatcaacaaaataataccagtagttgatcatttataaaacacagaatggtcggacttactttccaacataccaaatttctcaatagcctaactaaatttaccaaaccaaactcgaggactttgtttcaaaccat

SEQ ID NO: 95892 - DNA, 527 bp, Cannabis sativa
ggcataaaacccaacataatactcataagccccagtaattttaaggtacatgctaccctcagatttgaatttcccgcatctaacaatgaagccgagtatgaggctctaatcgaaggattaaaactcgctcttcagatgaaaaacgagtatttacaagcctttagcgattcctagatcgttgtctgtcaggtaaacggagaatacctggctagaggaggtcctttggctaaatacctcaccctcacttgtgtgttattacagaaatttaagaaaataattgtctctagaatacctcgtgctcacaactctcatggggatgctttggcccggttggcctcgacaagagaagcataattactcgatgtaattcctgttgatgtgttaactcatctgatgatgagtcgagacgaggtgattgtaacgccctaatgctaaggcacgctacagtgatttttcaattacagtgttatctttgctaatcaaagaatttacttaaacatcgtgtcaaattaaaaacttttatatta

SEQ ID NO: 95893 - DNA, 604 bp, Cannabis sativa
tattaaaatgtatagtagaaaacaacatgccgtttttacataagcgttctaccgtttttagcaggcaagacccaaaaaaatcggtctgtcattttacgaaaacgacctgcttttatttggggtatttttcctgaagtctaatttttcagtgtctcctcaaaaattagggcatttccacactatttatcgataaggaaattttagtttttagtctaagtccctgaaaagtgatttagtgcatcaattaccagtttatgtatattgtgacttaggggccctaaatcttcgagtagcagtttccactaggttgatggcacatctgaatttagaattgaggtaagattagtataatgatatgcatatttataagtttagcgtacatgttttatagtttcctattagataatatatcagtaagagcggtattagtgtacataaatctgcactgaatatcaatggatatatgttaggaagaatttaaagccactagtttagcatattagtaagagcggtatcggtgtacatagagttgcactagataccgaaggatatatgctaggctttgttgtacgaacgctttagacctagtacgcattggatgtgg

SEQ ID NO: 95894 - DNA, 787 bp, Cannabis sativa
cctacccactcagctgatggccccatttcgcgtgcggggtagtatgcaatgcatactcctctcattttcccaatttttccattttttaacttttgaaaattatttttcagtgaaataaaaatcaaattttagtagaattttgtgtagaatcttatttttcaaataaaattctaattatcaaattaaaatcaatttttattaattttattataaatttaaattaattttagatattagtaggttttaaatttgaaaaattattttctcaacaaacttactatcatggttattttaaaattttactatttttatttgatttattaattttaattataacatcaaatatttacatatttaattaataaaatatgaaacgatcttactttgacaataaaatattaataaagtttaaagataatttagataaatttcaaattactaactcgatcaatttttaaaaatttgttatttttaatatattttattaatttaaattataaaattagatcaatattaattatttgatattttatcttattaaaaatttattttattaaaatttgttttttttttttttgtttgaatagatattttaggattttctaaccataaaattttcaaaatttaggatattttattttatttattttttttgataaaatgataatatcctaatcatatattctattttcaaatttgtttattttattgaatttgatatgttaaaatatgagatttggagcgagtttagtatagctgtgccaaactggctttaaatcgactcact

SEQ ID NO: 95895 - DNA, 1002 bp, Cannabis sativa
atttcattgagtgtagaatttaataaaaatattacactatatatataaactaacaactaacttaaacaaaggaaataaataactaactgacagtaaagaggctaactaactgaccaatagtcagtaactaaccaaataattaacaaccaaaatacttaaatcctagtaagtacagcttaatacacaaaattaaaagtgacaactgattttctaacacctaattagtatctcggttatgagactacacctatgcagggccggccctaagcataggcaggctaggcccgtgcctagggcccacactttgcgggggcccaaaataaagaaaaataaaaaaataaaaaaatatattaggtttttatttaagtaaaatttaagtgtattataagcaacaaatattcatagcttagttggttgagatggatagcataatgtctaagttcatgggttcaaatcccataatactcttattttgatatttttttttatatatttttgagggccccaaaatttaattcgtcttgggcccatatatttttagggccagccctgatcatatattatggaaaatgtaagagagaaaaattaacacacaatataacccttcatataactagagtcggccctaggcataggcgggctaggctcgtgcctagggcccacacttcgcgggggcccaaaataaaaaataaaaaaaaaagaaaatatattaggtttttatttaagtaaaatttaagtgtattataagtaacaaatattcatagcttagttggttgagatggatagcataatgtctaagttcatgtgttcaaatcccataacactcttcttttgatattttttttatatatttttcaaatatataaactcttaaattatataaatgacggtgtggagctttgtcttctcttaattttatattatttagtgagaaaacaaacgagaaagcaaagtcaaaactgaagattatttattcaaataaaataagaaaaactctcacgc

SEQ ID NO: 95896 - DNA, 673 bp, Cannabis sativa
cattaaatgcgagatgactgctcagaggaagcctgacatatcctggaggtactttgatatcacttagccctccgggagcatagaggactttgtatgccttctgcgggaggtaactcccggataacgcatttctttacaaagacttagccattaattcgaatgtttaagaccttcgtgtccacgtgttcttgtctggttggtccacgtatattgggcaaaatcaagggcaacaactgtgttatttgactctagggctacacattcatatgtggcaacacgggtaattaatcttttgggtaggccttgtgactttgttgaaagagggtttggaaccctactgcctagcggggaattggttgtcctcaaaaggaaaattaggtcaatccgagtcagaatggaatttagggaattgagtgctgatttagttgagctggaattagtagaatttgatatcataattgggatgaatttcctgtccaagtatttgatcaacattgattgtaggtggaaaattgtaacttttcaaccgaagggcaaggatccatttgtttatgtgggatctttgcagaggtctcaaaatacgatgatttcagttttaagggctaaagatttactacacagtggatgtgtaggatttttagtggttgtaatttactccagcagacctgaaaca

SEQ ID NO: 95897 - DNA, 609 bp, Cannabis sativa
aactttcataattttctgattttgtttcaataaaaaaattttataataatatctgattctgattggtagaaagtttttgaaaactgaatccacaaaaaaaaaattaatcttttctttcttttatctgttaacaatggaactgacttgttctgttctaactgcacttttgttcattaaaatggcggtggaaaattctttgatgggattatttccttttctgacagtatgctataaatggggattgcccttgtatttatatataaatttatttttgaaggaaatggttctcgataacgaattgttttgggtttgagtaaatgctttgttgttggttagaatttgtgtatttattcgtataaatctaaaagatgatgatagtgatatgtatttattcgataaatctaaaacatgagctcttttatttggacatatgaatttattacagtccatcatataaaatatatttagggctacacaatgtcatcatatatatacatgctgttatgctttcatgtgaatcccatttgtactgtgtttaagttttggataattctaatcttagtgttgatgaaatgtttggtaacattgagaaactctccaaataaaatc

SEQ ID NO: 95898 - DNA, 623 bp, Cannabis sativa
  modified_base (592)..(597): a, c, t, g, unknown or other
tatgcggcattaaaaactataaaaatacttttctctcttttgtttatcaattaaattcctattttcatagaatttctacatgtcattattgtattatgggaaagtaagtagtttcccattttatctttaaattgttttggaaaactaaattaatgtaattattcactaaaaagagtggagtcatttcaatattgagtgaggagaaattattcatttacaggagcactcaagttgctcaaatctctgtaaatgctttcgaggaagattaattcttgtttttttttttctcgcaagttaatataagagaaagaggagtaggttattaccactatcacagggtcaaacctttataataattatgtgttctcattgcttagttattattattattattatttctaatcactttaattgatttattgtgattggctaaaatcaaaattaataataattaatttaattctaaaaaagatatttttagctattggaagtctgttaaaaaaaatataaccatcatgttacgaaaaaaaaaaatataaccatggtaatcacctaaatatattaattataacaatatctttatatattaaannnnnntatctaacggcatttcttggtttaac

SEQ ID NO: 95899 - DNA, 538 bp, Cannabis sativa
tctaacaatcttagtagttcaaggggaatttttaacggccaaaaaagttcagagagcatgatttagtatatgtcaaagttcgagtggaaaaattacaaattagcctaaaaaaaatattaggccatttacttttttggacattgtgcagtagcccaccttgcacaccattatggccggccatgcatacctttgtgcctgtacacgaccctataactacgattattagccaaataactaaagttatatatgggtaatttttttattttatttttatgtatttgtgatttattttcaatccgatgaaaaatgattaatatagagaaagaaagttcaatttaacacaaatagtcaagaatgggttcttcgaatgttattaacacaaataattttttttcccaaaaaaaaaagaaccacctgccaaaaagaaaaaaatggtgagaatatcacaaaaaaaaaaaacaagtgagaaagagagacatcgagaaacagagagaaagaagaagaaaaaagcttatagggtcgtcggtactagggccga

SEQ ID NO: 95900 - DNA, 526 bp, Cannabis sativa
gtgagccagtccaccaaaatctccgcaccattgcatcaagttcccggcaggtagtgaaaggaattttaaaagtagacatggcgtaattcggcatggccaaggccaccgaattaatataaaccactctaccagcctaagaaagggtacgaacccgccagccttcaagtctgtcccatattttagatttgaggaagttgaaatccttcctcttgctttggccaaagaggaaaggattcccaagatgcttttctgaatctttaataactcccatccttagaccagattctatggaaaatcttaaagaattagagcaattttggagaagaagatcccagatttctgtttgctgcagacttgaccagaccacacttcaaatttctggatgcaatgattaagcgtctccacttcttgtaggtttgctccagtaaagataatggtgtcatccgcgaacatgagatgagaaatttcaggagcttcccgcgccactttgatcccgtggaacaatcccttacattgttcgagatag

SEQ ID NO: 95901 - DNA, 3054 bp, Cannabis sativa
agcatgggtgacacatgattggcatgtggatgagattgcataaagttggtatttatatagttcttggtagaaatcagagtgcacatagaaaaataattaaagaaataacaaattatatattcacagtatttacgataaaaaaaaagaagaagaaagaaatggtgttgggccctggtgggcctgagtgactattaactactcagaatatcatgtacttcagtcgccatctccattaatatattcaattactaacacccaatgcttgataaaaaaaataatagaataaaattactaacacacccaatggtttttcatacctagaatttcccttcttttttttttcatttactttttttttttaaaaaaaaaaaagatttgtttacaacttacaatcaatctcaaaagaaaacaaacctcaataaacaaataaatgcacaataaatattatcattaatattatatatctcacaaattgtggatagtgattgttttaattattatcaataggtagttttagtatacaaataatcctaatttatgctttttttttttaaatgatggcatctaatataattacatgagataattctaaaattttccaaaattatagttaatcttttctgaaacataattcattcacatgaaacaatatagaattggtaactgaaggctaatagtgtcacaagcacattgaaaattatctcctatccacatagcactaactttgattaacaaaatttaattgactttggttaaaaattatagttaatttaacataccaaaattagcattcagtaagttttttttaaccaacattcaatcagttaattgaacgtttgtgtttgttttaatatttatccgagcatggtataagttctttaaattataattttgacattataaattattataatttttttaaaaaatatatgcatatttcttgtaattaactacattatatattgtcatgtataaaatatatttattatttatttatgtgtaaaaattataaaaattattatttataggtaatagattaaaaactatcacctcatacatatataaaagtgtgaaatgttaaaagaaataagtggtatctaacaccctttaaggtgatatgactattgtaattgagtatgatatctcatataatttaataatttttattaaatactactcatcaatcacaaggagttatttttaagtggtgctagacactattagataaatatctatataaaaatatatgtggttgttggtcttctttcataatgaatattaaggttttattttagcacatgaatgaagactttgcaatttttgtaccgaattcaagattgtaatattattaaacgaggtataaatgtgaagtgaaaaaccataaaaatatataatatatattataatttttgagatttttttaataaatcatgaaattttattaatattgtggtatagtttctctaaatgtaaaggtctctaaaagttatttttgttataaaaagttaaaagtcattcagaaagacattcccgaaattttaacttgtccatccgaaaggagtctcgtagaatgatagaagttgtttggaagggaggtttgggtccgggtccgggttagagagcgagtctcgagtccgtgtctgggttcgggtcccgagtctagtggggtccaggtccgagttcgggtctggattcgagtccgggtcttggatccagggtccaggttcaggtatggatccgagaccgggagcgaattcgggtctcgggttcataatcaggtcccagtcctgggtctaggtttgggttcgagttcgggttaaggtctgggttcgaggtccatgtctgggcctgggtccgtgtttgtgcgccagtttgggtccgtgtccaggcctggttccagattagggtctaggtccagggtctgtgtccgcgtttgggtttgggttcaggattcgggtctacgtcaggaccccgggtccgcgtttgagtccgggtcccgtgttccgtgtctgggttcgagatccgagtctaggttcgggccccgtgtcctgtgtctgggttcgggatccgggtcccaggtcccgagtctgggtcctggttcgagttcaggtcccgagtctagtccaggtccgagtccgagtttgaaatcaggactgggtttcgagtctgatcgaagattgaggttgacccataatcctttgtaaatattataatacaaactaatacatatcatttgttatatattaaataatacaacatacattgtattaaaaattttattagtataattaatacaatacgttgctttatctaaacatagtgttatttattatttaatacaatatgacccttatacggcataccaaacgagtccgcccgctaataattaaataacacctcaaataaatataaaacccactaaaaatattagaatagaagaatgtaaatacaaaataaattaaagaaaaagataaaattaattgggctagaaacaaaaatataaaatagaaattttaatattagatttacaaaaattttagcatatcaaatactataaaaaaattgtaaaggtaaaaaattactataagaaagtgacaaacttataaataatatatttttgtaacttttttatcatagtaattttcaaattattaaataaaattacatcgacccaaaatgttaaattttatttgaaaatgaaggcatttgacttttttttagcattcatgtataattgagggtgcttggacctctacttttttgacaaggattccctgggagacattgtatgattaaaaacaatttaacaccatttcatgaaatgtgtaagtttcttttgtttttgtaccaacataaattggagtgatgcagaaaaaattgaagaagaatacataatgacccttggatataactagtaatttatcttgttgtctgtacttgataaaaagatgaaatgttactgtacatcataacctattttgtactacaacttttatctagtgttctattaatagagagattcttactttaccataaaatggaaagatttaccat

SEQ ID NO: 95902 - DNA, 513 bp, Cannabis sativa
acttctagttttttaaatattctaagcttttttagtttatttattatcttgctaagtttctaaagttttcactattaatattctaagatataaatattctaaaaatgtgtagcacattttaacaatattacataaaataaatatttatacagagagagatagagaaagacagagtgtgtgtgtgagagagaatctacacctagaggagatcggtagacgtggctgcgatggagctcgatctggttttttagagaggaaaggggaaatagctgagaagaaatgtgtgtgagagagagagaattgaatcgttatctaaaggaaaatttcggttctcttttaattactttcaaaaacatcggtggcgacattgtcgtcattaatgtccacaagaaaaaaaatctttctacaacagtttgatttgcaaaatcagaaaatattagtgaccattgtcataatttacaaaaaaaaaaaaaaaaaaaaaaactttttttttttggacaattagttaatttt

SEQ ID NO: 95903 - DNA, 939 bp, Cannabis sativa
ttttttttttaaaaaaaaatgatgccgttttttaaaaaaaaaaaatgataattttttttttaaaaagaaaaaaaattgatgattttttattttattttattcatttttgtattggttgtccaagccaatatattggtagttcttagcaattttaatcaagaaaattttaaaatacatccctttaaaattggtgtactgatgtacccttatttttgttctgatattcgagagacttttttagtttaattttttttttcatgatcgtgtacattacagttatttaagacatcttgtaaaattttaagaaattcagaaaaatataacacgccgaaaataaggttatgaaaaaattaatactaaaatttgtaagtaaaattattttttaaaaataaatacctatataaaaataatttaaattatctttgaaaaaataaaaaataaaaataataatttaaattaaaaattaaaaattaataatgttttttaattattaatattattttattttttaaaaataaatatataattaaatattattataatacgtataaagttttaattgtatacaaacagtcctatcgtaagagtatacaccttatatcttaatgaccacatgatctaaaatcaatggtaaaaaaagttttcctaccgatagggaagtatacacctcatatataaatataaaataaattattaaaataaaatcaaaataattattaaaattaatataaaataatgtgagtagaacaattttaaaaaaaattcagaataatttataaatattatttcagttttatattttttttaataatagggtgtatttatcattttatgaggtgcaaatctccttaataaaattcctacaatgcatatttaaaaacatttttatcctcttgtaaaatgattaaaattaacaaaattattttattttataaatta

SEQ ID NO: 95904 - DNA, 505 bp, Cannabis sativa
tacccataacataattggtcacttaattttgtatcacactttataatagcatatacattatacatatgtgcccacataggattttaatccaacacaagtactatagtttcctatatatgtaaattgaatattgttacaagctaggcattactcaacatgcatgggttgattggtataatttactatccaattttttatattacaatttaacttgtacaagccacttagtaactagctcagtgatgagtgaagaatgaaaaaaaaaagaagacatgaattcgaacctaaaacacttaagttaatggttattagttgataaaaccaaaaaaaaaattaatatatgtactaactcgtggtattaaaacctcatgagaatgctttattaaattagttgagggaccaactcaaactcaaacccgaaatagtaatatttattttgcaatatgaatagatataataaatgaatattaaacaaaaacacacagaagtggaatcacatttcact

SEQ ID NO: 95905 - DNA, 596 bp, Cannabis sativa
ttgctttgagggaagggcagaccgctctgctaagaggacaaacaacgattatggatcagttgaagaccataatgaggctcctgcgagatcctagaaggccggcagcagattcacagtcacaaccacagccacaaccacaaaagaagaagaggctcagtcaccggaaaatgaaatcattctcccaaatgattacagaccggatgatgatgacatgttctgtacacctgagaagacgaatatcaccagcatcggggatactcaggagtctgaggtacaggtgtctgagacaactccagaactcgtggagaaccggaggaagagaaagcggcctaggtggttcgatgagtacactgaaataaaaaagaagtctagggctacgaagacactcgtgaatgcggacccacttagaatggttgatcgaaagctgctcaggacttttcacagttgggtactcggccagattgggaacaagtacccgagagagtgcttcttcggtaaacacgattcggcttggttcctcgaactacatactccgaggacatagcttagggacgatgtaagtttttaagacttttttacttcttttgcttttaaag

SEQ ID NO: 95906 - DNA, 658 bp, Cannabis sativa
ttttcttttgaaaaacaaataagatggttaaatatactaaaaagactagtaaactagatgaagaatctcatttttatttaaacataaactcagttattgattgcattaactcataattaattacatgaaaatgtaattggtaacaatgcttaatattaataggtcatcagcaatgaacaaatagtttttagttaaataaaagcaatacccttcaaggctccaatgcttctgcaacgatttcagcccatgtatacagtactacgaagctataagtcttatgacataaattacatgtgggctctaacagtatggctttttttccgctgggtataacaatatggcttgaatgtgaaaatggcgtaattagattagtaggagaagcccatcaacactggtctgacattaggaagactactaaaaaaaaggaataattacattagacaacttaaattacatcttaatatcaaaaataacttgacccatttaaccatgtccattatcacgtttctgcatgattacatacccttttttattgttggacttagtttagtcaccacgttttttagctttaatctacacatttttttatttatttatgatctttaatctagaagctaagaatattcaccaaaaaaatcatgacctgatggatacatat

SEQ ID NO: 95907 - DNA, 3148 bp, Cannabis sativa
aggatgttaatgaaacatacatggtagtaaatctagatcgtggtaaaatatttccaacaatgtgaaagtgtgaatttgacctatcacaagtcgtagctctcgcttactacgaaaaaatagtctgatggtcaagacagaattagattctgataagcagaaccaagcgcactaggtcacacatcaacctgggtgttgggtgcttcccagggctcgttttgatacttcgaatgcctttaagattgcaaacgaggtctcctaacttatttttgaccataataagaagaatgctcagagcataatttatgtttgaggagtggaaacctgcaaagcaggttgcatgtcaacctgggcgcaaggcccaatgcccatgtcaacctgggcgctgggtccctgttttgaccctcaaaaaatctcgtttgctccctgaaaacacttgtatctttgttatttctaaagacataaaagatgcccgaaatatttttcaagaaaaatgattggaaatatcctaagtcgataaattgtcaacataagcgctgggtctagcttttcattactaaatggctccgtttgattcccgaaaacactcatatctcaattatttgcaaaaacagagaataatacgtacggaatacttctaaaaagcaattagaaatagcctaggttaacaaaatatcaacctggatcaaaaattattttacgcattttaatttttcaaactagcgtgcactttacattttggattgaatttttcagatccgtttattttggcttgatttgatttgataaatcttaaaaataaaatgatttttttattgactaagaaatcatatgaatcactatccaattggcaatacattaagaaatagcatcaacagataaaatgtttcttattaatttatcacatactttctaattacatttcatggaacgagaagagaacaaagaaaaaaagaagggggcggggggacaaaaaagcacaacaccatttgaataagttgctacttagtggcattattatcggtggcagactggctttgctggttttctcgatttgagtcattattgttcttccttttggttttcttctctttaatgaacttagtccaagttacaatctccagtgtcaaagtagcaacacccaatgccgcaagaatagcaatgtaagcccatttccatgtggtgtttggcttcaaaatggcaatcccttggaacatgtttactgagatcactgccagcaaggcataccccagaaagtgatggtacatgtcccaatatttcctataatcatcatggggttttggccttaatcttaatgccaacatctacaaaattaaaccagccaatatataaatatatatatatagccttaatgtcagctcactatcttatcacaatctacaaaattgaaattaatatttacgtgagatggtttacctgcaaggtggtgaaggtgaaaatgaatatcccaaggagtcgatgagttttaaaagtgtaatgtcttgaagcccttccaagccaaagtccaattccccaaccagttgtgccaagtatgtatccaacaatttggcaccctagatgaacaccgaaccaatgattccatctcactggaaatttcctgaagtacctcgccacaatgaccccaacaggcaacaatataccccaacccaccatgttcaaaatcccatgaacctgtacacacaataaatagaaagaaaaaagtcattgaatttctaggacgaaaacacatcacacaaatcatacacagaattaggaagatatctcaagataaaaggatcaagaagcatgtaaaacatagagtggaaggttctaaagtctataacatgactcaaagtaaacaaattctctaaggttgaataactacaaagaaaataacaattattcttaactcaagaaaccataagagcaaacaggaaaatcaagtttcattgatcaaagttatgatgacattgttgtgttttaaaaagctaaagaagagttaaaattaaaacaattaccgttctaaagtaacgctggttgtgtccaacgcctagagtatccccttcgcaagtcatgttaaaggtctcagtgctgtcaaaattctgaagagaaaaatgatgtattctaggcaccaatctttcaagatcagcattatagccaacttgccaaacatggttcaacttctcaacattgtagagctgattattcagttcaagtgtggcagatattgttatgtatgaggatgagacttcccctgtcatgtcttggactcggaattcagctttaaaaagttcaactttcgaaggaaggagctcacaaccaaccttgttgttgctagtgatattgtatagattggcttgtactgtaccattactctgccgaatgccaatcacggccctggttccaaccatctctggcctgtgtccggggttcaagccccacgcaatccattccacttttgcatactcgtcgctaatcccaaatatgatgtcaattttggtagttttattttcagtgcttcggcggtatttccagccaaattcagctttaaaagtgggtagtattctgcaacttggaatgtttttcttcttgatgatatctttgaaaccgttattgcaaggagtggactcaccaaatttgaagagaagggagtgaaaagccaataaaagaatgagtgatttggtagaggcaaacatatttttttgtctatatcctattgatctctatttttgtacatatatgttaaaggaactagttataagccttgaagtaaagcatagataaaactagaagtaaacattattctctttagatgagttcaggagaagttatatgcatatctatacactctatacctttgttattgttcactacgtatggtttaaatcacggcagatgctttcagaaaaaagtttgaaacttcaagattaccggcttcaaaaagtgtctactggacagttgggcagttcctgtacttttgctgtaaaaagtaaaatccatacagagcatagattcactcaataatgctttgtctagtgttgcaacagttctgtggaattggatcaagaccgtgtattggcgagccccacggtggcattgttgtaattgtaaatcaacgataactcgaacaacgtgtttgacgttagctttt

SEQ ID NO: 95908 - DNA, 535 bp, Cannabis sativa
tcttgtgtatttggtaaaggcagaaaatagttatctcatatttaatactaataggaaccattttgtagactatataagagtgatattttattaaataataaagaacactatacaattttgtattaatgtcccacaaactcttgactcttatagttgagtacgtcactctgactgtttttagaaatgataaatgattttgtaaactaacacgaatatttttaatgtattttgcttcacttgcacgtttactccaagtcaagcacgcttaatgttctcaagtgatgagctactgcaaacaagatatgcactagcttgttgatataagtagtaccaatcaatccattctcttcaactgtgtagtctcatacctacacagtttcaaaattatcatacttgatattctccaagtaatgtggaagtgcacaactctcagtctttcctattgcggatcacatgactctaactgtcacaatattaattattacgactataaattttaatacaataaaaattgtatcatttaatacataacaaa

SEQ ID NO: 95909 - DNA, 586 bp, Cannabis sativa
ttcgggtaggggaaggtctgtcctggatccagaagaacctggttggatactttgtctgtagaccctccccgatctatcaaccactctcccttaaagaggatcactaatgagatcttatcctcttccgacagttttttcattgaacaaccttattaggtcgctagcttctctgttacggctatctagctctgcttggtaagattgaatgatgtactccttgtcatccatccatcttagaaattcgtgtatctcttatgcaaatgcatcacaacaaataatgtgtggttcttcagtctgaccgacttgacagacaacctctctaagtctggctaactcgagattttctcccaagtctgtataaggctcgagtgatcaagtttgttgtgcttgtcaggttggcatgattggccacatctgtcgggttcgtggtgattccaattttttctggaacacgaacatcaggatcagacctcatagggtcttgaggaacacccgatgaggcataagttgtagtcagagttctccttgcattaaccacaccgtttgattagataaattgccaactcactctcaatgaaagtaccaa

SEQ ID NO: 95910 - DNA, 746 bp, Cannabis sativa
  modified_base (249)..(251): a, c, t, g, unknown or other
catagccaaaagaaaactctagcaaagaacttcctatcacaatttaaagcaaaccacaaaataaaatttgaataatgaatcccttatctgagaatcaaaagaaacgatttctctttacaaaatcattattgtccaagcagacttaaccggacagcttttgaagtaattttgaatctttgattctttccaaaaatagttatattacttcaagtacacgatataccttagaatttgttttattattatttnnntatatataaataatattttattaaataaaaattaaaagttactcatgaatttttcataaaccaagaatttcagttatatatgcacactttatatagaatagatataaagggagaaatgagacactaatgtggcagtctaaaatcactctaaataatattatttattctctccttaattctcattttttttttaattttttattagatttaaaaatatttatttatttcttatatttctttattattttattattattaattaataattttagtttctttttaaaaaaaacgttttttttttattattataaaaaatctatatatatttttaacatgaaattatgaaaagaaagaagaaaaaaatcatgatttttacttctatgaaactctttctattgcaatgtaagagttattgtgaatttttatattctcaatgactatatttgttcataaattaaatatctgaaaaagataaatattttatacatggtcaaa

SEQ ID NO: 95911 - DNA, 585 bp, Cannabis sativa
gtgatctataactctactctagtttcagaacaccactaaattttatttattgattgagcaacggaatacagtcgagatcgattctcagatggattctctaaaagtgtttcaactctcacactcttacccaagattaatcttcttcatacaaaactcaaactcaaatctctctcttttctctatacctctctctctctctcaatctttctctctcaagatcacctctcgaaactcgtctgaactctacctcattgaaatgataagtgtgggttgtatttatagggtgaggataaagatcttaaggtcggtggctgcaactattgagttgttaagttagttattctgactgaacaaacttaagaatctccacgttagcaaaagaaacgtgcttctggatgagacatacactactgggacagagtactgaagcgtatgctggagggactcgcagataggaaaagagtcagttttagttgattgtttggaactcccttctaggaggaacacttagccattcagaataccttttctggggaagactacctttcctaaagactatacacggagtggacatgatagtcatcc

SEQ ID NO: 95912 - DNA, 724 bp, Cannabis sativa
actctctcttcctcttccttgcacaaccgagacctaaccagacccaagcaccgagacttccaactaccatcaccgaacctcttttcctccactaccaccaaacctcctcatctacccaaaaacccaaaggcccaagaccggtcggacctccatagcactcaagcgtcaaaaaacctagaggccttgaacctctgtctctgtctctgtcttcatattcatctttgtgtttatttgatttttttattggatttgtgtgtgtttcagaccttagatagttgtggttatggtattttctagccaaaacgtgattatcgatagattgtcgatagtttatcgatgatttatgtttatgtaacgttgtggttatggtattttctggccaaaacgtgattatcgataggttgtcgatagtttatcgatgatttatgtttatgtaacacagttttattaatttaacatttatcgataggttatcgatggcatttatcgataggttatcgatagtatatcaatgaaatttatcaataggttatcgatataggttattgatgatttttgtttgcgcgcaaaaatagcagtgcacagacaaaactatcgataatcacattttggctggaaaaccataccctccaccacaatctaatgtctcaaacaaataagaattcaatgagcttctggttgggggagggttaggtgggcagtggcaaatggcgatggtggttga

SEQ ID NO: 95913 - DNA, 626 bp, Cannabis sativa
catgggtcgaacaaaaaaaatgaacaagaaaaaacgttaagacgtcaggggtccccagctccttgtacgaatcaacttggtctgtgggggtcgagcgcttaactttctgggcagtaggagtttcagtttttttttcggtcggaagtgtagaagtggttgcctcggggttttctttggccatctaaccttcatagtaatcaagatacatccccttggaatcataaaggtaataaaaaaattatttggggttagccttcaaaaattcgtagaagacctcaagggtagtcgtttctagtctttccacctccttctcaagctcttcctccctagtctgcttaatctggacatctcctcaaactttgaaagaataatgcagagattctccctctcatctttaagctcattgacctccctagattaggcgtcactgtttgcctctagctgggcggttgacgacatctcttgaatctccttggccagctcttcaacccgtttgttagcagcaaggagccttttgttcacatctttgatctcgttctgcacgtcccgaacctcctttttaccagcatatacctccctctataatgtgttggtggtagcaaggttcttggctccggtggacttag

SEQ ID NO: 95914 - DNA, 635 bp, Cannabis sativa
attatatatttacttccaaaaagattacacgtgcatagcacgtgttgttccaactagtatatatagatactagaatgcacctggccgatttttcgccagaggtcgaagctaagtcagcaatggaggatcgacgatgctgttttcccgttatgggcattttcgatggaagctaaacaaagacgatcgacgatgttggtttcccgttatggggattttcgatggaagctaaacaaagacgctcaccaccgtttcgacccaaatcgatgacacttttcaatcgaatttttttaagcttccaccctcaatcatgaaaaactctttttgccagctctgttagtttttattaaaaaaaaaaataaaatgttaaaaggatttaacccgttaatcttagaaaaaaaaaaactgttatttttaataaaaaaaaattttttaaaaaaaaaacacctcataatttattataaaccaagaattctgttatataaccacattttatatagaatagatatctaatttacttggggctccaatccacacgtcacaccaactaaaatcaagctcgcgtatattaatattgaatgtgtatatcatccacctcggtacgttctttcatctttttttaagttattattgttata

SEQ ID NO: 95915 - DNA, 757 bp, Cannabis sativa
cttccattgttataaaatctctaacataaaacaatataaagtttgttaaatacatttatcatatatattctttcatactatgtacatgtagatattatataataataatttgtaaatatttatcatattttagtaatcatatcaaatattcacaagagagtaactgttagcattcctcaaaataaaattaaacaaaactttattaactagacgatcaagaaccatgctggtcatcaattatatctcatatgacaaattataataattcattttttttggtatcattttaatgttgtatagtctataattaattaacgtaaacataaattcatcaaaatggtgttggtgtgggtgagtatatcgtctttaaataataatcaatccaagctattcggtttgatttaccaattcctttgtaaaattgtaatagtttaattcgtaatgaattccattttaaaaaaataaaaataaaaataaaaataaaaataatgataataatcgatccaacttaatacttatatgatatgtatactatggatatgatccatacttgtgggaatcccattgaattgaaaaaataaatataaaaccactaataccaaaaattaaaggtatgcaggtcatatggaaacattttgaatcagacaaaattttcaatgagaaattagaatggtcattcaaattagagataaaaataaaggttaattaggattttttttccctgaattttgacatatattaaatcatgccccctgaa

SEQ ID NO: 95916 - DNA, 717 bp, Cannabis sativa
attaacttatttatttaataatatgttctcaacaaaatttatttatttaataatatcacacggaagtcataggctgaatatcgagcgggttgaccggattttaagtttgcgggttttagattcaaaaaattatacccgtacccaacccgtgaaattaaattcctactaaactaacatacatttaataatgtgggtattattttgtttattttattactaactatttttatttttattttaaaataggagtcttaaatattcgaggcctaaaccggtggcatatagtaatactaaattagaaaacaatatttgagacttatgacttcgttgttgatttttaatatattaactctataataaataacacaaacatgttatccatttattttttaaaatttatttctttatttatttttaatataaataaataaataaatcgggttggcgggcgagttcggattcaacccaaaacccgatggccataaaaaaccaatccgcgaacccgcccgatgggataccgggttgaacctgacccggccgaacaaaatcagttttgaaaatttgcatgttgagcgggtcaggtccgagcgggtggtcgggttcgggtcaaacccggtcaaaatgtttagtcttaactgaagatgttaaattaaagggtagatactattttggaccatgtgttttgtaaaagttaccaattggatcctctgttttgtt

SEQ ID NO: 95917 - DNA, 647 bp, Cannabis sativa
cccccccctcccccccaaaaaaaacttagacagatcatatcaaatctttcatgatgatgtgagtaaagaagaagccaacccacttcggatatttgtgattatgaaagactttcttggcatgttggacaatgtatgtaagtagcttcgtagtttaaattcaaaagctcaccgtagtccgaaccctctgtctccgttcaaatagatggctttactttttattttctttttttcttctttattgtgcattttatgaatatgtaattcttatcattaatcaaccagaatgtattctgattttgttttttgtgtaaagatttggatttgttttaggttgaattgtttgtcaacttttagtagtctggtattttatttttgagctttcttaagtcgagaaacaaatcttatgttgttgtaagttgtaaccaatgtaaaaagtgatctttaatgtttcttctttttttttctaagcaaaagaacaaaatttattaaaacacaaccaccgaactacaaagcaagctcccaagaacacaaacactgaagtgttaatcaaagacaaaacatagacagatcactaacccttcttcttcttcttcttcttcttctgccattcttcttcttcttcctatcgacagaacaccccccccccc

SEQ ID NO: 95918 - DNA, 950 bp, Cannabis sativa
cctatgctggccatagggccggccagggatggtcggccagcctccttgaggtggctggttcgtcattcgttgtcccatttgagtgccaagacttcccgttggttgaagtgctgagtagatgacttggtctttttattggtgagttgtagtgtcacatggcgcagatattgactacttaaacataccacatcaggtgggtaaaaattgagataagagaaacatttactactatcattagtaaaaatttcttaatatacccttatacatatgaataagtattcatgtatgattattgtattttttttctcttcttgttagaaaaaaagaagtaaataaattaaaattaggagaaattttgtgatccgtttaagaagttttatagtatagtaccctatgatatatttagtgcattcatgatgaacgaaaaatattaaaacaatgtttatgtatgaatttaatttgttagtatttttttttttttgaattattgaataattacaaggagcttgaatcatctcatatgcattcataattatataaatattagagcaatggccttattcattctcaaatgcttggcctcacattgagtcgagacgctagcttctgaccaagagacttgtctgcctacaaacaaacccatattttattcaaattaataaataatattagaatctttatcacccactataacatcatgttctattcaaattaatatatcttagataaacaaaagataaaaatttggactaacctgagaccaatatgagatccaaatattgcgaatttcatgagtgacacgcgggtcagataatgcatcaatccatcgtgtgatgaatcgttcttttctgaaaacatcatggtgagaaaacaagtcaaaatagtggctacaataatatgagaaacattaattttcctttgcaacaaatataggaggataagtacctatc

SEQ ID NO: 95919 - DNA, 779 bp, Cannabis sativa
tatgtaaagttgtgtacacatgacaccaaaatttataaagcaatataaatatgtcacacataaaattatatacaataataatttaattagtatttaatgatgaaatatttaattaatatcttaaatttttaagaagagatttaatcaaagaaaaaaagaagagatttaagcatataaatacaaattactctttcatttattacacatcctcatcctctaagactattacacgtacataatgcatctagaaaaataatgaacaatccaaatctagaaaaccctactaactttattaatctttctacaatgacattttctaaccctatagactcatcattttatttttaacatacattagaatttagatattactatttttttctagaaaaaaaagggattaagtggtgcatatcttgtccccactgcttcgattttaagataatcacacagaccacgtgctccccattgcttggatcttaaggcaatttgggagaccacgggctccccaccgcttcaatcttaaaataatttcgaagactacatgctagctataagagcgtcatacttcatcatgttttaattagatcatggatacttacgcttcataagggttcctatcctaaagataacctaccacaacccaagttaaccttcaaagatcaaatacaatcgctcacaattaaagagttaggtgaaagtcgaacccttaacaaaagaaaatcaataaaagtttccctatcactacaccacacaatgcatatagtatattagatattact

SEQ ID NO: 95920 - DNA, 577 bp, Cannabis sativa
ttatatattataattgcaaatgtagaaatgctattatttttttttaaattaaaattttatactacttaattgtagttatataatacttttttaattaattttttattaaagaaagtcacatataatttaatttaataaatattataaaatatgactaattatttacaagataccattttacaccacgatatcttatactaatactcttttaaaaaagaaaaataaaatcataagcatattctagtaatttcacgtttttcttcccgatagtagatgtctcaagctaaaatttcctccctattataaataaataaataaaaaaatagacggcaattaaatgatagaattatctgattattaattgaatttatttgttctaatattacattatttccaaataaatagttggattatttagtaatctttaggtacttatcacaagatttatagacatttactaatagtaatagtaagaactaaaaagtataaaaaaagggaaaaaaacaggaatattccaaaaaaggtaaaatattacaacaatactgtgggccggcccaatcaacatttgtacagccca

SEQ ID NO: 95921 - DNA, 763 bp, Cannabis sativa
  modified_base (124)..(128): a, c, t, g, unknown or other
  modified_base (289)..(294): a, c, t, g, unknown or other
tgttgtcggtgtcgaaaaagttgtcggagtagctgccagtgtcaaaaaagtcgatagaattggcattgtgactggaaaaatcactaataaactggttttttcagcaagaaaccagtttcttggnnnnnttttcagtgatttttccggcgacaatgtcaatttcgacaaatttttcggcatcggtagcaactccgacgactttgctggcaccgaccgttactccagtgatttttccaacactaacaacaaactccggtgactttttcggcatcagtgacaaataaaactnnnnnnacaaataaaaacattaattatgggatttaaaaacctaatttacatatatatggcgtatcaaataccatagaaagacgtaaaaataaaaaaatactatataaatttggtcatacttaaaggtgccatatttatcattagagctttttttttgaataaaaatcataagatataataattaataaattcgttcaaaacaataaaacgcagtccagcggaacagccctccagttgaagcacacgacctgtagagaaacaagagtctcttgccaagcaatgagcgaacttatttgtagatcattttacaaaacacaaatcagcaaaggataatgccagaagtaaatttcaaacatcttcagcaataagacaaaaatgtgaaggcataaaaatgccgctctgaatcgcttagacacaccaagctatttgaaactaacatgactctatcccacgaatgagttgcaatccaactcaa

SEQ ID NO: 95922 - DNA, 621 bp, Cannabis sativa
atagtattcaggaatttgtttgtacagtaacatccttgcattttcatctactctatttaattcaaagaattctgttaacattgattttttataatatttagtattagcaatgtttgacaagtcagaatttcctcggaatgtaatcggatgctgattcttgagatgtaaatgcaagctatatactgttggggacatctcatttacaataaaaccgtatattctccatattgcttcaggggcagcaatccatcgagctatctggaactgatgtatttcatcaactggttgattgtttgatttggagaccaagttgaatgcaacacggtcatggcctttgtaaatgtatttatagagatactttaccgccttcactgtagagcatatttctacattaatgtggcagtcaaatgtggcaaggagatatgggttgtatggaacaacccaaggattgtctaatgttgccccctgaccttcacagtcacaccattatttgaacgcctataaatagggaaacagtcatttccgacaaacgtaaatggtgcatacttttttggaaaattatttttgcaacgtggattatcccctttcatgcacacatttgttttgttcaattccccacaa

SEQ ID NO: 95923 - DNA, 575 bp, Cannabis sativa
caactccgacgacttttccagcactgaccgctactccgacgacttttttccggcacgcacaattgcaaaaataataattaaaagcctactttaaatattaaatcctaattatctgctaattctcaaaataaagctaactgatcatcaaaatttctctccaattttgtgaattccaacccaagaggtgaaatcccttcactcctctccaattgtatgtatatctagtctagaggtgacatctcttatcactcttttccaattttgcatttccaaagcgcaatgccaaacaagcaagtttaagacagggataacaatcccaacgattgtgggacattttcctatgtataagggatattttcataaatctttatttattcattattttagagaaagagacgggatgtgaagtgaggtaccccaaatagtgggggatcctaacaaagtctaggcctatataaagacaatgatagactagggtttaaggagaacgacggcaacttaattaatcattccttgagaccttctctcttcacttttttcttgagttcttcttactagtacgacaccaagccttc

SEQ ID NO: 95924 - DNA, 994 bp, Cannabis sativa
  modified_base (391)..(392): a, c, t, g, unknown or other
aatagaaagaaaccctaaaatataaatgtaaaataaactaaaaaaaataaaactatttaagttagaaacaaaaacatgaaatatgggtttggataaaaaaatatgcatattaaataccataaaaagtcttaaatatgaaaaaataccataaaaaagtgacaaacctataaatgacatatttttgtaactttttttataaaatctcatattttcactataataaaacactattaagcactgcattttatttatttatttatatataagtaatggtacattcacaacaacactcatttatatattttatatctagccacagatctatatcatacatcctttcttatttcgctgtatcattaattttctcttcacaaaatatatatatatatanntatatatatatatataaaccattacatagtgctcattatatacataaataaatattatagtataaacacacacacatatatatacacatctccctacatattgaacttatttctttttgtttttggttataaagttttattgaagagatctatctatatcaatccaatattaatatacaagtatgaatgagatgatgagtagttacaagaatgtaatagcaatggtggcattacaatgtatcactgcagctgtaactctcttcagtaaacttgctttgtctcaaggaatgagtcctagggttttcgtcctctaccgccaactttttgccactcttataatggctcctattgcttttttctctcgatggtacggtactataaatatatacatataatcataatcataatcataattattatggaaaataattttaatagcaattatatatctcttttgttttttattcaggaaagatccacatgcaacacccttggaattgagaagctttaatatgatacttctcacctctttaattgggtaattaattgtcataattattaattttgtatataattattacccttatagcaaattatttagt

SEQ ID NO: 95925 - DNA, 1437 bp, Cannabis sativa
tgtagttacatataacataaacaaattgagatttttttttataataaattagaggttattcttgaatagagtattcttaaatagaggttttactgtattattaaatgtagttacatataacataaacaactcttctttctttaacattgtaatttaaatttaaactcattgtatttatctaaaaaatatttttctattattattttttttattaataaaatattaaaatattgttaaactaaaattataattaacaataaattttaaatattattatatgtttttataaattaatagcacttaataaattatatattttttaataaaaatgaaattaaatatatgtgtattataagtatatatattgtcaccttttatatcttatctcgaagagctatgacactcatattgtgcttgggtaagttgttgttcggttcgcaaacattgtaccaatgaaactgataatcattaacatagtattagagcatgaccaatactaactattttcaaagtagttaacatagtccctttttttatttttaaccaattaaatttaagaaaagtatgtaaagtaaattaattagactacggtgtttaacaacaactatcttttttaaatattaagtacttaacttctccacctcattaaattgaccccaacatagtgacaagctattctttaaactacaacattgatgatgctcttatgtgctctaattatactcatacatggaaacttgtaataaaaaataaaaacaaagaagccctaagagcaactccaatacaagatccactctaaaaaaagcctataatctctgtattattccaaaatatactatattttctttcatccacatcattttaagacattttactcttaaaattactctaatattaagcacctccaaaaattgacagcatggaccaacacattatttaatgaaattactaaaaagtatcactggtgtcactgtttaccattctccttagtgtcatattgttattcgtgtaattaagtatcatgtctcatataattttaaaaaaaaaatagtttttaaaaaatattgttaactaatcgtaagatgttacttataaaaagtattttttttaaccaaaaaattaatatttattaaatcaaaccagctaccaagatagcttccaaaccagcaaggacaaaacccccacgggaaacacagccaggaatagaaccaccaaaacgagctaaaaagttagtcgcctggttcccagaccgtttaacaaaactaattgaaataggaaacaaaagagaggactgcataagaccaacacaatccgtaattaaaagccccacccgagacaacaatcgcttcttctgttgcacagcttgtaccagcagcagcgagtccgactccataaccacaccagcaggcacacccccctctacccaccttcccttca

SEQ ID NO: 95926 - DNA, 622 bp, Cannabis sativa
aaaaaaaaaaaagtaaaataaaattagcataagtgacttgacacgtaacatctatctagtatatatatatatataaaatttagagattaccacatatttaatattttattacttttaaaaatactgctatatttaccacactaataataattattaaaatgatttatttttacttaatttgtaagggaattattttctaaatttctataattttagtttaattataaatcacttaatataaaattaagtatacctaattttttttaatatgtatatattatatacataatgaaatacttgcaccttatttatttatttattttgaaaaagtgagtcacgagtaattgtatgttggtttgctttgcttaaccagaaaaaaaaacaagcaatgattcatattcattcattattttattaggtacctctacaactcatgctttttctcttattgtccagtctgtattttttttttctttttttattattattattttaaatttggttagatgaaaagaagaaaataatataaaataataggatctcttttttatataaatatttatttattatttacttaattaaaactaaaaatctcttgtgtttgtttaataaagatggagaa

SEQ ID NO: 95927 - DNA, 604 bp, Cannabis sativa
tagagaataacaaaataggaaatattaattttttaatatttaattaatgattttaaatctattatacccattaagagcatacccatatttattaaactttaattttcatatagctaacgaatgaattagaattggaattgggcaattaatatgtaataattataagtatatatatatatatggatgatttttctatgggtaatacccattaatgggtactaaaaaaattgatgaggtggcaatttaatgacttgctacagcaggttaccaacttttttttttttaaaaattatatttatttttttaattattgagaatgattatttttagaaattaattatttatttttagaaattatcaatttaaggctttggataaatcaaagtgtatcgagaaagtgacttttgacttttgacttgaggctgttttcaaaggaagtgcacatgttggttcaattgctactggaggacgttatgacaatttaataagcatgttaggtacaaaggaagttccagcagttggtgtaagtcttgaaatcgagccagtatttaataatatggagcaaattaacaaggatcagaatcatcagacaactagagctaca

SEQ ID NO: 95928 - DNA, 654 bp, Cannabis sativa
ttagggttttatattacttttgaaagtaacctggtaccttacttttgaatatggttgagtttgttgtgctgtgactgcaatttttaaccaaaaaaaaaaaaactgtctaaaaaaagtcatctgctagtttaattttaggcttttgtattgcttctgaaagtaatctggtaccttacttttgaatatggctgagtttgttgtgttgtgactgaaatttataacaaaaaaaatactgtcttgaaaaaagtcacctgctggttcaattttagggttttgtattgcttctaaaagtaacttggtaccttacttttgaatatggttgagtttgttgtgttgtgcctgcaatttataacaaaaaaatactatgtcttgaaaaaagtcatctgctagttcaattttggtaccttacttttgaatatggctgaatttgttgtgttgagtgtaatttataacaaaaaaatactatgtcttgaaaaaagtcacctgctagttcaattttaaggttttttcttggacttgaaattggccgaacaaagaatggaattttcatatctcaacgaccattcactctccaattactcactgatacgggctatcttagagctaagcatgcatcaacacctatggaaactaacctcaagcttagcaaagata

SEQ ID NO: 95929 - DNA, 962 bp, Cannabis sativa
aaacaataaaatcaccactagggggttaaaagagtcattcttttacgtgaacaatccacaataacttagtatttagacaaccaatccatacctagaattaaataaaatttccccggaggcaacactaataagtttccagacaacttgtgtcccccaaacacaatacaaactgacctacatatggtggatacctcaccgtgatctcccataggtacactcaaatacaatgcaggattaaaattttcccaacttaaccctaacacactagcaaacatgaatgatataagggaatgagatgcaccagtatcaaacaacacatgagcccaagagtgtgagataagaaccataccatcaacaactcctaggtctgcaccaccctatacatcatcaaccccaagagcataggcttgagtggatgactttggttttgcttttccctttcgttgactaggatggcttgtacttgcaccagaccctccaccttgattgtaccctctttgactcccactaggagtaggagtttaaaaaccccttgtcagagtacaccccatatgttgaaccctgaaccttgtggcctaagctaatattgatattaagattgttggcctgattggggtgttaaaccgtaggaggaaggctgagactgttttgtcttgggctgtccatgaaaaggagtagactctacatagctcccttgagtccttattgtggtaattgcaacacgcgagtagaagtgtttgaacaagtattactcacaaagagtgaggtcgatcccacgggattgtagttaagtacgttataattaaattcttacttctatttggctaagtaaaattttgagagaaaattaaaattagaagaacgagaaaaacaatgaaagtaagaagcatctaaattaataaagaaaatttaaagtgaataaaagttagggctttcgatttcaattgtatctattgattatg

SEQ ID NO: 95930 - DNA, 654 bp, Cannabis sativa
gatttaacccacatagtattatgtctgagtattcatatctttattttattagtttttatgttgtcaactcaatatgttatgaattttgagactttgtttttcaaatcagaatttctatcaattttatttgtatggagatcatcaaccttatactaatttttttttttgagaaagaagatcaaagacaaaagctaaagctgggctaagatcttcaaggagaggaactgaaatggttccaaattatctctttgtccgttccaagggctgatcgggcaagatcgtgagctgtggtgtttgtagaccgggaaatgtaatggacgatagcacctggaaaagacgacaaagaggatacgatcatggaaacaagacccgaaagggctgaacgatctggagagaacttctggatacggtgcaccaagttctggcagtcggaggcaataacagcaattggaaaatggactgcttgacaccaaagtagcgctcggttgagagcttcagcttcagcataaattggggggagccttgaataagaaggagccatgaaagttgcaatgactttactatgagaatcagttactgcagctccgtacccatgcttgtttgtacattgagaaagggatgcatccacaaaaagctgaaactttgctcttggta

SEQ ID NO: 95931 - DNA, 505 bp, Cannabis sativa
tttattataaaatatcattaattaattaaatcaacttataatttaaatttaaattaagatttatatataaaaataattatgtaatttttaatacttttaaataaaatttaaatatttaaaactattttcttaaaaaaaataataattaattgattgataaataaaacttgttagataacatcacttttacttttactctaggcgacatctattacatttatatctttagtgtggcaaataaaatctaaatatatatttagttctatgcataaaaaaacaagcacacgtacagctataatttatatattattttttgtacgctaaaaaagaaattgagttataatattctaatatattcttaagttatatatgaacaaaaataatacctctatttaaaaagatttatttctagcaaaaaaataaaaatataaaatttttaattcatcacttacattcgagaaattgtaagaatttgaaaatagtttgagaatccgcacaaagcaac

SEQ ID NO: 95932 - DNA, 891 bp, Cannabis sativa
  modified_base (825)..(825): a, c, t, g, unknown or other
caaaaaaggactttacaaactacaaatttatgagctttagaggcagtttttccaacccattttataaaaagggaagataaaaaatgtgaaaatacacgcctggtttagaattaatatttagaggcgattttttggtaaaaactgtaggtatagaatttaattatatctatgttgttggttgggggttagggtgaaattaagggtttttgattaaccctatagcgtcggttatttagtattaaccaacgccataggtgcagcctgtagtcgacacgtggcacctatggcgtcggttaataccaaataactgacgccatagggttatatatcagaaccctatgctttgtcttcctcattttaccatcttcttcagcatgaagaacaaccaccatcgcagccccaaacccacaaaaaaaccctcgccaaccaccaagaaaatatcctcaatctccctcatttcttcaccattttacccaaattttgtcttaaaatgttctattttcaatacctaaacctacactgtaaaaaagcttggttttttcccctctatatatcaaattgaacctattatcaaaaaaaaaggtagtggtataactttgaccaccgattttagcaaagaaaacgttgaatctcaacgtccattaaggtataaatatgaattttattcattttattaatgtacattggtattatttcgtttttgtaaattttttttgggatttttttattttagtaatattatattgtgtgtgctatatgtggccgaattgttgtcacaatttgtcaccggattgcttttataaggtaaatatttattaacttganatataatatatatgtatatattttgtgttttattattgaatatgtatttatatatattgtgtatat

SEQ ID NO: 95933 - DNA, 600 bp, Cannabis sativa
gccccatgctcaatatgatactctaaccaagccaaccaacccaggggaagcaggtgtgcccagtaatctctatgaggtatctcacaatggacacccctcactaagccactagcaagtatcttgctaaaagcatcatcaaaaagggtagaagcgggagagagccaactgcctccctgtgatcttgcatctagtatctcaggcttagaaggctgctccaagacgtgatctaagccttacactgaaggctcaccaagcctgttcagcagatcgccattggcatcgtaacgacccaagggacagttggaaatgaaaatacaagtcctttacctcctcctcctaaccggtacagcctcctcaagatcagactcagtatcaggactctcagccccctagtcaatctctaaacatcaacatgaggctgagtagcctcctctacgatcctaactcgaccccttgtagccaccttagctacatggaggcgttctacgacaagtctacttcgtcctggccataattacaaaataaataagggacctacgctggtgtcacgtcccctatccaacatccagtgccacttgcatagaagagataagggaaggt

SEQ ID NO: 95934 - DNA, 596 bp, Cannabis sativa
cttataattaaataatatattaaatattcaagaaattaacaaatttttaaaatttgaccataattaaaaaaaattatgcaatttttaaatttaaatctcaaaatatcataaattaataagaatctattaaaataaaatcttattaatttgtaaaattgatatttgagtttaaatatattaaaaataatttttatttaagatatttgtggtttgaaaaagctaaaaaattcgaaattggttgaaaaaatccccaaaaatcaaattttggtgcaaagcaccttggctgcccagtaggagcccgtgcggagcaagggttggcagggttcatgagcggaaaacatcggcgtttagaaggtgctggggcagatgcattatgcatcgtgtctgaaggcgagggacgcacgggtctttagatagggaattatccctgtcacgcgcgcagatgccccaccttgtccgagtgcctggtgcatgcgatgcaccccactcgacacctcttagtctcgaaacttcaaaccaccatatctctctcattttttttattggaattgagttccttaaaaaccaaaatgacttaatttttcacaaggaatcga

SEQ ID NO: 95935 - DNA, 594 bp, Cannabis sativa
cttactatacatacttattggagtaagatcatgctccttccttaaaagattctaaaaaaaatagaggctatctgcaaagcttttctatggaaggaataacacataatgactgaagcagggcaaatagtatgggaaaacatctatcaatctaaagtagctggaggcattgaattcaagaatgtagctgagtggaataaagcgactctgtttaagtatgtatgggctgttgcaactaaagaggacaatctatggatcaagtggatacacagtgtgtttatcaaagaagtagattggtaaagctactcggcccccaacaaggcagctggtattggaggaagatagtagcaatgaaaggtatagtcctaacactaatgaatcattcctcttttactcaaagcaaatacaaaattgtagatggatacaaattgctatgccctatgccaggccaagtaaattggagtaaagaagtgtggggaagattaaacactctgaagcatatctttgtaatgtggcctgcaattcaaaatacattgaagactaaggaaagactgtttcgatttaacattccatctgatacttgttgtttgatgtgca

SEQ ID NO: 95936 - DNA, 721 bp, Cannabis sativa
cgcttcccttgttcatcttcggtttaaaacactcataaccccaaacgcactaaaatttaacatatttacatatcaattcacatcacatatgcagtgctgattttttttttccattttttttttcaaatcaacaatacactacctttctcttagaaaaaagaaaaaaaaaagaaaaacaatacactaccttaaacctttataatttaatattgcattagtattggtgatgatttaatgaatatgatattcttataattttttattataaattttatttttttatgaattattataaactatatttttttatgaattattttaaactatatttagtatgagttttattaataatttttaaaaatatatatatttaagttattacttcattatcacttttttatttttaagtttggtgttatgtagtacaagtttgctatatattaaatataaatttaagagattgtattttttgataaaaagaaaaaaaatatatatatatataggagctttaaaatatttgaaaaaggaaattcattgtgttgtttaggtttaattagaattattatgacattttgtataatgataggataattttatggtgcaacttctaaaaagagaaaacttctgatttttcttatatgataccctgattttttaaaatgtcatgaaaacttgcatgaagtcataataaataatcaggatcaacatgttcatacttcat

SEQ ID NO: 95937 - DNA, 740 bp, Cannabis sativa
ttatttttcatttattccgttacatttctccattaatttattccgattctgaatactgtatagtaaatgtgccattaatgtattgtttaaaatttttagttacaaccggtaatcaaattaccttatgcaaccaaaacacttcatttcagttgaaatactaaaaaataacaataataataattaaaaaaaaatgaatatcaattgattaaatatttaatccgactaaatagctaaaattaatcttttttattattttttttttctttatgattagacatgttgttgtttagtttacaactcaataaattttaacaaggtatgtttttttaaaatatttttttttctttccattctaaataataataatgtgtctttcttttaagattaagaaaataaaagatataaatacctaaattcaataaaaaaaataatcaagttgcaccatctcgtagtaggcgaatgcctatttcttgcccaaagttgtcggatatatttgtaataatattggctacaattgaaaaggtccataaaactatcaattttggttctatatttgttcaaatgaaattgcttagctaattctctgtgtataactgaaaaatctttttttcttccaacttttcgatctttccattgattacccgtgagtagtattgaacatttagagtgggtttgacctggacccgaccaaccctcccggacccgacccagccaacccttaaaattaaaaaaaaaaaaaa

SEQ ID NO: 95938 - DNA, 544 bp, Cannabis sativa
atggctccaaattcggatgcaagtctagttaaatacataataaggttataccactctactctgtgagatactgtttggttcaaaagacaaagagtccaccacgacaaattcggtaccctcatggggtaatctagacgtaggtagtcgaagagacattcagatagttcccaaatatcaccttccaatatgcccaccaaacacagggcctggctatgacagaggtttgtcccctactttagccccgcagagtgtgttttacactaaaaacatatcaccttttttttttccaataccatattctctgaaattctcggtacagacgtagctgcccacaaaaccaggcatcctaaaatggtccccgctcgcatggacgattgcaatcttgtcaatatggcctcactcaattggcccaaagtcagtatattttatttttgtccccatcagtgggcctattttgcaccttagaatactattgggtctgagtatatccataccaggttgtagcctataaatagaacataatcccttcatgaaaggcaatcga

SEQ ID NO: 95939 - DNA, 2516 bp, Cannabis sativa
ttaaagatgaaagaaattattttaagaagcaaaaattataagcatatattgtgttgagaatcaaaataaaaataaatacttaattaaatacagtatgtttcatctttcaccttaataacaagggaacttagaaacccataaaaaaaattaactaagaaaagcggtaaactaacactaagcgcttcgagtattttctctaaatttttctgtctcaaaactgttttgaattctagaatcctaagcttctatttataggaaggtaaaaggactaatgcacaattaaatttattataaattgtatgtgggtaaaaatgcaattacccaatagttgaattcagagtgccacaagtcaagctttgatttgtggctttggtgtgcaacttgacacgtggcaccatttaattggctgaaaataatgcaaggagacaaaaatgcaacacgtgtcccgtgcagaataacaggaaaaacttctttcttaaagcacggtgagcaagtggggagaaaccccactcgcgcacttggaaagtgagccgcacgcatgtaccacacaaaagagtgaggcccacgcgcgcgtggagagcagcagggggacaacggcacttgtgcttctatttgttagtggggaccgcatgggtagcacgcaagggctcgacacgtggtgcgccaagagagggggctcgggcatttgggccgagtattgggctattttttctctttaaaaatatcatttcctcttgatttgggccacaattttatcacttaattattttctttttacaaatgctattttttcaatcaagcacaaataaaattaaattcaaacaaaatattttcaacacaaaaatatatcacattaatttaataaaaatatttatttaaagtctaattaatttttaattcttttaataaaaataatgtatttttttatttcttattctcaattatgctataaatactatttattatttataaatagagattaaattaatctaaaataaaatattttcaatattaaaatatataactttaattttatgaaaatattatttaaaatttaattaacattgtatttttataccatgaaatatgtaatattttgagatttaacacctccacatgcccccagccgttttgcacttgacaagcatgtcgtctacatacacctccatattgcgactgatgagatctttgaacatcatattcactagcctttgatatgtggcctttacatttttcagcccaaagggcatgactttgtagcagtacatgcctacatctgtcatgaagctagtgtgctcccgatctgatggatgcatctttatttgattgtaacctgaatatgcatccatgaaactcaggatttcatggccagttgttacatctacaagctggtccattttgggaagcgagaagcagtcttctggacattctttgttcaggttggtgaagccgatgcatactctccactttttgttgggtttgggcaccaacactaggtttgatagccatagtggatagaatgcctctgttataaagtcatgggctcgtagcctctcgacctcatcgttgagcgcttgggcgcgctccttatccaacaacctcctcttttgttgcacagatcagatgcttggatcgatgttgagtgcatgggtcatcacggacgggtcactcccgaccatgtatctatgtgaccatgcaaaaaggtctacgtttgccttgagaaatctaatcagtattgatttaatatttggcgctaaacttttcttgatctttagtcttcttgttgggaaagtgggataaacctccacttcttctaactcttctacaaacccaaagcttcttgaaggatccctaaagcaaggatctatgtctatgtccccgctttgagctggacttcattgccttttgctgggctcatcttctaggcccttggcaggcatcttctcttccttggctatggatagggccaagttgtaacagtgatgggcagactgttaatctcctctcacatacgccacccatgccttatttgaaatttgaggcataggtggtagatggatgtgactaccttcaggtcattaagggttggtcagcctatcatagcgttgaaggccgagggaacgttgatcacgaagaactacgccatcagagttttggtggttggattttctcctattgtgaggggtaatttgatatacttgacaggtgcgatgccttcgccaaagaagccatacatcacttcattgcagggcgccaggtcagtgagttggagccccatcttttcatatgttgacttgaaaagaatgttggaggaggctccatcatccaccatgcatcttgccacgatcaagttcttggtttgtgcagtaatgaccaggggtcattgtgtgggaaactgacctgagcagcatcttcctttggtgaaagagattgtgggctttataagctttggttgcttagagcccatgtcttcaacagctaggatatcgcttttaggcttagagtgtccgagcatg

SEQ ID NO: 95940 - DNA, 680 bp, Cannabis sativa
gacctccaacactcacacacccacctatggccacttgagctagccccaagtggttgtttttcatattgtactaaaatgctcttttacaatactaattgattgtgatatagatatatataatataaatatgttggaaacaaagcatgtgcaaaacagtctgccagagggctccaattgatttccaaccctagaacttgcacagattattaattcgcatactctttcccaattcgcctccttccttcacatgctttcctccatatacaattctatgtataattattattatttataattatatatattgtaagattaattaatcattttataaaacgatcttgatgatatatattgtttctattattagcctcatttaattcttgacaagatgttagaaaatatacgtaatcaatatcttaaatgaaagttaaattttacgtatacgtacgtattacacatcatcaattaatatacggacggagtttgatcaggatctgactatatatttttccatttaataattaattaataagtcattattaggagatcaggaataggaacatttatataataagataaatgtgataaatattctaagatatattaaacagtgtatttgtctgattaaactaaaacatcatcaaagtgtgttacataatattaggagttattataaggaa

SEQ ID NO: 95941 - DNA, 594 bp, Cannabis sativa
  modified_base (500)..(508): a, c, t, g, unknown or other
  modified_base (554)..(564): a, c, t, g, unknown or other
aaagagtgaaaactaaccgaaaatatgtcccgaaacttagactaattttagcctaacaggctccaacaactgacctatatagctgaacatcttccaatggttccccctagtaagctgataaatgaataccactcgtcattggagtaggtgtaggcttggcattactcatttgagccttaacaaaaagatctttagcatatttggcttgtgacaggtgaatacctacatcagtttgtgtcacttcaattccaaggaagtatgtgagagggcctagattttttacaacaaattgtcgactaagagctataataacaacttccactgcagtttgatcacttcctgtgattattatatcatcaacattgactaatataagtataacagaatttgaagtatgttgaataaaacgtgaatgtctagacttggatgaagtgaatccaagagacagcagatagtgtttttgttgggttttgtgcatgccctaaataaaacttatttcnnnnnnnnnagatttattaattaataaaagatcaaaaatcattttatgttgcatnnnnnnnnnnntttatttcatgattatatgtttaatgtata

SEQ ID NO: 95942 - DNA, 1171 bp, Cannabis sativa
ccctagtattgacgagccccatgttgacttgggctaaagtacatttaataatgtataatttgagttggttcattttccagctttgatacacgtgtcaactttttattgctgttcaaaatataagtataacgatagtattaatttattatttttgtcttttctttttttgaatttattcttaaattacgaatcttcttagattatgttaatgaaaaatcgcgtcaacatactgaatttgataattatcaattcgaggtacttagggaaagacttgactattaaagaggcgtaagttataagattaaaggcaaagaaaaaaaaaatcatacagtcaaagtcagttacttccgcatccttcgcccctaatgaaatgtacaatactgtgatagatatgtttacgactcttttgacacctaaacaacgtaccaattttcataactcacggtttgataattttatccaaatgtatggtcaatcacaaactccaggtggtttgtcttctcagagctatgtcgctcatccatagtagtaacatcaaccttttctgcaacagcaacatcagtcttctctgcaacggcaacaccagtttggtctgtagtagggaaatcttttcgtatatggaaccctttcccagtctccttcgtttcgttcaaattttattgattttgggatatttgggagttctttgcaggagcaacaattttttctaccccaatactcaaccaagctcagttaggagaacatacacttggtttatcgtcagatcaaccatatgttctttctccggcacaatcacatctcaaccccaataatacgaatcaagacttttttctccaagacattaatgttgattttatggaataatattttttaagtatgttaataatttagacaatacaaatattaagtatattttatttatttagtttaatttgagacattatgttaaattataatatttagaaattgttaaactatatttaatttttatataatttattatttatatatttcatttttatataatttataattttaattttatttacagtatttattttatttttaaaaagcattagcagcgggggtctgccactaatgtccgctgctattataacgacggactcaaagcccactgctaataatcattaatagcgaccaattattagtg

SEQ ID NO: 95943 - DNA, 2351 bp, Cannabis sativa
tgtgctctgtagtaaaaaaggatgttacataaacctttaaaagtcattttcaatctcctctggagtgtttagtgactcagttcaatagtatttatttggcagtatcatttctgaaaggaaattcattgtatttttgagcctccttttaattgtgctcttacccgtagatgcttagcattgacaactaaattactagctttgcagagacgctgaatgtaaaatcaattcactcactatttatgtagtataaattaacatttccttacctttcttttttgtcagccgagacaatctgtgcaagaactgcaagcgcccaggccattttgccagggaatgcccaaatgttgctgtttgtcacaactgtgatcttcctgggtaaggttacaacacacaatacatatatgtgtgtgttttaactcgtttaagtatccgtactcatacatactacttattagttcattggatttccacatggctcttgttataccgaggttcaaagttctttatgctattttttgctaggaaattattgaacagttttgtataaaacatcatgtgctttagtgtttgtttccaaagtgtattttgatttatcaacaggttttcatgctctgtacttttatggtatatttatgaaaaaaatcccagttttggctgtttgcattgttgctttcatgagaaacagttatacctcgagattcactagctgcttaaagatattttatgttttccttatttttgtagatttgattgatgctattgctcttgtttaattatctatttatgtttcgtctagttgcggtttttgttactttctcagacaaacaaatggggttttaaactgctgcactgatggtactaattgtgatgctaaaatgttttgtcaggcacattgccacagaatgcaccacaaagtcactgtgttggaactgccgagaacccggccacatggctaacaactgccccaatgagggcatttgccacacctgtgggaaggcaggacatcgtgctagagagtgtacagctccagctctgccccctggtgacttaaggctgtgtaacaattgctataagcagggtcacattgcagttgactgtacaaacgataaggcatgtaacaattgtaggaagaccggtcacctggcacgtgactgtccaaatgatcccatctgcaatttgtgcaatgtatctgggcacgtcgccagacagtgccccaaagccaacattctcggagagcgtggaggaggaggaggtggtggtggtggtggaggtggtggtggtcgtagcagtggctacagagatattgtgtgcaggaactgccaacaactgggtcatatgagcagggactgcatggggcccttgacgatttgccacaattgcgggggacggggtcacctcgcatacgagtgcccatcgggcaggtttatggatcatcggtactcaaggaggtactgatgaaatgtctcattgtgtggtgcaggagaatttgttgaatattcattttctagatcaatcaagttgacaaaacataaggaaccatactttggacctgtttttggcgtgaattggcccgtatgtttatttggaataggatattagaatttgttatttgctgtgtttatgcttggattgaaatcttagttaccccaaataaagaactgtgttagttagttatagtcaactttttcttttgctttttgtctctttgatgtttatcttttcagttctgttttagttatatacatatttaaaatgttattttattttatcacaaagtcactgtgttgcttgatgtcttgttatgtcgaacaaatattttgttatatttggtgtgtgtatggttttgaatgggaaatttgattttctatccttacatttaaggggaaatttttcccttaaacctaaaataccctatattgataaaataggataatatttacttaatttttacattacccccctcattcaaatctgattcccctctctttcccgtctgatctacataggcattgggccccctcagacccaccattggaaccatcgaacccaacacaatttttttttttgaaaaatcactcaacaccatcgggtctcatcggatccagcatcgtgtgccatcggacccaatgagaaaatccaacacaagcatcggaccccatcgggtcttcgtcttccccaacccattcgcatgagcatcgaaccttcatcgggcctgcatctgactgcatcgggcacggtggtttggtcgagatgggttcgtggtggaggaggtggatcggcgtggatttttgttgtggtcggtttcgtggtggtcacggcggtcgagcggtgcggtagaggaggtggctcgg

SEQ ID NO: 95944 - DNA, 615 bp, Cannabis sativa
gtggcaatggtcaccttttagggttctggatgtcaaaatgaggtttttgggtcccgagacctccaaaatatgcctcaccataaaaaaagaattcaaagcacacctcgaggggtccgagaacatgcatagccgacctctgcaatttggccatggcagtgctcgcaactggtacaagacaacataaactgccttcagtaaaataggcataactctctcaatttttatccaaatgacctggttcaacttgcgttggaaagataattttgagaaggatcaaagtgtgcctcacagacatgactcaactctgaggttatcgggtccaaaattagcttacaaggaaaattggtgcattttactcgagaattgggaaatgcggctaagcgagggttggtggagcacactgccacagcctatgtagggttgtgcgcaagcatcggcggtccaaaatgcatgtgttcagcactccatcttaaattggtgcatcctcaattaaaaataatcaattgtccaatattggtgggacatttgcctagattcaaggagcttgttattgatatttatttatttgtaatattttattcataaaaaaaaagtggtatacatatacatgatttg

SEQ ID NO: 95945 - DNA, 693 bp, Cannabis sativa
gaaggatgccaacaaagacatctcgattattacaccatacaacgtggttaatactgaaataaattacaatttatttttggtatgattgtgctcattatggttataataggcattgtttactaaggtttttataaacaaatttaattagagcttaagaaattaatgaaccaataaagaaaatagataaagatttatacgtagttcggacattaatgaaccctaatccatgagtctgtatattagccttagaagacttatatgatggattacagtggtgtttacagtagaaaaccctatgtactattagtttctcttgaagaagaagaaagcttacagagattttggcaaagcttcgactattacattttccatttccctttttgtgtgggaataaaggggtatttacaagctaaagtacgggcatgagcatacccatgacccgtctagggtttctacaaaaaaggcctactattggagtaaaatacattaaataactaactattggacccccgagatggttctttctcgtgtggtgagtcatccatacagtggggaccattgttggtcgaaggcatgtgttgggaaaaggcttgcattgggtggaaaaaatgcctagaggtgccgtctgacaaagaagagtattcagagggtgttacgcgcactaccattgtctaacacaggggataagatttg

SEQ ID NO: 95946 - DNA, 525 bp, Cannabis sativa
tccccaccccaatctgtttgaagagcctttagtttagtaccaagttgcaactcactttcagctttaaagctttgaaacactttaaatgcatcagatttatttttcagcaagtatagccaagtgaatcgagagtatacatccacaaaatgaatgtaatacttataaccactagaagagagagtgtgggaaggcccccataaatcagaaacaactaattgaagtggctcagtatactcggtttcagatatttttgggaagggaagtttgtgaattttgcctaaacaacaggcagtgcaaactttattactctcagtattttttaaggacatgttacatttattcagcacagtttgaacaaccctagaagaagggtgtccaagtctgttatgccatactgaaaaaacagaaaagttattgagagtacaattcgaacaagagtttgcttcagcttttacaccagaaggattgacagtgagaccatggtttgactgatctgtggaggtaggggagtgaaactgaagttga

SEQ ID NO: 95947 - DNA, 530 bp, Cannabis sativa
ttcatttgctgtttcagttggaggcggcggcaacacctctaccaccacctcaacaagctcctccacagtatctcctaaacgatcatcacattgctctatcatctgtggagcacaaagagccactttgagtaattttggcatttttaaaaaaaccatggtagacttatgctagttggttaacatataacatggtatttggatgatgttcttccaatcatactagagggcaaccattgatcaaatgataacagaataacagtctttaagatgattcaatactaaaggaacaaaaaaggggaaaaaaattaaaacgagaacaaagcctataaatcacataacttctatcagcatatcaaaataaatcactagttcttttatcacccactaatgacataagtttacatcctatattgcagatttaaattctgtaacatgatgacataaatattagacagtaacaccaagaaagatgataatttatggaagtaagtatatacattattgctaacaaacaagatatgaaaaatttg

SEQ ID NO: 95948 - DNA, 908 bp, Cannabis sativa
aggtatgtatctgcctttcccttaactagtagagatggaaattggacagttaatgtacgggaaaattggacagttaatgacacttgcaagcaaatctagaattagattaagcaaacataaaggaatgatatacttgaaaacgcagattgaaggagctttcatgcaaggtttgggttgggtggcattagaagaactgaaatggggagatccagctcataagtggatactcccaggtcatctatacacatgtggccctgggagttacaaaattccttctctaaatgatgttccattcaaattcaatgtttcactcttgaaggtatgctctctctctctcttaatgaaacacaaaattataacaagacggagaatactttgtgttgaataaaagaaagactagttaggatttttgtctcccaaattttgatataaaccaaatcatgctttctgaactattgagattgttggatttaaaaacttttgttcaattttagtaaggaaagtctaacatggataaaaattcaggggtatgatttggtacatgtcaaaattcgaatagcatgatttggtagatatcaaagtctggagagcatgatttaatacataaacaatcaccaaattagtaaaattaaataaaatataacaaaagtccttaaatccaacaatctcaataattcatagaaaatttttaacggtcagaaaagtttaagaatcgtgatttggtacatgatttgcttactctttcatgttttacatggctgagtatctttgttggcaatgaaaagttattgcatcaatggacctaaactcataaacttcttactctgatttggatagcttgcattgcatatactgatttctgagttgtgtgtgtattgtaggggcatccaaatgtaaaagcaatccat

SEQ ID NO: 95949 - DNA, 1423 bp, Cannabis sativa
  modified_base (786)..(786): a, c, t, g, unknown or other
acgattcccagccgttagatttctcaatctttggctttcttgtcactgaacttcatgtataaaaggacggctcatgcttgtcatttttcataagtcctctgtttcttttgtgaaatccattatcagaacggattactttcttcctgctaaaatgtctcttctgagttcagaagtttatcttctcagactcataaaacccagatgcaccaaccaattttcattcattcctatagactttaagcctcaactgaggctggaaacgatggattccagggctgaggagctatcgaccaatctaaaccaggggaaccccgtgacctgccatggtcgatcctcacaagtgttcctagagggtattgatcttgtgagcgatcttgaagatgctcctcaggctgatgtagaattccaaaggaagattggtatggtttcaggtaaatctagggaggaagttggcgtggtttctatcagagaaaccaaccagcttataaccctattttgtgccaagagatctttatgtcggcctctctctagtgttaagaaatttcttgaggctgggaaatagatctcggctttaggtaatgggatcttttgatgatgaggggaatgaggcctgtgcagagactaaggctctctacgtgtaaccagtctttctcaagctatgtgaagacggtatttttcaagctatatgaagacagtctttctcgagttcatcggcttcccctctcatcataagcttaggagaatgacttaatggttttcccctagtgacatttttgtaaagacaantctgtaaccagtcttaggtttttcttatcttaaatgtcttgtactgtttttattcgaatttaatacaattgtatttgcttgcataattattcataatttaaacaactatattttgaacgaatattcagcagttttgggtttttctattgctcgtaatcttcttgtttaagtagttagtgatttaccaaactttatgatttttgagcagttgtcaattcttcctcgcgattgtagttataatctgccttaagcaaacttaaatatacattaaggattttaatatttttaatttgctcgcatgaatagttatattatctatccgttttctaggtgtaagtactttatcaatgtgtcgtgatgcctcgtttagtactttctgagctcgcgagaaccgttagtattcagttttgtacgcgagttataacttttgattttccactcttgtcggataggttataaatcaaaaattatagttgtttgatcccttttttatcaaaaagtttgatcacggtgttataacgattcgatcccttttgtcgtcaaaaaggtttggtcaggttgttataacggttcgactccactttcgtcaaagatatttagtcgagaacctttgaatttcaaaaaaaaaaattgaaat

SEQ ID NO: 95950 - DNA, 665 bp, Cannabis sativa
catttttgacataatttattgtcaatgtctgatcactacaataagaataccgcatataattaatattattgtccaaagacttaatattaatgttgtgtttggtatcttgagatgggattaaccattatttgtatttattattttatctgaattctcatatgagcatgttatttatgtaattgtattgttctttttggttgttgctagtgtatctgctaactttaattcggtgtcggtcctcaatagtaataacttcaaggactggaaggagaacattttcattatccttggctacatggatcttgaccttgtattaatgatggatcgtcctgctccacttacggatactagtacctccgagcaaaggaggatttatgagaagtgagaccattcaaaccgcatgagtcttatgatcatcaagtgcggcatacctgaggcttttagggttgcggtgtctaaggaggtcaccgatgccacaactttccttactgaattgagaaacgctttccaaaaagcaataaagcggaaacaagtacgctttgcttagcatctccaccataactaagttcaattcatccaagtcgttctgcgaggccagttttgctaaggcatcaatgttggagttttgttctctcggaatgtgttcgattttaaagtaattgaat

SEQ ID NO: 95951 - DNA, 524 bp, Cannabis sativa
gaagtcagtcttgtttggtaagacagaattggacaaagagacgaccgtaacaacggccaacaaagaccgtaattacatagataattgctcctccccttctctgtctttaaggctttaaggcgaactgtatggggaaagaaagacgacctcaccttctcgtagatggtgtcagtgagagctactttagtatccccgtcgaccttctcttgtagatagaatcttcaatgagtggaaacaagcacccaacctaataaagttgttgagtaaggccggctttcgagcccaagcccctaacctaggttgggtgcttgagcgcatctttctcatatcgatcaaggctttccttgagttttcaataaggggcgcattagcactcctacaagaaaatggcctagctaacgcgcaccctgtagttttcttcgcttgctatgcagtacgagcctcatacagagcccaacccctttaatatgatgagaagaagatgggctgccctcttttcccaccaatccttatttacgactctt

SEQ ID NO: 95952 - DNA, 622 bp, Cannabis sativa
taaaatatttccaacagttccaactctgattatcgttacaaggagggttgttgcggttttgattcttgaaatttttgccattaggcttcaaaactgctggtgtggacttcttagtgttctatttgaagaacttcatctttctggtcttatttttctcgcttcctcctctatacgaaggcgggtgatcaaactttccaagaaaaattccttagtcttatgcgtgagagtacttttgaaatctttctaggaagggggtaacctatcaattagtacagcaacttgaaactattctactgaagtcgtaccttctgagatgatctcatgtgcaattgtttgaagcttgggagatttggcatccacaaatttatcgtccaccaattgatacttgaggtagcgactaacaacatacttcttagttccagcttcttcagtatcgtatttcttttgcagagcatcccatattttgtttgccaatttatcttaattataatagtcatacagatcgtcagataaaccattaagaataaagtttttaagagaaagtagttttcgacccatgagtccaaatcctattgttgcttctcgctttcagcctctttgtccttgtcggtagaagcttcag

SEQ ID NO: 95953 - DNA, 653 bp, Cannabis sativa
ttggatccaaaccagttagtactcctatggaagtgaacttgaaactgtcacaagaggctcaagatgaaaaggatgtgttagtagatcctacattgtatagaaaagtcattggaaagttgcaatatctgatcattaccagacctgatattgcctatccagtgaacaagttgagccaatttctcactaatcctaggtccagacacttgcaggcagctcaaagagtcttacagtatgtgaaatcaagtccaggatagggaattttatttcctgctacatctggagtgttgctcaaagcctatacagactcagattgggcagcatgtgtggacactaggagatccactacagggttctgcattttccttggaaattcgatcatttcctggaaaagtaaaaagcaaaagacagtttcaagatcgtctgcagaagcagaatacagggcaatggcaaatactgttagtgaattgacatggttgctgtccttactcaaagaacttaaggttgaacacaaaggaccagcattgatgatttgtgataacaaagcagcattacacattgcagccaaccctgtgtttcacgagagaacgaaacacatagagatagactgtcatttaattagacagaaagttcaagagggaattgtcaagacatca

SEQ ID NO: 95954 - DNA, 659 bp, Cannabis sativa
gtgattatttaatatgaataaatttacaattattcaaaatttagaaaataacgaaaatgcaatgggataaacttttagttatagtattcatgcatctttttttcttttttggattatatctaatttggattggttgagtgctgcaaatctatttgttagatatctactttttatgaatctaaaaattgatattaggaagattagttttctacgaattaaaactgaaattcaagtttgaattttagtttagaaccagtttttctgcactttttttcatcatatgaaacagcatgtgtttggattgatttcggtcttcttctcaggtgaaatcgccagaatcaatagttgttcaatttggcttggtttcttttcagttggcctgctggtttggttgctgaaaggtgtcgttattgaagaaggtcgttcgtgctgctgaatagtaagagcaaagggtatttttttaattttttgttgttaagctgtataaatatttatagggcatgctcaatgtatttgtgtaatattttagctattttagtatatacatgaaagaagccttaagaaaaaatagtcgcatgtacaactgaatatataaattttattttcagcattgtaaactatttagaattttttttaaaattaacaggtaaacttaaata

SEQ ID NO: 95955 - DNA, 530 bp, Cannabis sativa
aaataaaagaaaaaaaaaagatatttaatttgtggtttgggtaataactaatacatcacattttttgtttttgtttttgatttttcctacttatttgtttgttttagaaattccatacttttgttagttttattatacattcataataaaattctttttgtgtaattcacttgtcaaaaaatgcttgccatattgttaaagaataaaatgcttgtctaagtgattattgtggtgataagttaaggaatacatttttttatctattaattaaaaatatatttatattatattatattttattaaaatatatcaatttttgtaggtgggttgcccaatatacttttattatctatttaagtctaacacacgatttatattaacctaataaataagataagcaaattatctataaagtgggtatattctaaaatatataaaaaaaaaaaaagtaaaaattaaaacatgtaagtaaagtgaataatttcttcattattgtcacttgtgaaaaggagaaataaaaaaattggcat

SEQ ID NO: 95956 - DNA, 614 bp, Cannabis sativa
  modified_base (26)..(29): a, c, t, g, unknown or other
aaatgccgttagatagacacttttannnnataaagatatatatatatatatctcctaaaaaaaaaattatggtatatatgtgcacttctattaacagatgtccccatatataagtgtgtttgtaatttttgtaaactttattttgttttgattctcatatatcatacatatgattttaatttattaaacaattgtgaatctcacattattattttgttgtcacaattgacgaatactaaaattaatgatattggtgagtcttccctatccgaagacttgatttcattatagatgacatgtggggttatagctaggcttatattttggggtccaacaaatcccatgtgggttgttcagtgacaggtagtgtttggttatcatcaacaataatttcttgttattcatttaaaaaagaatccagaacaaatataacaataaattgaaaagtcgttttgtttgcggttagaagatagtttatagcattaacaatttatgttatacaatgagattttgaaatccttttttattccaatagattttctctaatatactaattttactacaataaaaccttaatgtattaatactattcattggttataattaaatagaag

SEQ ID NO: 95957 - DNA, 930 bp, Cannabis sativa
agtaaattaataaatgaaaacaaaaatctgaaacgtcgttgagccgaaccgaaccactctcagacaactgctattgaaccccctcacagcagaagaagacgttgatgtgggaatgagaaaaactttggctttttagataatcttttctatctcatatttcgaaaaatgccctattataaatctagtgagttcattacaaaaaaaaaattaaaaaatcaagtgaatttttaacgataatgtttcgataaaatcaacatagtttgtcattaaaaatttataaatcattttaaaataaagcaatatttttttttttttgaataaatacttatgtttattattcaaaaatggtttaaaaaaacctgacgaaaaaatgtgttaaaaatgtaatatgtataaatattatatttatattataattaataatattaattaattattaatctaatatatttattataaaagtatttatgattatgttgttgatataatatgtttattaatatataaaatacaattttataaataaaatatgtaattttattgtttatatgtttaatgtatatatgtttattatttatttttatcctatataatttatatataaaattaagagtatatttcacatgtataataaattgtaaattattttcttgaatgtataatataattaattaatataaagtatataaatttttaaatattccatctcagtgcctcctaaggaagtaaatttcatcaaaaacaaaaacatactcacaatatttggattatactattataaggagtttttattgttgtttaattattgattcttgaaaaaattattaacaaattaattttacaattaattattgtgacaaaaatacatataaaaattgcgggccaagtctttggcctgtgacaattgacctttatcggggtcattgaccc

SEQ ID NO: 95958 - DNA, 518 bp, Cannabis sativa
tgttaacttgatatataatacatacttatatattttgtgttttattaaatatgtgtttatatatattgtgtgtgtatatatattatttgtgtatgttgtacaattgtattgtatatatatttcttgtgaatgagaatgaggtagtaggaatttaattagtttagaaataaagtttttaaaattatgttagtgtgatatataattgattatatatgtatatatatatgttttttttttaaaaaaaattattctatagaatttagtaactagtaacttgttacattttttaataactagtaagtaattacattaaaattctaatttcgttctattgcattcactaacattttgttattataattaattatcaatgcatgctaagtggagtttgaatatcttaaatatttatctgtagtgaagtaagttccgcgaatacatgaactgcggtcggatgtgtggataaatttgtattgttaatgctattttgtttgttctgtattattatatttattttgttt

SEQ ID NO: 95959 - DNA, 796 bp, Cannabis sativa
  modified_base (557)..(560): a, c, t, g, unknown or other
  modified_base (669)..(673): a, c, t, g, unknown or other
aaaagtggatacaagttacttctgaaaatagagtcttgactaaaatgaataaaaaaactgtctcatcaaattgaaacttttgaattaagaacaaaagattatgagactgatttttgcattaaagatgaaaaaatcactcttttgaagaaggaacttgaaaattttaagaaaaatattcaaatgcttaaccttggatcttctatttttgaaaaagctcagaatgcaggtcaaagaggctttgctagcattggatcaaatggtattggaagttctggaatcacgaaatttgtaaaatctagtgttccaacgaacttttctgatgctgcaaatttgaagtttgctgcaacagattcaaagcctgttgctgcaaaatctgtttctgctgaagcagggtctccaggtaggggtgttcataaaatggccgatccaatccaatccgcacgatacaatccaatccaatccgcaaagtggggatatccgcacttgtgcggattggattggattggattggaaaatttaaaatccgcacttatgcggattagatgttgattgacatnnnnaagtaaccgatccaatccaatctatacttttttataaaaaaaaataaaaaaaattatatatacaagtaatttaaaagtctaatgcatataatacaattatatttcaaannnnnatagatcaaatgtatattctattcgtatatacaattttttttttctaaatacaatttaaaataaaagtaaatatttttttatacatatatttgtttttcttttgaatttattatttgttattt

SEQ ID NO: 95960 - DNA, 712 bp, Cannabis sativa
  modified_base (485)..(490): a, c, t, g, unknown or other
aaaaataccttccgtcaatattttgttgcaaatgagatacctcacgttaacttctcagttaaatgccaactagataaatacttgacaacttttaattggtccaagtcatttaattattttttaaaaaaacatttttaaatttcataatataaaaaaaaatactatttattaaaaaaaaatactaaactacagaattaacataatcgaagaaaaaattaaatctaaatttcaatatttccccaccttggcgtctcaaaattaaaaaatttcctactcaaaaccaaattattttttcagaacattttctcccactctcaaacccagaatataacctcaagaaaatttcttcaactaatatcaatacaatttccatgcccatatagatacagttgcattaacattgcacatacaaaatttaaaaaattatttcacatggacaaagaaaactgataaaattattcatctagtaaaaactaagtattctnnnnnnaaaagtggcaagtattaatcaaatattctgtaaatggcaagaacattaaagataaaaaaaacttaataagaatattgaagatgaaccaatattatttagatctatatctgtatacaacataaaaaatgatagatctaaatataccccagatttaaatgcatcagcccttcttcttcgataaatagaagaaaaaaaattcaaacccactctctctctctctct

SEQ ID NO: 95961 - DNA, 530 bp, Cannabis sativa
tgtgctggttttaatttgtttaattggaccaaagggaggctgtttaatgtggggatggaccacacaaataggaaaaccactgctaattttcctattttacatttcagcgtctatatgattatgttttgcattctctattgtattactttgtgctaccaactttttacgtggtacaatatgttatatatttatgatcaactgggcaatactttatggtttatacacattcagtgttatttagcaaaaaaaaaaatatatatataacaaatgaaactatactgtaatttatatctgttagaggtgcgcaatggacggagtttatgcattttgaatttcgggggtgtgataattgtataccaaacttgtccattgcagactacagattttcaagtgtgggtgggttgggctcgggttggaacagatacgggcaggataaaggtcgagttcgggttgatccgagcaaaaaaaaaaaaggcttttctttataatattggactagattttaaataaaaaaacatgaatacccagaa

SEQ ID NO: 95962 - DNA, 548 bp, Cannabis sativa
aagctttctaattaatttctatttattaaagcccccaccttgacattttttttcccttttttttctttttttttttttttgttaaaggttactatatagtataaaaagtccaaaaagttatttaaactttctcattgatcacctttattttataagttggaattggtaataaataatcatataaataagccattctttcaactaaatcaactacttgatagttacattgtatataatctccgccaaagaatccacaaaaaccaggactcaaaaacttatagagcataatctgcacgaggaatttgcagtaaaatctttttatattttaatttttatatacttaattttttttttaaaacttctttaaatttatttttctttttacaaatttaaagtatcacttaaatattatcgttaaattttagctaaattaatctattcactttgaaattttacaattatatataaaagtttatataatgatcatataattaatatttaacagtaatatatatttagtgtattaaatttacaaaaaaaaaattaaa

SEQ ID NO: 95963 - DNA, 557 bp, Cannabis sativa
ggaacactaaaatgctaaatttgttaaaattttacaccaaattcattccaaccatactctaaaacttatcctatatataacattgtctatagtgttccactgtataatattaaggaaaaatttcattgtaacacacacacacatgtatcttagttacattagtgttgtaacatttgtgttcttacatttttaatttatatatttttttatgttcacattattttattaccgtctgttgactgagattttcaacaacttcttaatcttgttttaagaaaattaattatgagtagagaatgatatttttatgtggttcaagtgttaattaaccttagtccacgagtcccttttattgatgagtaatattgttattacttgagagtatattcttcttacaattttagagtttcactttttctctgaattcttcgatgccctttccttttacatttctcttttatttataggtagagaaattagatattcttgggtgattggtacatcttctctttatctctaggctctacatgatcttttttgtatgtgtaggaaatgat

SEQ ID NO: 95964 - DNA, 517 bp, Cannabis sativa
tcctcaatttttctgtgataccatcagaccggtgtcgagctgcatcaagcctgcaatcggaccccatcgggccattccacactcggggtcacccatcaggcctgtaatcgggccctatccggcctaacccaattatcgggcccccatcagggccaccataaggcataatcggcccatcttccccaaccttaaaaaactaaagaaccatcgggcctcatcgggctagacaaaaaaaatgtgtacccgaagccatatatatcattaatatatataagaactcgagaaacatcaagaaatcctacaacagccattcacttcatccccttcgtctgctctctctctttctctagtgatctaagaactcgagcgtcttctctctctctctctctagtgatttaagaactcgaagatttatagccattcacttccatcccccctcgtctcctctctctagcggcaaccaaatgaacccatggatatggctacactcatcattgtcttaggtgtcttaggtaac

SEQ ID NO: 95965 - DNA, 672 bp, Cannabis sativa
ttgtatatatttgacactttttaacacacaattttaaagaattattttttataaagctagtgctaaaaaatggttatacattatgaacttaacattttatagaattactgaattaattaaagatcaaaccgacattgtgtcaaaaataaatatatgaaaaaagcctcgttttaattttcaccccaggcccctcaccggtttcacacggccatgttctccattctgagatcatcgaccaccatggaagctcggcaatggactcgcgactttcagatctatccttggacggcacaccgggaggcgttgggtggtcaaacactacaataggcagggagcaacgacaattgtttctccaccatcggggttttgctttgagagaggtatccaagttttccgtgctctgttttctaccatctcggttttgctttgagaggggtatccaagtgttggagaagttcattttgcaaatgagcttatggacattcattgtgataaagagcactttaaagtgactatttttcaggatggatggcaaagtttgtaattttgacgaaggaaaatcaagaattctaaataactagagtataacttcatatttgaattatttcgtaattctctatgtcattcttcctcgttcaggtatcatgggcataatacagtaatttcacaaaa

SEQ ID NO: 95966 - DNA, 817 bp, Cannabis sativa
ataaatatgtataataaataaaaataatatcattaaataaataaaaaataagtaatttaccatataaatatttaaatttaatttaaattataaataaatacataattataattttagcaataataatctttaaattattttgcacaaagagagacataatatgtaaatgcgtgtctgcatgctatgctaggtggctcaacccatatttctttttataatatttttcaaattatgggatgtatatgccccattattaaaaaaatacaaattgtgttgtactgtactaatatttttgaactaatatttttgaagagagattgaatatatttttgtatggggtttggatttatgttatattttactcgagctgatctttatatcctaacttaaattcatatttttttttaattttttatataattattaaattaattagtaaactatatatatgtatatattatatcttcaatttattttcatacaattgtattgacaatgatataaaaaattattataattattaaaatttaagtaataattcttcaaaattttaactaacactacaaataaattaatatagttttatttgttttaatatttttaatagtttataaaattataatattcgttatcatatttaagtttaattattattatttttaatgtgtcgccaccatgtcacatgttttttagactaactattcgtgtgtagttgtgcttgtgtcacccgacaggtttcgtatcgcgttaaaatactcgatctatatttacatcactatatatacttaatgctgccatgccacatgcttttaagact

SEQ ID NO: 95967 - DNA, 533 bp, Cannabis sativa
gttgcagaatgcaaaatattttgctaaaaagaagaaatccacgtgcatcagaaaatttacatagaagaataaaaaagatagttgtacctttaggaaacactctcctgtgcctacccacctgcaatttgacatcccaacagcaggaacctcccatttatatttccatttcattgttgacaggttatcaacctctacttttgataaaatgtgtcccacgtgtctactaaacgaactgtggggcataaaattcacagatatgaatgaataaaataattcaacagatttttagtgacaccatatgagaaaacctaaataaaatgtgacgtagaaatacctgtcactccctgttgcctcaacagcagattcatcatcaattcccgagtcatgttcctcatctgaaccagaggtctccatctcatcttcagtttgtttgtcactttccggagactcgtcaatttctagaaacagtaaagtatgaaagcagcaaacaaaattactggacaggaatagcacatttaaaactaacttaaaac

SEQ ID NO: 95968 - DNA, 596 bp, Cannabis sativa
gcccttagtaggaaaggtcccgagttggtattcagtacgattatgatttcacctcagttggcaaataacatggtcaagtcaagtattgagtttgtagttggcaaacttaatagtttgacactatagtcagatttgttagatagagttagaaatgctcaattgtggcttcagaactagtgaaggtacgagaagaattcttagttggtcaaggtaaagatttctcaatttttgcaaacaaaatgttacactacaaaacccgagtttgtgtccagaatattgtggaacttagaaaataaattcttgatgaagctcataccactccctattcgttgcatcttggtaccaccaagatgtatgaagatttaaaaccctattactggtggtgcggtatgaagaaggatgtggtagaatacgtatctaagtgcctaacttgtccgcaaattaaggctgaacatcaatgacctatagggttgttacaacctttgactcttcctgaatggaaatgtgaggatgtcaccatggattttatggttggattacctagaatatcaggcatgtttagttccttgtgagtagttgttgattgatttaccaag

SEQ ID NO: 95969 - DNA, 1491 bp, Cannabis sativa
aaaagcctgttaggaagcatgttagtagcctgatagtggaataagcgcatgtttttaaattccaaataagcgaaattagttagttctcgttgatcatgatctgaccatgctagctcttggttacgcaggttgctcagactatatggatgccaatcgaaataccaggagtcagggcaactccgtcggatcaaatgaaggtcagggagctcagtttcccccaaatgctcggtgctgaggtagaggtcccaagggcaaggcacgtggtcggggtgatgctaaccggccataggctgcccaggcttaccaagctacccagaacgctcaaaattgggaaaacaggtttgcagaaatgcaaactaaaatcaacgacaaagaagaagtgattagatagttaagacaacagggtgttcctgcagtgcctgctccagaaattccagtggcatctgccccagctgtcgaggctgaacctgtggttgtaatgaatcggatggaacctttgtatgaaaggttccgtaagcaggcacctccggtttttctaggaggttcgggtgttataaaattcgagcaatgggtaactgggatcaccaggatattgaacttcatgggcgtcacgggaaatgatagggtggtttgtgcaactttttgattcaagaagatgctttagtttggtgggacgtggtgtccatgatacatgacgttactataatgacctgggaaaagttccaggaacttttcaatgccaagtattataatgaggcagtcagaagtgccaagagaaaagagttcactcacttgacccaaaaggaaaacatgagtgttacagagtatacgacccagtttgatcgcttggctaggtttgcctcaggtatagtgccatccgatttcagtaaaaaggagaaatatctagatggattaaatgcaaagattagacatgatctaatgattactacagacgacaaaaccacctattctgaaacggtggataaggcactgcgagctgagggcgcagttggatgcatgacagagtctgttgggacttcagtggttggcggggctcctacccctcctgcatcaggttttagcatgggaggtagtggttcggccatggatcataaaaggaaagcatccactgcaactggtggctcaggtcagaagaggaggttccgggggaaccagggtcgaggcagtcgccagggtagttctgaggcccgatacatttatccagagtgccccaattataaaaggcaccatttgggggagtgtagaggccaaaggtgctttcagtgtggcatgacagggcattacaagatggattgccctcaactcagaaccgaagcaccaaaggctccaacgaaacccactccagcaagggtgtttgccattactcaagctgatgtagaagcctgtccttcagtagtaacaggtcagctctcggtcaacaacttttacttatttgtactatttgactctggggacacacattcttatgtg

SEQ ID NO: 95970 - DNA, 1694 bp, Cannabis sativa
  modified_base (286)..(298): a, c, t, g, unknown or other
  modified_base (387)..(394): a, c, t, g, unknown or other
ttttataaaacaacctaaaacaattgtaaaataacaaaacaatcactgaaatagtaaaattgaatgaaattagacaaatgtccttaaatctaacaatctcaggagttcagggggcatcttaacgaccttaaaagttgagggggcataatttggtacatgtcaaagttcaggggcaaaatattaattagctaaaaataataaatgaaattataaattttacggatttttatgtgggtaaatactatttaagaccctgtgttttgtaaaagttatcaattggaccctnnnnnnnnnnnnntgacaaaatggaccctgtattttctaaaatggtacaaataaaaccctaaattgattttttgtcaaaataaaatttaattataatccgannnnnnnntgttatgacaaaattgtttacattttctggatctgtttgtattatgaattgttttcaagttaattatattaaaaaaaaaagttgtcaaaaattaagcttaaggtcctacttttactattttagaaaatacagggtctattttgttatttaacaaaacttagagtccaatcagtaacttttgcaaaacacaggatccaaaatggtatttaccctttttatatttttagacaaaaatataatttttttttaaaaaaattattttatagtaaaattgaataaaaaattaaaaaagtaaagataatcatgtaccttcataataattagagaggtaattagtgactgtataaggataattaagtaccttaggcttgttttttcatataatttttaaaattttctcataaaataaatttgttgagaaaaagtcatatatttacaaatttatactttataactcatgaaatgaatatatctcatcctctcttaattaggtcacctgtgtacctcaaagattctcatctcattaagaatgacattatcacggtatggtagcccagtaatcctttaaagggccaaacataaatctttctataaaaagatgtggtaggattcgaacaggataggttaacaaatattttttttttgtatccactaatcaaaaatactctcatattatattttattaaatatatctacttttttgagtgggttatacaatatatcttcattctatacttaagtctagcatataatttacattaacttaagggatctaattgagacattatctataaaagtgagtatatcttaaagaatgtaaaatagaggtaaacattaaaacaaataaaataaataaagtgggtatacaatataatttcctcattcgaacccttaaccaaaataatgattgatgctaacaaatacatccctaatacttctaaaagagcatgttattgggcaccagtggtgcttagcacctatagacatgtcgccttacgattagctagcgatattccataaaagttattatattaaattatatgggaccaatacttttttttgaacatatatgagacccaatacttaattgaaccaatagcaataataacatataagaggatactatacaccattaatttttttttagcatttctatttttaaaaagccttttaatctctatttacttcttattctctcctttaatatgcactttaggggtgggcatcatccaatctaatccaatttaacagaaccgatccaatccaatctaattacaaaaagttggatatttaattacaa

SEQ ID NO: 95971 - DNA, 529 bp, Cannabis sativa
aagatgtatatctcaggagatacaaataatcaagacaagatgatatgtgagttaaatgaaatagtatgaaggttcccaagctaaggaacacaaatgatacaatcttaaaagcttataacttatacaagaagtttcctagcttcatcatggactgccaatatgatccaacaattgtctcgcataagtcgtctcgtcaccataatgcgcgaggcaaacaacaagtatatcatctcgacaaaaattattatagataaggatagaaaagggtaatgagcaattaattcatttattccatatgttgtaattataaatataaaacgtggggataattcacgctttatgaacaatttttttagacaaggctaaaggaaataactgtcagatgagaaatcatattaataagggcaaaacttagtgcatgggcggccaaattgatttagggatcaccctataagaaattcaccatttattacttgcattccttaaattttgtactatgtaacacaaaacacttagaaataataataaa

SEQ ID NO: 95972 - DNA, 509 bp, Cannabis sativa
aaagtagtattgtgttgaatttaatacatcattaactatatttatattttttatttataatgttacaaaaaaaaagatgatttttagtgacaacttttaatcataacataaattttttgttactaaatgtgacttttggtcacaacaaaaagttacttgtgactaaaacataacatttaaatacaagtaaagttgtcactaatttagttttagtcacaacacgtatcgtgactaaaatatatttagtcaaaacaaattgtgatttttgtgactaatacttttagctacagactttttagtcataacgtaagaataataatttttgattagtcacaacttttttactttagtcacacattttgttgtgactaaaagtaagattttttgtagtggtaattaattttttttttatgtttttacaaaaatattagattttgggcaaaaatttacaattttactactacacaaattttttttacaaaaatactatctttttataaaacaatcgt

SEQ ID NO: 95973 - DNA, 925 bp, Cannabis sativa
cgacgctgaaagggcttaaaaaccacctctaaaggttgttttcgtagtagtgctatcacaatgaatgatgacagtatgttgatcgattcctagttcccttgttattccttttagccacagggcttctttgacagcttctgtacaggctatatattctgcttctgtagtggaaagagccacaacagcttggagattggatttccagcttattgcacactgattcagcagaaacacataacccgattgagacctcctagtgtcaaggtcaccagcatagtctgaatccacatatccaactacatttgagttagttatacatgccccataaatgagacgaacctcagatgtcccttttagataccgaagtatccatttggttgctttccagtgttctacaccaggttatcccatgaatttgctcaccctactcactgcataactaagatctggccttgtacagatcataaggtacaataaactgcctacaatgctagtatagggtacctttttcatgtagttgatatcttcttcattggatggggcctgagtagaagataacttgaaaaaatgagtagaaggtgtgcaaacaggtttcacatcattgaaaccaaatttagatagaattttagagatgtagccactttgagaaagctttaagcttctcaattttctgttccttgtaatctcaatccctaaaattctcttaactgagccaagatctttcatttcgaattccttgctcaagagtttcttgactttgtttatttcttccatatgttttccagcagctaacatatcgtctagaaatagaagaagataaatggtgcagcttgagtgtctaacatacacacaactatcataggcacttctcttgaaaccaattcttagtacatattcatcgaatcttttgtaccattgcctaggg

SEQ ID NO: 95974 - DNA, 530 bp, Cannabis sativa
aataaagtaactagcaacttaacagtgcttgatagtgtatattaaaagtaatatagtgtgggctttgtgtgaaatggaaaaaaattctctgtataaccttgctctccacatcctcaatcattctttcaatcattctttttgatcctcctttgagtggtctagcttttttgttcaccctgtattgtagtatactcttttgctctcttcctattctgttcgataatattaaaaacttgactaaaataaaacactaaaaatggacatcataataacattgaaaatgtattccggggatctctgttataaaaattttacaaaaggaatatatacgacaacaactcaaaacacaaaatcaagatacatagcagatacaacccaaaacaactcctggcaactcggcacacaggctggtggggtcaatatgtacattgctggagaagattgtcatctcatggctgctctaacttttccttgcctttacttgcatcccagagcacttgtgagttacatggactcagtaagaaaagtaa

SEQ ID NO: 95975 - DNA, 797 bp, Cannabis sativa
ggatgctgaaactaagcaagaaaacaatccccagctcaaaaactggctcaatcaccttaaggatgtgttccatgatgcagtggatgtgctcgatgaatttgagtgtgagttactgagaagacaagttgtcaaaaaatatgcctcttttggtagaaaggtatgccgtttcttttcatggtccaatcctcttgtgtatcgttttagtgttgttcatcaagttaaagagataagacaacaatttgatgagattgctaagaatatggaaaagtttcatttgatcaaaactcaactgaatatggatcaaaaccctccaatgcatgacaacagggagatgatgactcactcttttgttaaccctttagacgttattggtagagatcgcgaaaaagaagagatcctagatatgatattgatgaatgatcacaaaattgagaatcaaattcttgtggtatctgtaattgggatgggaggtttagggaagaccacacttatcaaatcagtatacaatgatgatgcaattaaagaaaagtttgatttgacgatttgggtttgtgtgtctctagatttcaatgtcactagactagtgaaagatattattatgagtgcaactgataataaggctgagataagtaacttgactaatttagatcagttgcaaagatctttgagtcagactttgaaggataaaaagtttctacttgtgttggatgatgtatggaatgaggatcctttaaagtggcatgaattggcggagttgttgtctgtgggttctgagaaaagcaaaattatagtgacaa

SEQ ID NO: 95976 - DNA, 761 bp, Cannabis sativa
  modified_base (694)..(694): a, c, t, g, unknown or other
gttttagaataatttcttccctttctttagatgagaatattgatagatttaatgagattattgtaggtttggctaatatgaatcacaaggttgatgaaagccagaccatcatcccgttgagatcacttccaatttcatatcaagaagtcaaggaagccatcaagtatggcagtgatgttatcgcgttggacaaatgttcttgccacacttaagttgaagaatttcgagttacaattggagaaggaatccaagaaagaaacagtgtatttggcaagaggaagatcaccaaaaaagtgagttcaaagagtaaacaccatcactctcaatcaatatctatgtccagagagaaggaaacaaggaagtgttacttctaaggaaagtctggacactttcaaagattttacaagaagtacaaggagcagcaaggcttcaagaaatctcataaatggagataggaaggactttatgcacaatcaccacaggaaagactctgttacaatcgcagaagatagtgatgactgctccatggatgaagagttattctttatctcagagtcttcaatgaacagggaatggattctcgactccggatgcaattatcacatgtgtccaagtcgagagtattttttgattatagatcagttgatggaggaagatttctaatgggaaatgtgttggaatatgttttaccagnatctagatttactaacaagaatgtttcattaacatcctaatatgaatttctaaaacaatgaaattaa

SEQ ID NO: 95977 - DNA, 739 bp, Cannabis sativa
ttttcaagtaagccaaataacatgattttgtacgaaaaatttcacttataaaattttttccagagtttcaattcaatcacactcttaattcatctcaatatttcattcagttcttgaaaccataattagcacttaactaacagttgaaataatttatacatgtcaaatacaactatcaaaccactaacctaatatattccataagcttcttatacttacctattcttcactattatagatacatgcataattaagaatcaaaaagtttttctaggtttgtaataataagcttaggtacaggtagatggaatggtcatttaggcttgcctataccataagtttcttcaatcaattcaccccataactttcacaaatgatcctggtatcctttttttttaattacgtaagagaatttttttttttttttgacaacctcgcaacaactatatatatattactttttctttttttcgaatttgacactttattgttagatttttttttcaagttgttgccaatcatttttttcaccttctctcagtttgattcttatttcccccatacatatataaagtttcccattaaaacttaagatccacatatggtctaattaaggtcaaagttagataataatgggttgattttggctaaaaatatgtgtagcaacgaagaatcaagtccaagctcaaaaagggtagctaagatagaaattacatggatggcttgaaaggcacaatcg

SEQ ID NO: 95978 - DNA, 567 bp, Cannabis sativa
atcaattaattagattagtttcgatgctaattagaatatagtttagtttaaataattctttacaaaatattcttagctggtaagaatttattctgtaattagccaattggtctaatttttaaacagaaactataatgcatgtaattatcaaacataaaccaaagtacaaaataacttaaaaaagttacttttcattttgccaattttttatttttaatcacatgagccaaacaaaagattattttttttttttatttttaccttcacataatagtcactaatacagatgctaaaaacttatcacatagtaatcattgtgagaggtattcaacctcttagacatagttgctgaagaataaaacagagcatgaagaagaagaagaagaagtaagaagaagaaagatagagagaaaggaaaaagaagaaagaagtctcttattgattctgaattttacaagtatatatacacattattaaagaactgtacaatgaatcacgtgcaacaataggcagttaggtagttaaccgaattaactaccaacctaacaactagcctaactaactatt

SEQ ID NO: 95979 - DNA, 588 bp, Cannabis sativa
  modified_base (217)..(224): a, c, t, g, unknown or other
aatctattgtggatacatctggtaactttgaaaaatttgcggaggctgtttcccagcctcgcaaccagccatgaaaatcttcagttggaatgcacgtggtttggggaacccacgcgcatttctccatctttgtttgcttgttaaagagcaaactcctcatgttttatttattatagaaactaaattagaatgtaatgttgtttctcgttttcgtcannnnnnnnatttcaataatagacttgaagtccctaggataggtttaagtgggggtttacttttattatggaaagacaatgttgatgtaactctccttaatttcaatgcaaatcttttcgattgttacattgtgtgtaacaatgggcctacttggcacttatctgccttttatggagcacctgaaatccataaccgaatacatacttagaaactcttcgaacgttgtaaagatgttgctcttttaatgccatgattgttcatcggtgatttcaatgaaattttatcaaatgacaataagcttggcggtgcattgcgcaatgagaatcaaatgaatctttttcgaaaagctcttgataggtgtacccttatgaa

SEQ ID NO: 95980 - DNA, 741 bp, Cannabis sativa
cgttacacataactttgccttgcaaagtaaaacaacgtccaagcctagaggaattggtggccttctttgtccgcaagggctggttagttatgttcacaatacttttaggaggtaatgggacaattttaggttaaggctcacttacctttgccgtccctttgtccttcataggagccgaggttccaacatcagtagagttttctctttttttccatgtcaataggctattctagagaatcttcctcagattcctcatctatatcgcgagtttagcttgcagtcgtgccatcattttctccatttgatgagagaaagcttcttgctctactagctttcgttgagattcagctagctcgccaaatactcgaaccaccttgaggtcttgctcatagtaataatcatctctaatttcactgttgtcttcttcctcctcttccttgtattctgggtttttctcaacaaattattcctaatgttaagttgtctcagctcttcggctgccagcttcggacgcttcttcatccctcacagtgctccactaggcatgccctggagggatcagatagcgtcgtccatgatgacatactagcctagaggagggggtttcttgacaacagtctttcgggtagccaccatttttgcagatacaaggcagcttcaaatctttcttcaactctcaatgaaaatactaaaatatttatcgggatttttgaaaattaaaataaaaaagagcttaagaaa

SEQ ID NO: 95981 - DNA, 542 bp, Cannabis sativa
tcttctagcttccaagctgtggaatgcccagaattactcatggagtgggttagggttcctccgatgcaccgcaccatccctatccaactcttcctccagcacgccaaggtcttctccacatatgacaagggcggacttaatgtgggggacctagtcacaactgcaaactgtaggaggactagcttatcacagagagccaatcgatggatgatttcaacttatccaaggttctttgtcctaatattcgcaccccagatgctaaaaaggcactccgagcggacattattgcctcggcagaggattggtaccagaaatacctctttaggagggagcaagagttggcttatatcaaggctcaggccgctaccgggagggcccttcgggtagaagctggtaaagagggagtgtcttcccagcctaagctaccgttcccggctcccaacactagagcttgtggcgccaacacctccggatccagtaagtctcccttagttgttcatcatgtcccttctgctcaagattattctgttggaaattatttt

SEQ ID NO: 95982 - DNA, 621 bp, Cannabis sativa
ttttttaaaaaataaacttatatttttgtaaactttgctaagagaaaaaaaaaacatgaaaatgaaagcttataagaaagattcttttttttattagcaaaatgatcaacttcagaatgaaatagaaaagtaaattaataaaaccacatcaaattcaaacacgtatagtctcactgagataggcagctccactaaatgttcaaagctcctaattagaaatggacacttcaaatgtttgtactcgtttgtttcgttgagataaaaagaattattattattattattattattattattttgagaggatatgacctattattattatgtaataagatttaatttaatatttccatgattaatctaggcactttctttggccaaaacaaaagcagctaggctattattatgagttgatggaggcagattaaattcttatatgataattattaagtgcatgcatgtagccagattgacgtccacattcacattattattaattaatcaaaaggacatatgactaaaaccaagactatacacatgctcacgcatggttaaaaagattacgttttcaacataaatatattattatttttctatatattttatgtatggcatattaat

SEQ ID NO: 95983 - DNA, 568 bp, Cannabis sativa
  modified_base (65)..(72): a, c, t, g, unknown or other
aaaataaatattattaattttaaattgatatttaagtttcaatatattaaaaataatattttatnnnnnnnnttgggttttgaaaattggaaaaatcgaaatttgagaaaaaaatcccacaaaaatcgggttggatgagtagctgcctaggagggctggacgtgcagcccaggaaggctgcacgcagcccttccgcgcgcgcaagagaggaaattgcagggtctgatgggcggcattcatgagcggatgcagcatccgtgtctaaaggcacacggcttcagacaacttcttgtcccatacgcacgcgcacgagtgggtctccttgtccgagatgctagtgcgataggcaccatctcgacacgatttcaacccgaatcttaaaaaattcataactctctcaatttttatcggaatcgagttccgtaaaaaccaaattgtttatttttcacaaggaatccaaataaaatattttttcagaacgaaaataaaattattttcatggaaaaatttcataaatcacaaacatttatcaattatcacataaaccaacatgaacacatccaaatta

SEQ ID NO: 95984 - DNA, 519 bp, Cannabis sativa
taaatacttaaattataataaaatttatgtaatatagctgcttctactaatttaatttttttttagtattataatattaccataatattattttttttattatttttttttataaaaatggttgaatgataaatagtttttcctttcaatcatatagatatttttcctatcaatcattttaaatttttgttgagattgtatattctttttgaaatattttttcattattaaatctttttatctaaagtagttaaattagattactacaaatataatttaagttattagttatttgagttataaagtcattagagttataatagttatttaaatgattgaattagtgcttgtaaatcttcttcaattactaattgcatttaacaagataagtcatttcacatttttttgcagctccaatttatgatttaacgattttttacaatatttttatttttttttatataaaagaaataaatgtttttttttatatatcagtaaattcaactacttttaattatt

SEQ ID NO: 95985 - DNA, 1933 bp, Cannabis sativa
aattacaataaaataaacaagatgcgaaaaagatacaatctttatgagtttttgacaacatataaatattgtttcttgattattgttgtgattagtctccatctttcgtctatattggtaaagatatggtcccaatatatatatatatttttaaataaaatgaccccaaagataaatcttaatttttttgatgatttatatttgtatagttttacgagatcatttttctaaaaaactagaaaagtatcacatcaatactacgataacaacacacataaaataataaaaaataaatataatacatatatattttggtaatggtaagcttcatggcaaaacaaagaacaatacacatcagaacaattagaactcgaatcacttaaagcctcaaaccaacttctatcctctctattggttttctttcttttaaaataagaaaactgaaagttacatttattttaattgtattaactacattctgtacagtataaactttgtgattttaaaaaaaaatcatttctagcaccccacagatgatacgccaaagcattacaaacaacagtatataactcccttctacacttggattgtttacttctattaaatcagagtattctccaaatgagatcttgttgaacctattcccatccacctaaaaatttgttcagcaatttctatgctataataacactaaataaataattgtccacgagtctctcttgtaacaccacagaaaaagcaaatagcattggtaatgacattaaaattggctaatttgtcccaagtttgcaacctcctctaacaagcaagctagatgacaaatgaatgctttggggaactttgcctgcaccaaatgagggcctccacctcctctataaagtgttcttcggccatagcttaagacagagggaagaggttgaaattttatctgctgaaactaattaaaatccatcttttctttgacaaaaattcttgatttggacaattttcttccaataccaactattatcttgtagagtctcataattccactaatctctatcgttaatgtaaacagattgaacccatttaacttaaagattttctttcttaaaagctatatcacatacatatctacccatagttcctatgttaaaattcttcatattctaaaaacataactatttttcattttcttggcaaacaaacatagtaccaaggaacctgtcctgggtgttagaatcatacatagtgttagtttgtaagcttttagttcagttagtggttaacagttgactctttagtcaaataactatgttagttagttggttagtgttggttagtagttgttagttagttaacaactctttttaattaaattactcatttttctaaatgcacatataaagccattgtattagatataaaagagtaagcttgtacaaaaaacattcaacatcttaaaaaaaattgaagacttgaaaacaatggctttatatgtgcatttagaaaaatcaaaatgatgcaacaaaaaatcttacgtataatgaagacttgaaaacaatggctttatatgtgtttatatgattttgggagtgagattttggattttttgttgcatcattttttgttggagtgagttttatatgagttttattttgcatcatttggtggtgttgattaggtggaacaaggttatgtgattcgcaggtcttgggtttaaatgtgctctattttttcaagaaattttttgggtattatactttcacaataccatgtcccatttcaatccaaaatttgtactcccaaacctcttagaatcagactatcctcaattccaggtcgtagttcttaagccttaaatgttagaaatttatatgtataatataaaatatatgtatgtgtatataaaatgcggaattaaacaaatatatacactatataacttaaggat

SEQ ID NO: 95986 - DNA, 652 bp, Cannabis sativa
tgtttatgtataagatactatttgcactcgatgatgtaaatgtgacatgccaactggtcttcacttcataattagacgaaccactatcaaagacatcattaatttctagtctctctgccatgcatcgttgggaatgtgatctgctgtccccattgtgtgtctcgctccgttcacaccactgaaaatatgacaactcatttttgttaatttgctttttataactctcgtcaaataaggaaagggggctatcattgattattagtattactactttcctctttttattgaaatccagtttcttttttccttttttttttatgtagttctgaaatacaatttatattattcacttcataaaatattcactcacaactttttcaaaaaattcttgtttcttattattgattacttgaaaatacaaaaaatctttccatgctattgttgagaaagggacctctttggttattgtactttaatagtgactagttgccaattttgcaactctaccttctccaaatattattattactattcagaatttttgtttcgcgaactatattttattatttaggactgactcaagcagtttagggtcctcaatgaaaaattaaaataaagtcttttattttaaaaaatattatcaatcattact

SEQ ID NO: 95987 - DNA, 636 bp, Cannabis sativa
attatacatcctaaatttatgaagaagattacaatgtataaaaactattgtaaaacgtgagaatcaaaaagtttctaaaagctttaaatagcttgaaactcatcaatagcagattcaaagaaagaggaaaatgtcgaagaagagaagatgaggaaagtaaaaggcatacatgggagagagaagatcaaatgtttaaaagtacgtcatccaaaaagtccaatacttggccagacaaagctgtttggtaaaggttcatacagtcaaagtaagatctgaaaagtccctatccgtacaaacgttcgaataggaacttggagggcaaatattatcccaaattttatccacctgacctggcatgtccacatagtcaaaagcagaagacacacggagaacagttcgtcactaacttgccatgttagtgtttatagcctgtttacctgccaggttagtgcctacaaccttccaacctactaggctagtgcttacaacctaccaggttagtgcgtgcagcctttaacctcccaagttagtgagtgcatccttcaacctaccaagttagtgcgtgcagctttcaacctgtaagatcacgtagctgcacggtgtacacaagcaaagacagatccacatacctgccag

SEQ ID NO: 95988 - DNA, 716 bp, Cannabis sativa
attagactaaattttttttctgaatgccgaaataagttaagggtgcatcaatacatcccttttaaggggatgcattgtagaatcacccaattatttatactgataccgatgtaatttttaatataaataatacttatactttcatacttaatataaaataatatatatctacattccaattctttttccgtctaagcttttttttgttttttttttttccattacgtgaaaatcagctacttttttatttttttttctttttttattgttttttattctctacgactattttttttttttaaaaaaaaaaactataccaacataactatttattttggttttggtttaaaaagtaatactataataacttattttttaaaaaatactcatgttaatatctaaaaaatatatatttttctgcttacatgtaactttttttttgtaaaaataataactaaattttaaactcaaatattttttttttatatatatttatttttatctcttttcattacaattttaaaattaaagaataacagctatattgttaattctttaagttcaaaactggcattatctctctatttattttttaagatggtcattttattatgtagaacccacaattttttaccatcatcagataatatattcaaaatcaaaaacaacatttctgtttcttttataattttttatcaaacaagagtaattaaata

SEQ ID NO: 95989 - DNA, 1891 bp, Cannabis sativa
tatacaccttatatcgtaataaccacatgatctaaaatcaatggtcaaaaaaagttccctatcggtagggaacttttgctaggtcctaccatagtcttgcccattaattatatattgacaaaagtaaaattatatcaattcaattcaattccaaacataaaacggctgcgcactaagttgtcatcatatattctttctttggaagctattctctattctctacaaatatatacatcatatataatatatatatatatataaatatatatttatagtgtggtctaatcatggctgggctgtaagtttacaaacatgactatggaggatccatttatctcatgcatgtgtatatattcggattcacattcattcatgtttctcattctctctctcaacattttggattggactatataaatatatatgtatatttatatcaacttgatatatatttatatatatatatatttaaaagggtgtttcagtatattctgttttggtacataggaaatttttttaatctagttatatcatcgtatatattatagttatttaagattatttataaattttaaaaaaattttgaatagcttccaatatcaaaaataaaatttacatattttattataagtgtaactgtttttttatgcatatgataatttgtaattgtttaagtcttatttttagtattgtaaattattaaaaatcttctaaaaatttataaataatcttaaatagtttcaatatatacgatcataaaaaaaattaaataaaatttttttaaataccaaaagaaatatataaaaaatctagaaccatcgaacaattaaatttttctatattatatttattagttgtcaaacttattaaaaaaatttctttctagatataattatgaattcctataaataattatgtaatcatttatacatgcatgaatgaagaaaagaaaagaagtggatatatataatatgatcatgtgtgtaataagcatatatatccctaaacatgttggaattttctttccctaaggtgaagtcatttcgatatgagaacccatttactcaaaatactttcatatcttatttaatatatataagattacttgtaatgatttcatcatgagtggggtatattatctatctgattactttctctaaatactttcatatctatataaaaaaaatatctatatatatttattggtggaattacgatatttttttgtgtgtgtatatcttgatctatagaaaggtctataaaattaagaaaagagatatttagaaataaaatgaagagaggtgtcaaagtaaacaagacaaaaatgtaggaaaaaaaatatcatcactattttttttaatggtttttttttcaacaacaatgtaaactaaattgaaacttaatattattttacatcaaatttttttaattagatattaatttcaaaagaatatttaattaaaactttttataatgttaagtttgatgtatgtgtgtgtctctttttaagcaactcgtaggttgtcaggtgaatttgaccaagtttagaattttttaggtttgggttagcagggtttacaaaacatcaaatcgaattcatccgatttagctcaagttttcctcgtacgggtttgggttttgggatgggcaaaacatactatgttgaagaaaaagaaaaaaaaaaaaagctaactttagtgtatgccttttggtttcctttcgagaatcaatctctcatggggtaggactgtacatcagggggattgattggattcgggctttataaaacattagggtcggctcagggtggggcacgcccaagatctcctaccaaggcccaaaaaattcattaacaaaagggctattttcaaaaatatgggaaaaattatta

SEQ ID NO: 95990 - DNA, 955 bp, Cannabis sativa
catataacttaaaaaatatattttagaggataccgttaaccaattgtgagacgtcaaaaagtgctagacactatgattgtccaaagtattttactttttacccaaattttgtaactactttttacccaagtttcgtaactccatattaaattatatttatggcaatattataaatgaaattgtcaatatctcaatattaaattataatgtaactggccacatgagctggcctacgtccgttttatattatcttcttaaaacaattagattccatagtcaacttgtataatacagcttgtcataattaattactattccatgcataatcaaatagtaattaattatcacatactctctctcaatctacatatacatatgtagtgactagaaaaaatatcataattaatttctattccattcaattaagaaaaaaatgttgagtagtaatagaacttgttgtattctagattatgaagaaagagcaaaagaagtagaagaattcactaaaacaaaattaggagtgaaaggtcttgttgattccggaattcaaaaaattcccaaattcttcatcttttctcaagactttttaaacaactcaccaaccaaatcaactgttaacgatcttaaggtaccagtgattgaccttggagccatatttggtggtgggggccgccctcgagccgagcttgtgaatcaaataagagtagccgccgaaacatggggttttttccaaatggtgaatcatggggttcctaaaaaagttatggatgatttgatgatgagtactagaaaatttcatgaacaaaataaggaagagaagatgaagtggtattctcaagatgttagcaaattaattaggttttatagctatggataccttcacaacatttcagctcctgccaattggagagattcacttgcttgtaattttcaggatagtgatttacaacaacag

SEQ ID NO: 95991 - DNA, 693 bp, Cannabis sativa
taaaaatgtaaaaaaaacattattggaacgtaaaaatgtaattattttacaaaaaatggtgccttatgtaatttttcctaaaaatattataccacaaactgaaaataatatattactctttaatttttttttatttcttaatgtatcatagcacgtacataataaagatataccatagtgcaaaatctaagaggcgagagaggaacagagagagaaggaggtgagacttttggccttgacacgagagacaaagaggtagaaaactgaggtaaattttttgatagtgacgatctgcggtggtaatactcaaggggtggcggtcggactggtagaggcgagatggtcttggtgctgagggagaagaaagagacgagttatctggacacaagaaaatgagaatagggtagaaagttagggtttattatgcaaggttatatttgtaatttcatcattaaatttttaactgaatggacattttgttaattttttataaaaagggacattttattaatttaattattagatttaggatcattttgcatcttggcaaaaaaaaaaacaaaaagctagaatgatatattgaatatatgtaattggttgagtacattatttaaatctcggtacgcgtaatgctatttttaataattaaattacttttgttgttttatatataaatatttttaaaaacacgta

SEQ ID NO: 95992 - DNA, 1122 bp, Cannabis sativa
  modified_base (982)..(987): a, c, t, g, unknown or other
aggaggggtaggagccccgctaaccactagagtcctagcagactctgtcatgcatccgactgcgccctcagctcgtagtgccttatctaccgtttcagcataggtcattttttcatcagtagtaatcattagatcatgtctaatcttcgcatttaatccatcaagatatttctcctttttactgtaatcggttggcactatacctgaggccaacctcgccaagcgatcaaactgcgtcgtgtactcagtaacactcatattttctttctgagtcaggtgggtgaactcttttctcttggcacttttgattgtctcattataatacttcgcattgaaaagttcctggaacttttcccaggtcattgtagtaatgtcatgtatcatggacaccatgtcccaccaaactaaggcatcttcttgcaattaaaaagtggcacagaccactctatcattccccgtgactcccatgaagttcaatatcctggtgatcacaattagccattgctcggctttcataacatctggaccttccagaaaaactgaaggtgcctgcttacggaacctttcatatagtggttccatctgattcattgcaactactggttcggcctggacagcaggggcaggtgctactggaatttctggagcaggcactgcgggagcaccttgctgtcttaattgtctaatcaccttcttcttgttcctcaattctggcatgcatttcttcaaacctgttttcccaattctgagcttcttgagtagcttgggcagcatgggcagcctgtggcgggttagcattaccctgaccacgtgccctgcccttgggacctctaatctggccccgagcatttgggggaaactgagctccctaaccttcatttgatctgaccaagttgccctgactcctggtattttgcctggcgtccatctagtctgaacagactgcgtaacaaagagctaccatggtcagatcatgatcaannnnnncttactaatgctgcttatttggaaattaagaacatgcgcctattctactatcaggctactaacatgcttcctaataagcttttattaaataatactattaaaattagctactaaagcaataaaagcttactgaac

SEQ ID NO: 95993 - DNA, 516 bp, Cannabis sativa
atgcatatcacaccgtccgctagacccctagctctcaataccaatcatagaaaacgacatccaaaaccgggtagtcgcatctgatatccaccataataccggggcttaaatttaattcactcaatgtatagattctaggtcttttacctacaggtgagtgtacacttaatctacctatgatgacacagagactaggtcatgaaacaacaatatatgccgaacacgatccacatggctttcatcagtataaccaaagcaggcaattaataagcataacaaaagaacatattccttttcattttttagaaaatttgacagcataacggctgtattttggataaacccataaatcataacctgcataaatatttgtacaaaaatatatttggcactcagtgccccaaaacagtccagaaaagtacgcagattaagttttcaatttttcaaacaatttacaaatcataaaagtttagaatatgtctaatgatatacaacacatataaaaatcaagtccaa

SEQ ID NO: 95994 - DNA, 515 bp, Cannabis sativa
  modified_base (40)..(53): a, c, t, g, unknown or other
attttttaaaaaaattttaagagtaatttttaaaaattannnnnnnnnnnnnntttttttaataatggggtgtacttatcattttgtgggatgtaaatagaactctccaaaataaaaatgacttaacattctcaatggaagttgtatgacaatttcaaaaaataaaaatgataaaaaatttggggaaagggaccacaaatgacttttcttttcagtgaggaaattaaattattgaatacgtgtacagtatttttgttgtagaagtcttgtactgttattcaattgagaataaacaatattcaagttctctcataaaaacttttatcaaaaaaaagggtcctcctcaccaaatcctctctaaatcttaatttttcaaaatattaattttattgtttttttttaattatattattctaaatttatgggttcagtttcttatatatttttattcttatttatttgttttttttttcaggtgtccgtatttatatatttttattcttatttatttgttt

SEQ ID NO: 95995 - DNA, 626 bp, Cannabis sativa
ttcactattttgaaaaatatatttgcccataatttaggtgggcacatatcattactggcaccaatgttaaatttcacttctattgtctgttgaatactatatatggatactcaattctatcaagaaaagtactctactcatgcatgcacctaaacaattcttactggttcttctctataaaattgattagaacataatattgtcattgatgacatttcttacgtacttcattcccatcacaaacataaaatattgttctgattgatcatgcaagtcaagattatgttaaaccaatttaacttagacacatgatgctaatttttcatttaaaaaattgaacctttataactgagtgtagttagcatatttaatataaattaaattaatttaagtattaaatttagattgatctaatataatatatgagacaccactttttaagaggaaatattgattctagctatgttaggattcttatctaactccctatttttcttgttaatcttttttttttcatagtaagcctatagctccttctcaataaactctcctttatgtttgtatttatttatttatttttgtatgaaatgcaaaatttcaactaattaataaagatcttagatcta

SEQ ID NO: 95996 - DNA, 523 bp, Cannabis sativa
ccataactagccaaacgtgtactgtttagtgagaaagaaaatgattctgaaaatgagcaaagtggttaattgacgtcatcttgcaaagagtggggaaatatcttgatccgcatgctcttgttgttgaagaaaatggaagaaagcggacacatggcgtgcttggagtaaagttgatgttgggtaatagattagcatatacttggaataagatgtgggccgagtggtgtgatatggcatccgtactgtgcaatagttccattgacaaacatttatataataatattaattatagttgtttgaaattggatacatggcacgtgatgatgatgattgggccttcttggacttcatgtgagaagatcaaattaatttgataaaacaaggataggattgatgaagttgggcttttcttatttttcatttacaccactttgctcaaaatctgaaaagtaacataaaaataaaagtacattaaatattttcaattgaaataattttacaattaaaatgatgaaatatttaa

SEQ ID NO: 95997 - DNA, 744 bp, Cannabis sativa
tacattgaagtctacagtgactcacagtcagtggtaaatcacatttcaggggaatatatggtggcttatctcaataagacccatgacatgctcacacaattcaagggttatgcctttaagcgtattctaaaggaagaaaatgtaattgttaatactttagcatggcttacgagcagcatagtaacagataaggccaacctggttccaatctaatttttgaaagaacccagtatcacctgtgcagaagaagtcaaaatgatagacactacaccaaattggatgactcacatagtagcttatctcacactggagaacttccaagcaacaagagtgaggctcgaaaaattatgaggaaggatgcacgacacatcatagtggaaggtgtaatgtatcaaagaggtttctccatgccactgttacggtgtgtaacaaaagaagaagctacacgactcctatccaaagaacatgaaggattttgtggtaattattctggggggaaaagttaatctaagataatattaaggcaatgatatttctagccaactatgattgaagattcaaaggcccatgtgatgaagtgtgaaaatgccaaagattttcaaagattcatagagcacccccaaatgagctaatacagatgcaaagtccctagccctttgctaaatggggaataaacttgatcgaacaattaccctaaggtaaagatggagtacaatatgcagtggtcgcagtggattacttcac

SEQ ID NO: 95998 - DNA, 579 bp, Cannabis sativa
atgtgatttttcatatttctttctctcccttaattattttcatttatattttcttagcatctccataatgttacacaaaaatgatcatataatttttttatgatatttttaaatttgaaacactaaactttgaaaaaattcgatagaactcaatggaaactcgatacccaataaaattttaataataaaaaatttttgctcgatataactgatgtctgctcgatgtcattcttaaaaaatgcttactttttatctaaatctttgtttgaaatgatttattttttaatttaactttttttcccaaaatttacattcttaatgtgtatatacacatgtgagaagtgtaaagcttaaaagcactccaaaaagtgagtagtgtatagcgggcacaattcaataatgatacttggtaaaatctgaaataattagttacgtgtcaaatttacaatttaaccatttttttaaaaaaaatcacaatttaacaacaataataatagtttttaaggatactctaatggagaaacttaaatttagtgttaaatcaacactaaaggatactattttaacattaattttttt

SEQ ID NO: 95999 - DNA, 648 bp, Cannabis sativa
agagagagagaggggttagagaaggggattcgaggtccgtcgacggtagtgtagccacttgtgtggtagccatgagctccaaagagaagaaggcagagggaggcagaagtaacagtgaaggagatggggtttagtttagttttttttttttttttatgttttttattttgtttgaattttaatttctaactggttttagaaataagaaaaaaattgtttttttttatgatttatttttaatttaattttaaacatttatttatatgaactaattaaattgtgccatgtgtacataatgtgcatatggagagtctatcatcacaattaacaattaaaaatgaataaaaagaaaacacgagttttggagggattttgctaacaaaaaataaattttaaggttaattgctaaggaagtaaaacttgtaaggattttacagcaatttactctaaactacaccaatttacagtagcatctcctccttctaaatgtgtcaaaaatctttacatcactaaaaaaaaattacaatcttatattttatcttctaaaatgttgcttggagtcttttttttttggggattatttcacaaaaacataaaaacaacaaaaaaattacaaaatacggtttcacgtaattttaaatattttta

SEQ ID NO: 96000 - DNA, 593 bp, Cannabis sativa
ttttatttacttaattattttttttacgttaattctttttaaatatgaacacatacgtacttgaatttatatatatatatatataattaattaatagatttaaatgggaaaaaaattcaacgaggacaagttaagtgatttctctattttggtttttagtatagataacgaaaaaaaatctacaaggataatatcgttgattcgcttacttttcccaatctttggggccgggttagcttttgggtaatatttatagttgttaaaagtgtacatattatcttaaaatattattttgtattttctctcttattatttgatatctttttttttattgaaaatactttaatagtttacatctctaaaaattatcctcatggtcctatatcacattaaaatattaaaataatgacttgtttggtaaaaagtagtttatattgaacaataatatcattctaaccttcattgcatataagaccattctaaccttcattgcatataagaccagcagtgatacttaatatcatttaaaggtgacgtattgcagtgatattttataaaagttataatacgtattattttaatatttaattata

SEQ ID NO: 96001 - DNA, 3928 bp, Cannabis sativa
  modified_base (3741)..(3742): a, c, t, g, unknown or other
ttttttgtgtatttttacagaatttagcaactagcagagtaatttaaattgtaatcaaaaatcgtatagcaactcacatagaaatcactttaaaatccaaatcgtaaattaaaaataaataatatatgaggcaatttctttaaattaaatgatgtgtgattattaattggttgagacagagttgacaagaaaagaaaaatagatttttattcattcgtgatatttaaaaatataaagattttttttcatatatatatcaaaatttcattaggattagtttgacaaaaaagaataaattatgttttatttttatttttctgaaaaaagaatatattaattattttaaaggtaatgatgagattattttgatgacgttttctgaataataagaatgaatctattcgtttatttatttatttttaattttgagtgtaattattatttcttgttaaaaacgaaaagaaaaaaaaaagattaataattttttcaaatataaataaataaattatataaatgtttttattttcatttcataaattattcttttaatgaaagtaaacttaactttaaatctatcacgtgcaactaaacaaacaatatttaaattctaaaattatacaaaaattttttgttttgagtaataaaattatctatacgattttttttaacaatatccttataggattaggtattctaattttcatctatataaataatacattcttttaatcaatatgcaaaaccctaagagtacttccaagaaagcaaaataaattttcttcttccaaaatttagtgagacttaattattaatttttttatcataaacatgcaaatgatcatgaataccacatacgacatgactataagtttagattggcctaataatcttttagaacaaaacttccatgcccaactaaacaataagtacttaatttttcaattgaattttcgccatgcactgttaccttctcgacactttattcaaagtgcatgtgaaacgataataactaatcgtactttatatttttctgatcctttcaacttcacaagaactattctacttagattcggtgtgacagattcaacagtgatatcttcttttacaaccgcaatagaaactagcctcatcaatactctcaacgatcctccttttgcgacttctaaatgcgttactatcaatcttttcattgttgccgttagtagtctccagcaagaacaagagtcaaatattattgatattacttttagagaagcacttgatgttattccaaatgttcccgcaacacaagaatctattaaagaacttaaagaattgaatgaggatgatgataatttattagttagcttgggtaccgacaataattgcactatttgccaagaaaatttattgtttgaagattggaaaatcgtagagatgccatgttctcatctttttcacaagaattgtattgtttcttggctaaacattaagcatttgtgccctttatgtcgttactcgatgcccactgctaatgctattgttgctgctaaagattaattctgttatcaacacaccaacaccactaccttgtcttgatttgtattattcaaaatattgttatcatgtttttgtttcttttttaatttagtcttaagatgcttcgatgattattattattatagacatatttttgacagtattaattgatataataataattttttgattattctttaatattttattttgtaatgagaagaaaaaaatgaacccttgatcgagtataaattttttatattaattaacaaaatagcaccaaaagaggtaaagtatacttgtgactaaagtatacaagtatactttacctctttttgttttagtcacatgtatactttgtgcaaaaattataacaaaaccttcccaagatagcatttctgtaacaaaattgaaagaataaatgagaacaagtttcaatctctataggataggaatggcatacccgactattttccactgacacccattccatccaattttgcgacgattaaatgtgtcggacatagagactgacggtaatatcatatatacctgactgtttttaacagtcaaaaaatcctttttttagtagtgtaggctacaatgatgcacataagggttataagtgccttagcagtataggtaggctttacattttgaggcatgccatttttaatgaaaatgagtttctatgtaagtctgatttctttaatatttagcaacaagtgttttattactttttattaaacgttctgttaataaaatgacttatttcttagtacgagcttcttatttttattgtatttttaatgagcttctatttactctgatcacaatgttttattgaacgatttgtattaacgaaatcttatatcttttattaaaaaaaaattaattaattaagatttgtttttaagaaagaaaaaaaaccttaaatgtagcatgattttataaaatttagaaagattaaatatattaaaaaaagtcttttataagatttatagtttatggtatttcatttgaaatttaggtatttgtggttcattttaattgtattttttttatttaagcatttatatattaaaatttatagtttatgattcgaattcaggagttctaatacacacaccttcctatagccacttaaggctatgagctagctcaagtggtcattctaatagtattttaatattaaagttagaacattagaactgacactatattaatattgcattagtcaatagtcttatgaaaataaaatgaaaatctcaaaactcaaaatattatcttgtttgtcatataaattttagtttttgtttttaaagttgaacaatacaactcaattaaacatcaataataaaaatgttgaattataattataatatttaagagttaatacttatactatgtgttttacaaaagttattaattgtattttctgttttgtaaaataaccaaatagattttatattttccataatagtattctgagtttaatttttgttaatttaaccaacttaaagacaatttctagcacgaacagatgcaaaaaatgtattcaactttgtcgtagtaattctagattaggttattattaactcttattttgacaaaaaaatcagttcatggtactattttgtactattttaaaaaatatatagtccaatttgtcatttaacaaaatagagagtcaaatcagtaactttttgtaaaatacaaaatctaaaatgatatttaccctgtatttaaatacaaaaatctaaaagtaatttatggtataaatatataaatttaactctcggttgtaaataaatatctaagtttaatttttgaaatttttacattaaaaatacaaaatgctaaaactattacatatatactacaacacggtgaaagcaacttttatacacttttgcttaagttttttacatttttaccacatgcacacacatatcatgtatttttgacacgtcagtgattgatgtattacatcaatcactctatacatcatttccctctttttttctcttctttttcctattattttatatttcttttcattttttttttaaaaaatatcaacctccatagttaaacacttccccctccacatcccaactccattttccattttctttttgttcttcaaatttttttcaactcccattaaccaaattccataactgttttctctctttttatttttctcttaatccatatatnnatatggctgtaacttgttcttcatcaactcattcccttgtttaaaagataagctctaaaatagggttgaaatctttagctaatgaaaacaatggtaaacgacctgttgttgatcaggaggatgactctaattttgctcctccattgtcgaaacgtgggcgagctcctccaaagaagaaatcgaagg

SEQ ID NO: 96002 - DNA, 841 bp, Cannabis sativa
gaaactcaaatttaatattaaatctacattaaaagagtactaattcattactaatcttttttttcaatattacaaccacaatattaaaaattatacaaaaagtatattctttattattatattattctattgtataataaaaacatttacaaaaaacagaatgcggtggcttacagtgtctcactattattagtgggacacagtagacttccattaaaatagaatggattttaaggtttagttggagtattttgtaacaaaaaattacactatatataagtttttaatgtgttattgtagatgactttagaacgaatggaagtaacattcgtccatggcaaaagcatatgattcattatagtctcatcaacactcttttcaataagggattgtgtcatttgagtatccaaattaggagtgtaaatgggtcggtcggatctgatccagctatgatccgacttgatccaaatcatgtaaggatctgtcccgccccaccctactagatcagatccgactcgacttattcggatcagatctgattcgacccagctcttttttttttaagaatttcaatattaacttataattttatatttattttaattttgtattagtattattaaatacaatactatgtttgttattgacatttattaatagattgtgtaaagataatatatttttaataaactctatcccaacaccaacaacgggtcgggttcgagtccaagtttgggtccaggtttgggttcgggtccaagtttaggtccgaatccgagttctgggtccgggttagggtccgggtctcggtccgggtgcaggttgttgggttttatgccct

SEQ ID NO: 96003 - DNA, 809 bp, Cannabis sativa
ttcagccagccgagttataaacataccctgcgaattatatttccaacgagttgttccatgctaagtatacttttcgtttgcatgtttgagttctttgttctttcaaacttgacacgtgtctctctctgatgtgcttaccgaatttcgagtataacaactagcaagtttaatttgctagaaagattatacggttttagaatgatttctttcctttctttagatgaaaatattgatatagtgagattaatgcaggtttggctaacataaatcacaaggtcgatgaagaaaggcagaccatcatcatgttgagatcacttctaatcgcatatcttgaagtcaacgtagccatatatcaagtatggcagagatgtaattgcattgaatgatgttcttaccgcacttaagtcaaaagatttcgagttacaattggaaaaggaatccaagaaagaagaagtgtatttggcaagaggaagatcacctaagaaagtgagttcaatgagtaaacaccatcactctcaatcaagatcgaagtcaagagagaaggacacagggaagtattacttctatggaaggtctgaacacttgcaaagattttgcaagaagtacaaagaacaacaaggcttcaacaaatctcacaatggagataggaaggagttttggcaccaccatcatgggaagactctgctgcaatcgttgaagatagtgacgattactccacaaacggagagttttctctatgtcagagtcttcaataacagggagtggattctcgattctgaatgcatttattgttgggaatattttaccag

SEQ ID NO: 96004 - DNA, 954 bp, Cannabis sativa
aaagaaagaaagaaaaaaagtcaattgttaaaatgacattaagtggagtacccttccattaatcgtcccaatgcctttacgatgcgttaaaacaataatgatcctataattgataaattgaatgaacccattaaaaatattttctgctaaaatgtagatcctgaaggccccaatggcaaatgatgagtcaaaagacaaaacacctaatcaatgctttatgtagaaaatgagtactaattgtactaatcgatcgacataacactacttgtgattataacattaaaaaaaaaaaaaacaatcacaacactccaactactatatgtttcaagctgtttattttcgcttcatattttcttgtcaaacgcaccaccatggagttaaatcttcaaatttgacacaaatataagtcagtttatttactatttccggcagcctttaaaaatatacattatttgatgttgtggtattagtttgatccacttagctactaaaaacttttttatggtttaggtttacccattattattaggatagtctataactatataacatgagagaaaactgtttttgagctttcttaaagtaaatgacaaaaatgtgattgatttattttttttattattaattactattaaatctttttatttaatggcaagagaattatacttttttcaaatatgatttgcttacataaaaagaagaccacaggacataaattaaagagcttccttttttttatcattatcttttagtaaattttttaacaatataattttataatatatacacatattatataaacatatatatataaatatatatatatatatctcctatgataatacaaagctattaaaattatattgtttaaatcttataaaataataaaagaaaatttatatataatctataactctaaaaaataagatatacaatatatatatatatatacta

SEQ ID NO: 96005 - DNA, 731 bp, Cannabis sativa
tgtctaagaacatatattacatatttaaaatacatagattgtgggatttggacagcttaccatatctttatgatacgatttcagacttatagggattgcttttgtgcctcacgatgcaagtcttgaaattgttaagtgttgatacgctgctcagattgtctactgctcagttgggaagacattatccatgcaggtgtatgctgagctttgtttagaacatctcttcagccagatgtagggaataaggtccacatgtcaccaacatgtactgccatgtcatagtgcgaaagatgggataacaacttgatttcgataataaatgcccatgatggatgcttgggtaccatgacaattgtggacgagatggtggtggcaaaaaggatctacataaatataatattccattaccatgagctctttgacttgaggaatgcaaaatgcgcttggtgaattttttgaaaaactgggcagttttgctgtgaaaatgctacagcattatgagcagcaacaaatgttaaccaacttggaacgcttgcttccttatctttttttttcactactttggattgaagatggctcttgtaattgctcaaaacttttcccatgtatctccaactcatcaccactcctgaaaaggacattttcactttcttcttcctcccttgaattttccatatcaatatccaaagtttcatcggctttatcatgcaactcattgaccaaaagctcaa

SEQ ID NO: 96006 - DNA, 606 bp, Cannabis sativa
aaataaactattttaactttgtaacacctcattccaagatctccaagattttaaatccatatataggtgtttttaaatgaaaatacccaagagataagtggtcttgtattacataaatatcatattttatattgagccctgaaaacttcagagccgaccctggggctggtagggagatctgcaccttatatttggtcccttgattgagctagacccaaggattagattaagcagagtaattagaagaagtaaagagtacctcttaacaccattgatccttgaagcctcaagcatgttaaagctgatcatggtattgttgtacatgataactgagtggtttgactgaatgaagcccatgccacccatatcagcagcaaggttgaagacatggtcaactccactagtgacctttaaacaattgtccatgactctaagatcaactagatggaactcatggcaaaacatgtcctctgtcatgtgctcatttttcttccaatctgaagcaattatgtaatgcccttcactcttaagtctcctagcaatgtgtgaggcaatgaatccaccggcaccggttatcgaaattcgaagcttctccgagggccagta

SEQ ID NO: 96007 - DNA, 713 bp, Cannabis sativa
agaatgggaccaaatttatgggaattcttcttcttttcgttctgtaatcaaatttttaaacatggtacacgtagaactacgtttcgaatttctttggtttcttattacttgctgtgttgatttagagtctcgaattaattcaattcgaactcgaagggagattgcatgaaactgtatttttcatgctttgtatgtcatgcgtattttaatatttaatttagtttacagttttagatcttatatatttatgtgtctctttgacattatgagatcctttaatagactgttttagctagttttagatgggatatggggattttcgccacagcctttactaatcttgcagggttattcttcagttgtgattaggagcagtgggattttttaaaatgaggctcttaaatgacaaagtaaagtagtaccagttactaacaggttatttggcaattcatgcgttacaaccaaaatatgataggaaatctggaataggtgatgtggtattgatttccatgatcaaccgtgtcttgttgtattatatcaacgtattgttgtgctgcaaagtgcaatgctgaccctaccaaattagcattggagatcataatatgtgcgtgttttggattttggtgctgtttcccgaagtcgactaaacatactcatctttctaacaattatatagagatgcacaacctaaaaagtattcctgctcttacaaa

SEQ ID NO: 96008 - DNA, 1002 bp, Cannabis sativa
tttctgatctatactaataagtaaatctgattatattgaaatgatttttatttagggcataaaacccaacaatgttatctacaaagttatttcaaagtgtttagcgaatagtatgaagcaatgcatgaattcagtaatttcagccaaccaaagtgcattcattggaggccggattattcaagataatgccattatttgatttgaaagtctccattgtatgcgaaaagggcattttggaaatggaaagaaaatggcagtaaaactagatatgtcaaaggcgtatgataaagttgagtgggacttcttggaaactatgatgatttgcttgggttacgataagatgtggactactaagatcatgaattgcattcgttcggtctccttctccattcttatcaatggctctaccaaaggttactttgttcctcaaagtggcttacgacaaggtgatcccctttctcccttccttttcttattgtgttctgaaggtctttcttgcttaatttttgaagctgaacgggcttgtagaatacatggcttatggtttgggtctatggagtacaaactttctcatctcttatttgcggatgatagcctcatcttccttgacgcaaatatggaggatagcattgcactaaagggaattcttgaggattattcatcattatctgggcaatgcataaaccttgaaaagactgaaatgtgtgtgggatgtaagattgatgactccttggcaaatcacatatctacaaacttgggggtaactcttgtcaagaatcataccaagtaccttggtatgccgacctttgttgataaaaacaaaaaacaaattttcagcaaaattaggaagaaagtggaagcaaagctccaagggtggaagatgggtctattttctccagcggggaaagaaattttaatcaaagcggttgtccaagcacttccttgttatgtaatgagttgttttcacatcactaaggttatccttcatgatattgaaacttt

SEQ ID NO: 96009 - DNA, 1679 bp, Cannabis sativa
aagataaagttctagtaattagattaaatactatatttaatatagtaatttcaaaaaaaaatatgatgttgaaactaaacaccaaaaaataacagaagtactacaatatgcattttttaaatgcaaaaactaagagcaaaaatgttgaaataagactattattgcataaagatattcatctcagaaaacaaacaaaacagaaacaaaaacattaacccaacattatagtttagttctattacattttcttgtcaaaaattaacagctgacgtagtaaaacatactattaaattttaccttgtttctgatttataaaaataagtcgtgccatttatttcctcctatactcaattcgtgtacaaaaaataattcctcagagattgatgacacaattctataagagaaaaaaagatctaaattaatgcagataaaatagcataatgagaaaataggagaaacaaaaacccaaagttctcttgttgctgctaataatctatagagaaataagaatcaaagggggaggaaggcatcatcatcatcatcatcaacttaaaacattctagtcacctcttcagtttaatatattctacattcaacaacttgaaacaaatctatgataactagctgccaccaaaatcaaaatccttccaataacactcaattcgtcgtaggcttccttctttggatgaacaccttcatacttgcactgcacaacataaaaatgcaagagttacattagcatgccaagactctttggggtttatttatgcttcttacttgtgtcaaaagatttagtatcgttctataattactgtttgtaggtagaacagtgataaatataaataaaattatgaaatatttattgggagagaagtcttactatatgtagaagtatcaatttgctctggaagctcttttatatccacctcaaacctagattggacctgaaacaaggtataaaatataaatgattaacataaccagttgagaagcaaaacaatcaaccttttcatgtcaaacaaaattaatttactcacctgattaagaacttcagagtcagaagctgacgacacaaatgtaattgcaagccccttggtaccaaacctaccagctctgccaacctaaaaaacgagtaacgaaaacccaatattatatactagtttgttcaactattctataagctgtccaaaatatcaaaacaaatgcatatcaaacttataccctgtgcaggtatgtgtcggcagaatctggcatatcatagttaataacaatgttgacacgttcaatgtcaatccctcttccaactaaatcagttgctacaagaattctagagtgtccctccttgaaacccttgtaccgcttcaacctgaaattgatgaatcaatgtaaagcctgatgatattaccattatctagcaaaggaaatataaacatgggagaaaatttagataaagaagctctagctctcccatataagtttgttggaacagaaataaaagataaaaggagaaagaattttacatgacccgacaaattttgagtgaagcttagaaagttatttacctctcctcctgagacattccagagtggatgcagatagatgggaaattactatcagcaagaagcttgttcaactcagcagctctgctaacactcttaacaaaaattacaacttggttg

SEQ ID NO: 96010 - DNA, 511 bp, Cannabis sativa
ctactggtgtgggatgtagaggatgttggcagatggtgtgttgatattataggggaggttgaggtcataagtggcaaggatggggaaatggtgacgtggttgtgggtgttgttggtatcagaatgcagaccaatttgtggtggaaatgtagcaaaaatgttctggtattgggactccaaatttggtacatatgcagaggacaaattgtcatcatagtccttgttgtttgtggaaagtgagtttctggttggtggatagtgggtggagttggatgggatggcctgatattatggttgtttgttactcgatgaggaggttgaagaggttccattatgtgggttgataatatactgaaggaattatgaccataattggttgagagaggttgtggattagatgtttcaccagcaaaaaggacagagggttatggctgaccacaattatgtaactttggtaaggtggatgtgagagatttacgtgaaagcctagttagcaaaggccatgcatttct

SEQ ID NO: 96011 - DNA, 983 bp, Cannabis sativa
cttatttgcacagccatataagagactatacccatctgttaagtatattttttttcatttatctttacttcaaaattatgttcgttgggctgtactgctactatagctataaccaattaaaagagattaaatgttgtatatatatactagctaatattctaatattacatgcatatacttgtttatacttttagttttaatttattttgattatatatattgttaattgtctaagtcatttattataaatactttttttattttattatttcaaaaaaaaaaaaaaacattaataaaaaaaatatttttaaatatgtacaggaagtttaaaaaaataataatagaaatatttttagaaaaatatatatataaaaaaagtaatataaggatatattttttatataatacacatgaataaatttaaaaaaataacaatataaatgtatataatgaatttaaatttaaattacaatatttttttataaaactattttctactttatagcacatttgatataagaaaaatatatttaaaataaaccatcttgttttattatttggttaattagaactttgtactatttctaatttagctgtagtatttagttaaagtgtaaaattttaagaggagtattactctcaatttcctattataattttttagtcaaatctctgtgcccaaaaatacatgacgaaatatttttttcaaatttctctatggtgatgttcgttatgtttacaacatcatccctgtaaatttttaaatagtaaaccgtgtcgaaaatacgtttgaagttttttaaatacgtgtagtaaactagaatatcaagaagtctgttttcggtattgtaaattatttggaattttcaaaattttagaggaatgatactataactataacgaatatcactacaaaaaaaaatttaaaaaaatatttcgacttgtaatttcggacgtataaattaactaagagattataataa

SEQ ID NO: 96012 - DNA, 508 bp, Cannabis sativa
gacttctcttccaacggtcatgaccaacaatcataaatttacacattcttcatcaatttaatcctggtatcctcgtgccacgtgtcatcatttttgccttgttaaaatttggttaacatttatctcccaagtttttagcagtatgcatgactataccgtagaaactttttggtgaagcatgtagttcaatttagttattgatgatttagtggtacggtgccgagaatgccaagcttatactagaactacatttcaaactcaaaaataattctcccatttttaatatttttacaacatatcccaatgataatttttttcatttgcaagcagaagtaaattacaaaaaaaataaattatttacaacaaaaataatctaaatatttacaaaaacaaaataaataaagagatgtttacacttggtttcttattttgtcattttttttttacatttttgtctttattcagttatttaaacatttttaaaaaatttatttttcaatattatatt

SEQ ID NO: 96013 - DNA, 563 bp, Cannabis sativa
ggtcagcttcctgtcaacaacttcttttatactatgttatttaactctagagctacacattcatatgtggcaacacgagtaattgatcatgggttggccatgtgattttattgaaagagggtttggaaccctaatgcctagtggcgagttggttatctccaacaggcgtattaggtctatgccattaggatcaaagatagggagttaagcgctgacttaatagagctggaattaacagaatttgatattatacttgggatggattttctatccaagtattcggccagcattgattgcaagtggaaaatcataacttttcagccagagggtgaagatccattcgtttatgttggatcagttgaggggtctcggattcagactatttctgtgttaagggctagagatttactgcatagtggatgtgtaggatttttagcggttgtgattgactccagcagacccgaaacttttgggcctgaggtagtcagggttgtgaaagattttctctacgtatttaccgaggagttgctaggattacagccacaacgagagataaattttgt

SEQ ID NO: 96014 - DNA, 594 bp, Cannabis sativa
gttttcaccagatgaagatgagttcgcacttaatcgggcatgattctcgtaaacaagttgaaggagatcctggtcgatatgatgatcacctccttagtactcaccagggttcatctacaaaatgagggagacaatgtgtgagagttgaacgagggaaatgaggaaaaacatgtttgatatgctgaccagggcaattcaaaaagaaggaatttcattccaaaatggaattcccaagtctaaaggtttaaaattatgaagaatacctagaaattctttagaaacccatgaatgtgtgaatttggaaaatttcaagccaaaagtggtacagaattagaaaattagatgacctaagcatatgttagtcaaagttaaaaggcctaacatcctttactcttggatcagtcaagaacaagtttaagaacacagaaattttgcaacacaaaattcagaaaaagattgcatatatatgacagaaattgcataaagaaaagggaaggagaacttactcactatttaaagctttctgaatgtgcttggagggtttcagcgatggagattctaacaagtttccttcaaaaaattcaagaatgaaga

SEQ ID NO: 96015 - DNA, 537 bp, Cannabis sativa
  modified_base (248)..(266): a, c, t, g, unknown or other
  modified_base (388)..(391): a, c, t, g, unknown or other
catgttcttatatatggctcaattctctatcatttattccatgtgggacattgtccacaatagcctatagttgactttttcgatggttttaaaaaactgctatgtattgttgtggatgaacaacagtcacttaattaataactaaaacggtgtgtttcaagttaattgttgttcgttttgcacacttagcaacactataaaaaaactattatttttgggaacacttttgtgactaaatatgacttttnnnnnnnnnnnnnnnnnnnttgtgactaaaacatagtatttaagtataagttgtcactaaaattatatttagtcacaacaaattataattgttgtaactgatacttttagctacataccttttagtcacaacataggaatnnnnatttataattagttacaactttttcacttttagtcacaacaaaacttgtgactaaaagtaaatatttttgtagaacacaatagctaacactttaaaactaaaggctatacccaaaatacagatttgacaaactctctctctctctc

SEQ ID NO: 96016 - DNA, 879 bp, Cannabis sativa
  modified_base (406)..(406): a, c, t, g, unknown or other
aaaattaacccaaatttcagtatttttataaatttccctttttagttattattttattttgagtaatttgtgatagaaatgccagtttaacttctagttgcaaatatatacctaaatttaatttttggcggtaataatactaaagttatatttttagaactctgtaggtacctgaccattaagtagtcattatccacgtgtaattttttattggtttatttaaattaattttttttaataaaaatttaataacttagaccaatcaataattgtcacgcgactatttacttaacacttaacagtaggtacctacaaaagttttaaaattataacttaagtattattgtcgtaaaaaattaaacttagatatttatttacaattgaaagttaaacttaagtatttatnccgcaaattactcttttattttttagtaaatgttgtttttttttttgttgaaaatgtcaattttgagtttgttaataataaaattacatttatatatataagtaaagatttgtgcacacaaaatatgaactaaaatacaacaacacttagtaatatggttgtaatttttaaaattttagattccttcttaatcaaatttgattattggctagaaaatactgtcacggacatcattttattttatattttgtatgcacatatcattactatatatttatatattctcaatttttttttttgtaaagtaccattttagagtgtttttgtaaatgttttaatttctagctaccaaaattgacaatttaatttaaaatgccatttcaatcttattatgattcttacccaaaattggaatatgccattttattaatagtttgtttataaagctcaaaaactctctcccaatcaaaaaa

SEQ ID NO: 96017 - DNA, 1409 bp, Cannabis sativa
  modified_base (1366)..(1366): a, c, t, g, unknown or other
attttgtcacctaacttgccaaaaaaggactttacagtccattatgtcatttaataaacaaaaagtctaaatagtaacttttacaaaacgcatggtccaaaatagtatttactcttaattattcgtcatatctttataaataaggggattagttcataattctcttataatatttagaaaaaaattgtgtttatgatgacaaggcgtaattttatatcaaattttatatatttaaattaaaattaatattagtgtgattactatttaataacatcaatattgttgttgtgtataagaggaagaattgtgtgaaagaatattttggtttcttaatgaaacaaaacagctttggatgactttggggaagttcattatatgttaagaaatcaaagaaaccttcaaaacaaatttcagtggacaattgacatgcttatcattatcatctgttagatctataataatatgcgttttgaagaaaaaaaaaatgcaacttctgttttctttttcttttttcaatttttttatcacttattttctaatcatataccctttataaaatttaaattaactaataccaattttaatttagtataaaattatctttttatataaaaaaaattaaaaaataatattttgttagaaaattttacaatacacccctttaaaataagtgtactgatgcaacttctaactttttcggtatctataaaaaaattttagtctaaattttttcatagtggtgtacgttattgttatttaagacatcctgcaaaattttaagaaatttagaaaaatttaacacgtcgaaagcagtgttcaaagaatctattgcatgcgtgacttttttatttcatacgcgtgtaaaatagacggtttaaacattaatttctatattgtaaattattccgaatttctcaaaattttataggatgccttaaataactataacgtacacgactataaaaaaatttagactaaaaaattcttatagatactgaatagttaggggttgcatcagtacacctattttaatagggtgtattgtaaaagcaccctatctttttacacccataatttgttaatataattttttgtaaaagaataatacatctccatattttaaaagaaaaataaatgaattaaacacaaaaagttttttgtggctaaaccctcgtaattgtcattttacttacatttaactatctaacttcaaattttggtggctaaacctatcaaactttagttctgctagtaaatttagttttccatttattttcattagttaaatgctaagctggaatatacacgtacactcatatacatttatagggatatgattttgtcccgttattgtactttcacggantgtaatccgtgatgtacggcagccgtcagataagagagttatt

SEQ ID NO: 96018 - DNA, 831 bp, Cannabis sativa
aatggtcattgctttttatgattagagaattaagaaccaaatgctgaatcgaaaattatcaaccaaacaaaaaacaattttccacataaaatcagcatattaacaatttcccagaagtcctattcacattacatctatccatcattgagaaaaagacagaaatcgaaagaagaaaaaaacactctttcagaaatttcaaacatacataactgggtaaaattgagaagaaagccactaacctttaaaatctcatagccagaattcgaaaacaaagaggagagagtgagtgagtgagtgaagttatggatgaaatatcatatataaatggcttataaagtttggttctttgggtctgcttgttgaggaagtacttaacttcagagagagagagaataattctcccttttattattattattaattttgtagtactgtttgactgattgaagaagcgtgatgccttgattgagtgactctctctctcattcaaacgacatgcccaatcaaattaacagaatggtgattgttataacgttaacgtgaacaaatagcttttaaaaaatatggctataacataacataccaataatttcacatctacctttttctcagtttcccttttttctttttcctttttcaaacaaaaaattaattattgaaggcaatttcatcaaaacgacataacattaaatacaatctttttaggaatgatggtcattcttggagtaagattttgagtaaaaatccaaacttgagtagggtagtaatatgtaaatccaagaagaagaaaagggtcttagttagtttcttaccataatcttcgataaattt

SEQ ID NO: 96019 - DNA, 527 bp, Cannabis sativa
ataaatttcgaagataacttgtaattagaattgagtgtaattgccaggtttgaaatgttataagcacctataaacaagtatacatgattaattctcatttttatttacagtactatttacaagagttttaattcttaaaaaaagagttttagaaagcattttgaaaatcaccagtaattagaattgagtatataattgctaggtttggagtgttaaattgtttaataattacgaaatattataaatttttaataattaattgttacattatttcttttgtataattactatatctttaaatcatgatttatatgtaattagtactgatattcaaacacattttgtattttaaaatattaggagtagtgtaattaattactatgtctctagaaatcacattaattgtttattaataatgaaacaattttttttaaacacacacctaataaattttaaagtaattagctttagtaattgtatgattagttgacctatatatttgatttctattcaaagttaataatttc

SEQ ID NO: 96020 - DNA, 765 bp, Cannabis sativa
cctttgaatcgatcaataatggacacataataaaatgtctgcacagtagaaacataagcaatttacttaccacagatgtatcctatataataataccatatcaactttttaaatcaactacataaatagaacaacgtcactctgcatctttatttacatacataaataatttacatttggattatttgctacaataatactaaatttgggtaaataatagcataataaatactcaaagttttaaatttgtaagtgacatagacttaatgtttatttttagccgtataagtatccaatgtttataaaattgtaattattttttttaatttcgtcaatatagactttgttattgtcttaaacaagatacatataaaacttaaattctagatcattaggtctagacataaacatgtagtattagttacttcgaaattttcttttaataaattcaaaacggagtcgtattgacgaactggaggaaacactacaaaaatcttgagttttagtcacgacaagaattgtggctaaaagtaaaaaatattataaacaaaaattttagtcacaaaaatttgttgtgacgagattgtggttaaaaaatccgtaactaaaagttttagtcacaataaaaatatcattgtcactaaaagtcatttttggtcacaactagtctttgtgactaatagttgttaagatgttattacatttagtcacaaccactctttagccacaattcatttatcttcagtgacaacttttattatcact

SEQ ID NO: 96021 - DNA, 514 bp, Cannabis sativa
tttgaattttttctaaaccgcacggtgcagtgcaatgcaatttgcgattttgaattgttaatatacagctcaaactgcaccgcacatcatattataaaaatacaaatttttatatttaataaggtccatatgtgaaggtccatcccaaaacccactaattattgtattgtttaaatttaaaatttttgacaagtattgttcaagttttattgtatttgtgatagtttaattattttgtaataatctaaactgtagaaaatgttagtttgaaaaaatggttaaaaactacaccactcacgctgcgaacaattttatgttaaactattaaaaataaacgagtactatcataaaaaattgtattgctgacattgaaactatttttttcataaaaaaatttagtaaatggagctaaagttatattgtttgcggtagcatttatttatttttgaaaaaagatagataaattagatttatattaatgttgaacattttttttttaattgaatttaaggtt

SEQ ID NO: 96022 - DNA, 771 bp, Cannabis sativa
aaaataatttttaagttatgaagtcaaacagttctttaaaaatgtataaataatttttaaaaatccaactaactgaagccaatgtgttggatttgaataattttacaacactaaatctcttatgaaaaaatattaaaagtttatatgtatttataatttttaagtagtggtagttattttatgaaaaaataattaaaaatagtagaattataagatggaaatattattattttttgtaagttgtaggtagaatcagaataattaatgatagaaataaattggtttaaaataaaaaataatcaaaaaaaatattttgtaatgctgtttactaaattatttggaaagaaatacagaatcatattattttattcacataactgggaaagataatcagaatgttttaatttgacaaactacaattgttagagcatctaattattttttatttaaagatttttaaaggacataaatacttttttcatcttaattgataaaattaaaattaaaaaaaaaataagttaagaaaaagaaaaatatttttcataatcatagaaataacctttttatttatttttttcaggctccattatttctttctttcttaaatttaataaataattatatataaatcaagatcattgttatgctacattgtcattggttaataatactctctaaaaattattacattaaattatataaaatttaatacttgttaaaccaataacaataataacaatattaatgaatagaaagtcactagactaaaca

SEQ ID NO: 96023 - DNA, 585 bp, Cannabis sativa
acgggattaatttcagtgtttacttgctgaattttaggtggtttgaggtgaaaatcgagtttgatcttttaaagctcaaagctcgagctttaatggtgttttttgtttaaggactcgttttaatttctgttatgttacgactattgtatggatgatatatatgtgtcttgtgaagtttggaatgatttgggtaggtttcagtggtgttttaggaggtgaaaaatttgggattttcgtttctagcagaaaacggttcaccatttgaagcaaatggttattcgtttcttgccaggaaaccccaagataacggttaaccatttctggtggtgattttgaacctcgtttttcatattttctcgaggtttgaagtagggataccctagtgacctataggggatccttgggaatgaatttttggacttggaatagtttagattacttggttaattattcttttgttattatgacatggggcccgagatcgttgatcgttctctaagcacgttgggcaacatacttgaactgaaacttaaggtaagaaaagtataatgtaccacatggaatgattgttggaaattattttac

SEQ ID NO: 96024 - DNA, 646 bp, Cannabis sativa
ttatatggaattaattatatcccacactgttagatgagataagtagtcctagacagacgagattaactggattagttatccagacctcgagcatgtccaaatattgggttggataaattatacaaatttaatccaatcaaattgtgcgtaccaaacggaccttattttttttttttttatggaaatagctttagaaattatcaggtcttataatttttagtaaaatattatattggtagaaacttagttttcacaaagtgagaactttagacatgagaactttagacatttatatataatgtttaggatgatcctaatgaagattcacacacacaacacaacacatcatgactattttcaccacacgcacctatttatagacatataaataggtgaaataggagttatgaacaatgagaaaaaagttgggattaaacccaagccataacgttttgaacattttatgctaacaaatcctttaggcacttcaacatactcaaaaatagagttttgtaactcctttcaactcctttcaaaaatagagtttggttcacatgaatgagcattggaatggacttgctattccttaagaaagctcaatcaagtgtttggtttctttattagaacttgaaagcccattccaaag

SEQ ID NO: 96025 - DNA, 680 bp, Cannabis sativa
cttttggatcacaagatccttaaggaattgtaaagtccatgggttcccaagcccatggaaattccaagataaaatattcataatgattggtgggcttagaccccaatacctaccaaactcaagttctttgaaccatgaccacttgacgcgttgccacatcacccctcacatgggccccataaataccgtccaaaaccgttcttctcctcttcgtatcaagaaccaaaagacaagcctcctcattgatatcattagatatttccttattttgagcagctgataaaatatctttcacaactataggatccccattaacaatctttgatgaaacatatccctgcctcacgttgaccctaagtctcctccactatcatcggccccgaccccaacacaccacgattcccctcaaccattgccatcgtcaattgagacacctcaccatgagccatgatttttgctgcagaaacatcgtccatggaagcattaaactgcttaagccatttaactctgatcatgtaatttctacgtataggtctcactcacatccattccccatatggattgattatctgaccctctccaacctcaaaacgtcgtggacaaaaacttttggaatgccccataattccacaaataaagcagaacgtgggtatattcataattaaagttagtccagaact

SEQ ID NO: 96026 - DNA, 1074 bp, Cannabis sativa
  modified_base (384)..(387): a, c, t, g, unknown or other
aagtacaatcaatagtactctttacatagaaaattatactatgatatgtttggtagggagtctatgtgggaggatatggagagtagtggaggaaagaacatacaaaataataagaataatctagacataaataattaaatttaattttttaattgtaaataagtaactaatttaattttttgcaataataatatctaagttatatttttgaaaccctgtaagtacctgtgttttttttattggcatatttaaactattattttttaaataaaaatttaatgacttggaccaattagatattgtcacgtgacaatttacttaacacttaatatccaagtagttacagaagttctagatacataacttaagtattattaccgctannnnttaaacttaggtatttataccataaattactcaaataataaaataacaattattattattattatattttttaatatttaaaaaattattttaaataccaaacaacataaataaatattacctccatccatgcttggcctcatttctaccaaacataggtttaaattcacatatctcctttacttttaatatcttgtgtataatatttttgtattcatgttttctagtaataaatgggctacctaactataattatttgtatgtataaccttcaactcaattaaaaagagtacattggcctctcattaattttatttaagtttctacaaattttatacttaagaatagtcttatacatcaatgattgatgccaaacaaaatctgtaatatatcacataatgatatggtgtgattttaatgttatttttatgtataatttagtgtatattctctagctttacaacttagatatacctccttcaaaattcatataaattaatttatagaataataaaatacaaatttaagattttataatttgtgtatgagttattttcctaattttttataggattttttatctttttattattattgtgatgagcaaataaatcggatttttgggttcgagtttttggagtttcgggtttaaaattaagtaccaaatctaatatgttatactttttt

SEQ ID NO: 96027 - DNA, 703 bp, Cannabis sativa
aagggaagggaaactatagtttccagtttgtggtaactctcaaaaattattattattatataattaaaataataactctttccttgctttcgattttagttgtaatttgatgatttgattacttttttcttcgtttatgtcgttttcataggattatagatgtacggttgagtattacttgacccatttcttagttcacgaaggtaaaggaagagtggggcagaagcgtttacaggctttgagcattgattcgtgacccattcctattggtttctatcatatatatatatatggtgtgctctatgttataacaataacagttggtatatatgctctattttcatcatcaatggataatttctcattttattgagagtttagattgagagtttttaatctaaaattagggggtttccgaatgttagaagtttagattgagagtttttaatccaaaattagggtttttaaactaggttatattaagtgaggaggtttcctctgttatctacttttatcttgttaacaattttgaatcttgctagcaaactagattcacttaatataaccattgtgattctatttcttttgctggagtaatcatcagagcaatacatgtaaacatataattcttagatttacagtactttgtttgtactcttttccccttcatttatattaagaagcttgaacgttaattctgagg

SEQ ID NO: 96028 - DNA, 623 bp, Cannabis sativa
gatgcttccatatcgaccaacacagcattgaagcctccaaccgttcagccatggtccacctgtccagcccttcctcgaaccaagctgtaaatgtcatagtagcggccgctacaacagggacccgagacatgcaccagcatccttgagcaaacgggcagcgaaccaggacgtgcaacgacgtttctggtgctgcattacagagcggacaaagagtgttgataggcacatgcttcgtcataagttggaacagtgtaggtaagcaattcgttgagactctccataaaaaattaaggactttcggggggagtttcagctgccaaagttgcttccaaaatccagagttggcagccataccattgttacctttgatctattgttgcagaccataagcgctcttgaccgtgaataaaccatggtcctccttcattcaataccaggtgtcgttgacatagtgctgtgagagtggaattttgaagactaaagcttgatctctctcggttaacacatccgaaatcacctcatcatcccattcaatttcatcgagcttcattagagactttacggagttaccaacaagagctgggtgccgagactcaatgaacggattcaactcatcagctagc

SEQ ID NO: 96029 - DNA, 500 bp, Cannabis sativa
gtgttcgtgggtaagattcgggggggcacgagtaccaagaataacactattgaaagctaaggacttgatgagcagatgttgtctgggattcatagtcactacagtggataccagccaacctgtgacatcagagcctgagaatacaagattgaaatgcgagtttctggatgtctttccagaagatttacagagattgccacctacacgggagattgaatttgttattgaattggttccgggattggatccagtatctaaagcaccgtatcgaatggctccagcagaattcaaagattgaagataggattgcaagaattattgaatatgggattcattaggctgagctactcaccttggggtgctccggtattatttgtaaagaaggaagacgaaaccctgcgaatgtgtatttattagcgggagctgaacaagctcaccatcaagaacaagtatcctttacctcgaattgatgatctgtttgaccaactgaaggggaagac

SEQ ID NO: 96030 - DNA, 675 bp, Cannabis sativa
gttgttggaaatgacttctccaaacaaccaaaaaatcagtagaagaaaataactaagcaaacaaatttcacaatgtatggactaggcaaattctaacttacaattttgacatggtccactatttgtggaaatgaaaaaaacctactacaaaattagagtacaacttaagaaaacacaagtgaggaaaaggagcaataacaatgttacaccttttgcatatgaaaacccttcaaaaactttcactagcttaaagctaaatagggtaaaaaagaacatgcacattagttggagcttgaagccaaagacatatgcactttttataaacaaataaattacaagtgttttttaaatggttacatttaattcttcagctaaaaagaaaaaaaaaaaattaattgctcctgcaaattctacaccaacctcgtggagtttcaatgtagcaggaaaataattatataagaagagaaaaaaataacagtcaaggtatgggaacttttatgtaatattttctacttttataaaaaaatatccaagaaagtttttaaaaacaacatagtcgaaaattgttaagaaaaaaaaaaacatagttgaaaattttatagatcagatataaaacactgcaaaaaattactacttttagtgataacttttcagtcacaatataatttttttgtg

SEQ ID NO: 96031 - DNA, 541 bp, Cannabis sativa
atataatgattcaaaatttgaaaaatcatgactacacactttgataggcttgacttgaaaactgactatgacgtcagcaatcactttagcatgctccaacaagtgttttgaaattgtttaaaataaaaaacggtacaaaataacagtactctcaataattaaaatatccacgttattattgatattaaattgagaaaaacgtgtttaattgtaaattttccaatttattatcactataaatatgttatcctattttcttttatttatttatttatttagttccattcatttaatatattttgtaaaaataagaaattcccctataaaaataaggcactcagaaaattattccattcactctatctcatctattctagttatttctcatttttctctacattatattattttataacatgtattcttaaattccttattttccattatttatttataatatactttaaatgtacgtgcaacccacgggatttaaatatacataaaaaaaagttgatggaaattaaatattttgatataataa

SEQ ID NO: 96032 - DNA, 566 bp, Cannabis sativa
aacaagagatttgacggaatcgttgtgattttttttttctcctcaaattttgatataagtttgttatgtttccaatatcaatataaatatttatatatatttatagggtaaatgactaaaaagatcacgagacatgtaatctctctttgattttcaattattactttattatgatttcctgtacgtgtctttttcacatatatatctttttcattcaaacttaaatttagtttaagagttttcttttggggtgtttttaactgacaccgtttagaaaaaaaaattaaatttgaaaatatatgataaaatttaagttaaaaaaaagtgatacaaatttaaaatgaattaaatcttatatatatatatatatatatttttaaaaaaattgaaattaaagttattttttcattattataattatttaaattaatatttttcatcaatatttgctatatttattagacacaatattaacaatttagggctgttcatccgatccaatctgcacttttttggtcaaacaacatccaattcgcacttagtgcggattttattttttggatcca

SEQ ID NO: 96033 - DNA, 679 bp, Cannabis sativa
ttgatcaccttagaatttatatttaatggatggttagttatggattgagatgaaaccatgattttaagtaaaattgtattaaattatcgatcctatgattctaaactgaccaaatagtttttttcatacatggtatggtattgttaatagttttggctttttaaccgatcaaatcggttgtcccacatagattaaatggaaaaatattgagcaagaacatgggttctgataattgtcagattaattgggagtaagttttatttgggttgataatttagtcttccatgcctgtgcaaaataggattcttatgttgttgtgtgaacaaacaatgtaacaaatagaataatcatttctcatggaaatcaatccttgtctagtgcttcctttatcacagcatatactctaaaccctgtgcttattaaaatattactgtaagtaaaatcaaaagtagagaaatgcatgatcttattttctctctggtggtaatctactttcagtcaactcactgctttaagtatgtaagttattgacctaatttctctacactcactagtcactactaacacatctgaactgaacccatgttcttgaggcaggcatgattctttgttctattaaatttatttctcatttgtttgatgtgttggtatgacttcaacgataagttctgtttaaccc

SEQ ID NO: 96034 - DNA, 642 bp, Cannabis sativa
tatatatatatatataaaattagattaacacaaataaaatcgatcgtacatctattctatataaagtgtgcctatataacagaatttttggtttatgagaaattctgggtgattttttatttatattaaaaataaaatactttattaataaaaataaaataatttaagagaaattcatgggtcactctttatttatatataataaaataaatcttattaaattttaaaaaaatacgatattaatcaatgatgatctagagaaattacccaatatcgtaaaacgatggtctgtctatgtacattccaaactattcaaagtttggaaaggctaacccacattcatacatatagttttcaaaattaagcatagtttaattaactttagttacaaagttttttcttataatcaaaatgtacagatcgtacaagatatttttgcaagcaggagatgacaattaataaattattaatattggcaacttaattacttgaaataaataagtgtcctaagatatttatacttggtcgttttctctattctatggcatcatattaagattttttttattcttctttatttatttatttttggttaaatatttgaaaaatattaagtatgaattttaaataaataaaataatt

SEQ ID NO: 96035 - DNA, 716 bp, Cannabis sativa
ataaaaatacacagtaaaaaagtacgtaaaaaatactatcttgcagtatttttacaaaaaataataaaagtcagtatatcatgtaaattttcctatactttgtgtaatttcttaaaaaaatcactttaaattacaataaagaaaaacaaaataagtaatatcttttataaatataaataaatataagaaatatcaacgctttaacaattgatttgtattaacatctgtgtactaaccatacacttactaacatgaaaataataaagaaattgaacaacacctcacaccaatgatatttttcataagtagaaatctaagcttctaccaacaacaatatcattagattatcgagggtagagttcagtaattgaaatttcattaatggatatattattagggttaggttttgattgatctgatgatgattcaatttctcttgaactgaagtcaaatggaaacgacatttctggtccaacgatgttgccattggtatgtataaagaaagctggctctaagggcactgagagagaaagagagtcactatttaacatgagaacaacagcattcatagttggtctatctgtcatattttcttgaacacacaataatcctatgtgaatacatctcattatttcatatcttgatccacctctcattaatggatctactatatttgaaacatttccttctctccaatttctccatgtctgtatata

SEQ ID NO: 96036 - DNA, 786 bp, Cannabis sativa
tttaattggcattttatttgatgagtgataatctgaaatttatttggatataattgagtgtgaaatggctaaattacccttgtgagggtgtgaatgttaagccacgggggcaaaatggtcatttgaccatattggatttacattgaattaaaagtgattttttgaagaagtgaaatgtaatttctgcttgtgtttatctctcaccctctccctctccctctcttaccctcttgttttcaaaacttgaattgttgaagaaaaagcttggtttttctctttgattgaagcttgagtttggaggaaaatctttgctcttgttttgttgagaatcaaggtagtttctatgatcttaaccttgttttaattgctgaaatattgtggaaaaggcatgtttgggtttgtgaatttcatgttgttgatgaatctgatgataggttgcatgcttagtgaattggatgtttaagcttgttaatctcttgtgttgtgttggtttgagcttagagtataattcaaagttgtttttcatgcttaatccaattgttgcttatggtttttactgcttgaaaaggttggattgttgttgatgaagctcttgttcaagagcttagtatagccatgattgtgcatgaattcttgagggtttgttgctggattttgaagcttgatgctatgatttaaattccttcttgattgctagcatctatattggttaatttgtgggtttggttatgaaattggagtgatttggttaggttttgtaaaggccgcttagtttaatttggaaat

SEQ ID NO: 96037 - DNA, 2971 bp, Cannabis sativa
  modified_base (2312)..(2312): a, c, t, g, unknown or other
atataataagttatatcaattatcgtaagaattgatatactgttattaatatatattaatatcaagttttacacattttaatttaataaataatataaaaatttgctgatcaattatatgtcaccttggtatggtatttgacactttaagataacatatatcaatgactcgtaatttaatattatagctctcgcacttatagtaaaatattaatgggtactaataacaacatcataattttggtcctaaattgccttttttattttagcatttttcaatgtgtgtgtaatgtttacaagtttcccaacattaatattagcttatagagttaatgaaaataacattcctagggaaacattatgattattaaaaatggagttgtttgctatcgagttcactggacctgtctcaatcatccggcaaatgtaaacaacaaatttatatgtttacttattaaaagtgtcaaattctggttaggaacgtgtttaaatccattatgcatgaactagaatcacaatattaacttaataattatatgtttgtgcaaatttgtacatatatatatatatatatatatatatgatataaaaggttcaaattgcctaatcttgaagcaagctagctttaggtagattaccaagtatggaatataatattggagaagatgggtgtcaccctcaaccttttattataactttttagttagtctttgtgttcgaaaatatgtatcgaaatatttttttaatagcgatgtttgttatgctcacaatatcatccatgtaaattttgaaaattttcgaatagtttacagtattaaagataggttttgagttttttgaacatgaccggtcaactataatatcaggaactcaaactggtactgtaatttattcaaaaatttacagagataatattgtaactataacgaataccgctataaaaaaattaaaaaaaaaaaatattccaatatgtgatttcggacgtaaaaattaacaaagatgttataatagaagattgtaattaatactcctctataaaaaaaaaaataaaagtctccaaaatagactccacatacgatccctaaatttttgtacagatgtcagggtgaggaacattccacagtcttactaagggagatgctaatcagtgatttattgttaaattatatctttaaaaaatttattctaatagtatattaaaataaatttgtcacataataaaaattgattcaaatatatatcatatgatataatataaaatttaaatcacaataaatatattatttttatatttacttttatattatttttaatattttattattaaaattaattattgcaataaattataatttttttacatttattttttatagctttatataataaaataataatgaaatcaataataaagttattattacgttttattttttaataaaaaattaattaaacattaaattttacatcaagttttataattgtacattaaagtacaatattaaaatataatataaatatatcacaaaattattttatgtgtcaaatataatacaaattttatatctttcagaaattatctaatgtgatgatgtccgtataaaaaatttattttttgaagaaaaaaacctaccaaaactataaattatctcatatttttttttttgttttggaaaaaaaaattattgcaaatataatatacatcattgagaaattttttaaagagtattttaatagacctttcttttgtttcagtttctagaaaaaattttagtctatttttttattttaagactacttatagattttcagaaagctataaatattttacaatgtcaaaaataaggcttaaacaattgcttacaacatgcgtataagaaaagacagtcatacatgcaacaaaatatttgaactatatttttggcattatatacaatttataattttctgaaaatttatagataactgcaaataattatataaaaaaaaaaaggtaaaaaattaggctaaatttttttcttgtatgttaaaacagataagaggtctaccacaacattcattattttggataaatctttaatttaattttttttttattattgtgtgtacgttataattatttcagatatcctataaagatttgagaaatttataatattttttttggaagaaatttataatgatttaaaatataaaaaaatattatttaaatagtctatttcacacgtgtataaaatataagagacacgtgcaacatactatttgaaacttattttcgagatgttaaatttttaaaatttctcaaaattttanaaaatatcttaaataactacaatgtacacatctataaaaaaaatagattaaaatttctcttggatgtccaaacagataaaggttgcataattcttgtgaaaatacaagtcatgttgtgtcgagccataaaataaatataaattatatcgtgttgtaccaatagttgatttatagaataggtccgacacgatccttgtaggctagatattttcatactgtactttactgaggctaactcatttttttttatacagactcagattcatgcttgataactgttaaaaaaatagaattatttagttttttttgcattaattgctattattttcaagtttttttattaattctcgtgacttttaattagttttcttcaattttgcattaatattaattataatatttctagataagtttaaattattttttgtaattttttatttcttttatcattttctcatttaataagtaattattccaagtattgtgtatttttgtaggagcttaattctgggcttgatatttgagtcaacaaaaaaaaattgttatctcatttatgaacttaccaaagcccaaactgaattgaatagctagtgggccacatgaggctttattggccaacgaaattaagagcaaagaaaaaaaaaagaggaaattacact

SEQ ID NO: 96038 - DNA, 841 bp, Cannabis sativa
ttcaatctccatatacatatttgtctactcataacattgtagcattttttttgctaaataatcctacatcatcaatccattttaaacgataagtctgaagtagctaaaagctttcaaagaattgcgcgatacacacaatacagtgccataaccaaaattaaaaccaattatttaaaaaaaaaaaaaaagaatattgtcatacatatgtatcaagaaagaaactaaaaactcaaaccatatatatgtagctaagccagaaatagctatctaccaatataaattatataatctaaattacattggtaagtaaatgtattataacgtgggtatattaatgcgaacttattgggaattgaaattcaatatatatgtatatatattgcaatcttaaaaaaaatatggatgaatttgtctcgttcctaggtgacattgtatttatatgtatttaaaaatcttatttcaaaagcaatatttatatgtgtttaaggatgcaaccttcttttgaaaaaaaaaaaaaaaaaacaaaagaataaaaaagaaataataataaagtagcacccactgaattttaaatttgaaatcttgatacaaataataaaaaagcaagcacctcatactagcagaggaaataagattcaaattcatgccttatgcctcttatttaccagcaataataaaataaatagaagcatgatattaaaaaaaaataataaagaatttttttttagataccaaagtgtagtcttctgttaaaaaaaatattctcttggggattaatgagcaagtgtactttgttggcatttctgctttagtcttatatctcaaataaacaatacaaaaa

SEQ ID NO: 96039 - DNA, 720 bp, Cannabis sativa
atagtttttttttttttttatgatgctaattttcatctaaaattttattataaatgttgtgccaaatgccaataatatttatttatttattatgaacaaagttaacaatatatccaagtctagtcatacaaatagtatgatccatcatatttttgtaggctgtatatcactatatttatttttaaaaagtataattttaataattacctttaagcaacttctctaaaaaaaaaaaaattgaactttttaaataagcaaatttaatattttttccctaattttcattgatctgtaatatttggcttttattatcatttttttttaaataaaaaacaaatgaataatcctattggctattgataataccaacataatatctttttaatatcaacctggaaggacatttatgtaattagaaaagtaggggctaaagaaaaagattggagcatctccaaggagctcatcaaatttagtgttgcactatcactaaatttagtgtcaaaaattatttctactccaaccacaacaccaaaaattacactaaaaaatattaattttgtaataaaataaaaataattatagtattcacattaaatttatacacaataatttaaaaggtatttttacaatacaccccttcaaataaaagagtcactcgtgcaacagacaatttgaattttatttcggcttgttacattttttttttgaattttttcgaaa

SEQ ID NO: 96040 - DNA, 666 bp, Cannabis sativa
ccactaatcaagtttctattcaagtcgggcacataaagaacatttactaatgtgactttctcaccaaaagtgaaaaacacatcaatggtacccttacctagtacccttgatttgacctcatttctcattttgattttatagttacttttgatttgacctcatattaggcatgaatagatagtattgagaaaatttgaatttttatatttaatttttctatctaaataaaaaatttctcatttttacattatatgattggggtcgtaccattaattgaaaaaaaaaacttaaaaaaatcttttttgaaaaaaaaattgagttcggcttaattgttttgtatataaacatatttttaatatagtgtaaaaaaagtattttttaatattttttaattaaatagttaaattaagtataaaaattaaatttattttttattattcgaaattaaatcaaaatttaatattttaatattttaaaattaatatttatagtaaaatttatttagtaatcattaataaataatactcattaaaaattgttttatatatcttcaaattttttttaatattggaagattttttttttcttttttttttatgacattggaagagaggggagccgagcttgcaattttctccctatgaagagaaatgtagaactattaaa

SEQ ID NO: 96041 - DNA, 1145 bp, Cannabis sativa
atatgttatgttttaattaaaaagcaaaattttaattattcacgtttttccactaacctcgttgattagcaacgggctgcacagtacgttaaaactcacgttaacacgcctatactagctagttagggtgttacatacagctacaacagagcgattgttttcagtaataaattatttagtaaaaactatactcttcaacaagacagaagatcttaaaaatgactatttgcgagtgtatattaaaagagaaattgttgaaaatgttaatataaatttacttataaataactttcgtatatgtaagagaaacattatgtattttaatgttaaattatgaatttaatgatatattttaaatattttttactttttgctatattttggccccaacatgaaattctgccttcacccctatgtacgtgaaagtgcaaacattgaaaatcataagacttcatgaaagaaaatatgtatgtgttcacaaagtagaaagatcaatttttttataaaactaaaaaacaaacaaaaaaaatcacatggagagaaaagttggatttcaataattaattttaaaattaattaacgtaattagtgtgactgaacaggtcaaaattttcgcatatatgtaatttatggatttgttgaattaatttcaacgtctaattagatgttgaactcctcgccgtgattatcgtatactttactgtacggctccttcaatttgaaaatgatttaatttttcatctctctatcatttggtaattatttatatcatcatcctttttttttttttgagatcacgggattttgggtattttgtcttcaaagctacgaagataaaataaatggtgtttttttaaagaaatttaaagctaatattccccctccaactctcgagttaatcaaaattatttataattaatcaataattacaaattaacccaaattaatacctgattacaaaattttcgtctatatatctacacaaatatttattattaaaagaataaaaaaaaataaactagtacaaaagtttgaaattccaattataataaaaggtcgaaagtgataggctacgtactttattcatttcaaaaatgtgattttagtcaaaactcccaaacatccgcaataagagtttttttttt

SEQ ID NO: 96042 - DNA, 619 bp, Cannabis sativa
  modified_base (48)..(70): a, c, t, g, unknown or other
atccaaaatatgaaatccgcactaagtgcggattggatgttgtttgannnnnnnnnnnnnnnnnnnnnnngatgaacacccctaatattaatattatataatacaatccaatataaatactaaccaactgtgtaccaaacgagtcttaatgcagattctcaatatctttaatcaaccgttttatttatatatgtattttatttttatttttaattttaaaatgaccagccgttttaattaaatggaattaatgcatcttgtctaccttgttattatattcaattattaatatcgattgtattattcatggatgattttccacgttgcatgcatgactgctttgttttaaatttttatggtcgaacttagggatgtaaatggggcggggcgggtgcggggattgctcccccacttttatactcacttcttaaattcacccttatacccgtttcaatacccgtttaaattaaagcggggtggggtaggtattatccgacggtggaagaattcccatcgagtatccattattacatatatatttttgaaaaaaaaaatgatatctcaaagagaattaaaaaaaaaaaaaatcataaaaccttagtaaaacaataaacttaag

SEQ ID NO: 96043 - DNA, 790 bp, Cannabis sativa
ttgtgttttttgggcttgttgtgtgtcgtactttttggactagtctatttgtgctcgtgtcgtgccaatttgtagtatcgtgacgtgtcgtgtccaacgtatttattcgtgcttagtcgtgctcgtaccttccagacttgtgccaattttgtatcgtgtcaaaaagcccagcctgtatttacaacactagtattatatagtttttttgagtattaatatactaatttgagttttattataatttatttatagtatataatttttttattatgatatattgatttttattgtttctatatatcgtgttatatatatttaattatataatatatttattcgttgtagttaaaatattaatatttaatattagtaaatttatataatttaattttattattatacattaaaaaaaaatgatgtgtaagaaaagtattttcataatttttattaattaatttattaaatttgacctgctaaatttattttaaaaataaacatttacttaactaatcaatgtatttaggataatttttcacctagttcataacttgatatttaattcaactaataagaatacaatgagatattatttttaatttagttttacataatttttttaatcattaattattttaatttaacaatattttgaaaatgtaaattttatttatttatttttaattttaaattattcacatggtgttgctaatatgacaattatttaaacaatcacgttattatttcatttgccacctgtacaaaaaattcactttacaacaccatcaataat

SEQ ID NO: 96044 - DNA, 1320 bp, Cannabis sativa
ggagctacgtcccggacgctgccttacggcataaagtcttagcaaatattgtaaattgcttgatccacgtgtccttgtctggttggtccacgtacattggacaaaatcaagggcaacacctatattttaaaaggaaaagtaatattagaatttcagtataagttgatcactagaacctgtttctttatattgtctttatttttgttacatttcattgtttgaacttgtttttaattattattagattgtcataaccactttcttttggttgtagttgttgtattcagaactgattttgttatttatgttgttatttttttagaactgggtttgtttacttgtttggttatttttaactagttatttattattttttgttttattataaccagttttgctcttattttttataatcgatttcgtattattgttatatatgggaatcataattcttttaagtctatttataaggttgtgtttagtttttttttatttcatttgttaatttgacatatttcatttttttgatatttttaaaatatttttaaatattcgtatttatatgttaaaatttaaaaatttgatttcaatttaatttttagatgatatatatatttacatatatcctaggttaataaatccttatgatcataattttgattgttgattgtatatacctgatttaatgagtttgaagaatcgtcgtagaagtcattgattgtatatattctgttttgagttttctttgttttctagattgaaagttctgattttttggctaagtaatactgtattgtttgagttgcaggtaatcgttgcaaaagaagatgatcgacaggaataaacgaagtcaccaaaattggggaagacgatcgacaatggtgaatcttcgttagaggttgtcgacaacaatcaattgtggagaaatcacgagaaaagaaaatgaaatttccagttttgagataaaatcgctgagagagaatcacataaggagactgcaatttgaaaaataatatgaggagagagatttgaagagagaatttgagttagtttggaaaaattatggaatttttttaatataatttcatttatatatattttgttttccaacattttaatcattaatttttttttgttcccatattattttcaattatttatttgtgttataacaaaataaactcacatcattttttccaaatatgaaagttcccctcataatttcttaaggctgagatgcaaaataaccctaaatttgaaaactaagtaaatgtcatcttttttttaaaaaaaaaataaaaaaaaatgaccaaatataat

SEQ ID NO: 96045 - DNA, 731 bp, Cannabis sativa
ctgttgctaaaatttagctattttaatcaatattcatcaaaaagagtagattttcacagaacctaatcaggatcatatacatgtgcaaagctctcagagagtcttatttccagatgattagattgagaacatagaaagccaattaagggcgtaaacgacatatcattcagaactataagggtcccagatagaggaaataattttagccatctttgttgctaaaatttagctattcgatttacgccagaatatccatgtttttgacaatgctaaagaatcgacagttaaaactagaggtggtgctcctaggctctcttgcttgcaaattcgaagaagaagaagatggatgcaccgatcgatgtagtggttcattcaacgaaagtcgatcgtcttcttttttctctgaaaattttgaatttaatttgaaaattgggcaaaagtgataattgggaaagtttcactgtatttatacataaaggtggtgatccacgcaacctcagatcaatggccaagattacgtccaagaaaacacaagatgaatctgacgtgactccagatcattggccaggattacatccaagaaaacacaagatgaatccaacggtccgggaaagctatcagtcacgcatttaatgcgatccttggaacccaatatatccaaatgatgatattctcctcgagatttgcactgatgtaatcaactgtcatttcacaaagtcttattgcacgtc

SEQ ID NO: 96046 - DNA, 3352 bp, Cannabis sativa
cctgcgccgacccgttgcatttagtacgggaaagaaaaggaaacatgtcgggcaataactcaaatgggtcactcaaactcacatatagggatgtaaacggaacaggtcgggcccaacccattactgacctgcgctgacccgttgcatttaggacgggaaagaaaaggaaacgggtcgggcaataactcaaatgggtcgagtcccgaatcggaatggcaaaaaacccattctgccatcccttacataacactttaaagatgcatcaatatcgaaaaaggaaaaacctccattctatctatttgatcaaactcatagtcatagatgcctaacttgatataaatacaaaagccaagccacagccaaccaaattagttcacttttccttccaaaaatacatgccacatgtcgttttgcattaagaacaattatttgttataatatcaaagaaacgacatgtagttcatatatgaaaaagatgttgataattctaagtaaaaaaaaaaaaaaaagaaaaaattagaaaaaaagtatacaaagggaaactaaacttctttactatagcaagaagagttgggggaaaacaacaaaaaataaaaaaaaaataaataaaaagagtaaaaatagttctgactaaaccccaaattagcagagcacacatgttcttcttcctaagttaaaccaaaaaaaaaaaaaaacaagagcaagaacataatgataatgataatcataaatatgtagaatacaacctcgtggcacaggggagcagccagtctaaggtctcttcagaccaccaaaataaataatgaaacaaaccattaattatttcaagacccgctaaaatgcctctcattggccacttttttcgaaactcgatcgatactaaaaagaccccgaagaaaaaccaggaggatgttgttgcgattagggggaattagtagctgttttgccatagctgctgttgttgggattgcttcgattgttgttgttggacttggccttgtgagtgttgtgaccctccgagcgatgatgctgctgctgctgcctccctagcgttttgttgttgctggtgttccagtgacatccctgactgagagtggtagaagttcgggtaactatgagccccgaattgttgggatggttgctgtggctgctgctgtccttgtcggaatccagcgtgttgttgattttgaccttggaagccgtaataagtactggctggaacagctgacattgctcgtgaccccggtccgtgaacccacattgctgagttatcgttctgtcaaaaacaaaataaacacggttcaggaaaagttctgcaatggattcatttcattaattgtttgaatgaatgagcaaattaagatttaattacctgttgctgctgaagtgacattaaatggctagcttccttgtattgagagcttaagacatcttcgtagccgatggttgtgccagtctgtgctgtaggtgggtttacggtgaaatttcctccgggaatgctggtcgaactcccaaacccatatgcagaggcaatggcagcagactgaggcaaactgctaaccgagacactacttttatactgtggaagcactgcagccaaagactgatgatatgtgttgttagcgaatgattgttggaacgccgatgccatgtatgggttgtaggtctgaggcggcaagaaaggataactcatcatgttgccggcaaacggaagagtttgggaataagggtgcacagcaagatgttggggaagagcagggcctgtagctacattgccaccggggacgttctgttgagttggctgtggtgtagacatactggctgctcgcaaagcctgaaaatattcgaatgaaagaaatcagaatttaaagaagagcacttattaagctaagattagaagatgttgtagaagattacctctggcatggacatggtgggaccactgatagaagaagccccgttgttatattttgtgggcaattgtgtaacggggaagggtgaataggcaagatcttctcttccggtttgaacagacgaagccaacaaagtgcttggtaattgattagtgtagccctgctgcaatgaaatatggcggagtgagtaaagagcaaaattctactgataccgaaattattttcaacaaaaataatgccaagaacatattgcagtatcagatttgttagataaattgtcaaacccaatagaggataagcttcatatcaaatatttggaagataaaaaaaactgggttcataataatattagcataccataacatttgagaaagaagcaagattctgcatttgtgcacttgtctgtggatgactaaaagccccattcaactgctgagaattttcgtaagtaaatccgggtgcagaagaaggaaatgcatactgattcccttgatcagcttcagaagtttcttgcttcatggcttctgtctgaggaacagaagaggtttcatattctccagcatttgctccagttctatgaatcatatttccatctgaagttccaagatgctcgtctccgtaaaactcagtatttctgcaggaaattttcctattaagaaataccgaaaagaaataaataaaccaattaaacatacgtaaaaaagcatgatcatgtgatacctagtgtcaattgcagggacatcgactgaagcagatgtctcctctaagttactgttcatggacctgggtgcaaatgatccagaacctgaaatagcagtgttagcggtggatccgaaactcccaaagctcaagttcaggcagtctggagtgtgcagttgtaggtgatttggaataacaacagaaggaacatcctcttcgggttgtgctcctcgatcatccttttgcaaactaagttgctccaagtttgcagccattgatgaaacgctgtcttcagctggattcaacaatttgaaggagaaacaaatattaatatattccatacaaatgtaattttaatttatatgaaaaggcagacaaaaacaaaaagtaaagcattatagttacctttattatggtcataagtatgcccatgtccttgatacgaagacatgtcttcatacgagttattctcgaaaacaggtgcacctacagattcatcctcttgcatatttctaccagatacagaagcatgacctatatgaggagcattaagtgtctcttcaagatcattttcatctacttgatcctcttctaattgggatttcaaatgctgacttgctccgtctacaggcaaattggacgaattattagcataggactcggtatcctcaggtctgtccatgacagaggacaaacttgcagcttgtggctgctcaattgaaggccattcatcgtttgga

SEQ ID NO: 96047 - DNA, 558 bp, Cannabis sativa
ttattatggctgagataggagaaggaagttctacgatgatggaagatgtcgaagctctacgactacagttccttgaggaagctacgttggaactggaggctgattttgaaatcagtgcagaggtagctaaagcaggggtcttagtcaagttgctggggaatcgtagtttttccaggaacaaaatcaaatcgatactgacagaggtgtggtctttcttgcaaggttcatggaagatcaaaactcttgagaaaggtatctggggtttctttttcgacaatgaacttgacaaagaaggaggttcttcagagacggccttggatgatttccaaccagcttctgaatatcagggactggccagaagatggaagatggcaagatgtttgtatggccaaagctgcagtctgggttcaaatccatggactccctaccccttttttggttactcagaactctgcagtgataggtgcaaaggttagggagttcatcgagacagacagggcagacaataagaagatttccaagcgaggcttcctaaaactcagagtggacattcgcacg

SEQ ID NO: 96048 - DNA, 521 bp, Cannabis sativa
gagagagagagagagaaaactcactaagaacattctctgtataagaactctcattaatacaaaagactcgtggactacggctcattaatgcctgaactacgtaaaaattacctgcatatatcattccaaagctctcatcattatctcatttaattggttactgaaaatctcggtcaacaatatgaaaaacaaaactcaataaaaattcaaggcagagataaaaaccgctatgatactaattattagactataatataatatgaaagataaaacatatataaacaatatgtaatgcgaaataaattgtaaacatatcgaaaacgtatatgtaaggaaatgatcaaaatacctccaaccattgatgtttgagcttcaatccctgtgatagctttggtatgggaagtcaggcttcctcgctctcttaactctcttgacatagaattttactgttttgaacagaatgagtgaagagctcggggaccgagaccctatatttataggtgaaatactccatcagtatc

SEQ ID NO: 96049 - DNA, 684 bp, Cannabis sativa
aattccccaccccgtgtgcatccctacttgtaccactgttaaacaatctgtttcaagtattacccattgctatttatgttctttgatcctgatgaatgtttttcaaactcccatggcttctacaagttttggttcaactgtaccttaagagaacttggtgcacccgctaataaggaaacaatttgaattcattagtcacaataccaagactataactacggtcatcatcaaacaatattacatctacattaacattgatactattattaacattcactccttagttccgttccccaccaaataagttagggtatggcgactcaatctcaaacattaaaaatagatcattaagactaaaaataatattattgatgtaatttagtaagatgtcatttctaccaataatgtaaggtgttgaataaaatgatgctcttcttttaaagttaatataaaagtttattctcaattaatatataatatatgaaatttttctatgatcttaaaattaccgcaaacctcgtttatttgtgtatttctctcatcatcaaaatgtgaatattttttttttcgggaaatttgattttctatgtattttttatacctaaatttgttccttaaactaatggttatagctattgaaaaaatagatatacttttccctaaaccctaaaatacccctcccat

SEQ ID NO: 96050 - DNA, 522 bp, Cannabis sativa
aaatcaatcaataaattacctttccttattttataatcaaatcaaataaatatttattgatttactacatcaggcagaaagaacatgaagatgagggagaaaaatgtacaacaacaccaaagaaaattagaggagaatgataatcgcactaaaaaaatttgaggataatgccaattgcgccaaaagaaattagaggagaagtgagaaaacaattgcagaagaagcgagaaaattattacctgttaggattaatttcgattattttcattttataagttttttattcttttttctaactttagttatatccttaaatatccatattttcctaatctagatttttctttttttttttttagtatctgtttatatgtaatttaaacgtgtttaaaatacttgaaacataatttttttaaaaaaattaatatattaattatattttgcatttaaatatttgaatattttttaaataaaatataatttaataaatttgttaatattatataattaaaaatagaataa

SEQ ID NO: 96051 - DNA, 820 bp, Cannabis sativa
tagaatttttctgaatagaaataaagaatgagggattagaacaaacgaggtgtgtagcacctatgtctataatccaactacttttaggtatagaattaacattaccagtaatgcttgaaactgttggttgctgatggttatggtcagtttggcactgatcagtttgtgtgggaggattacttggttgggatgatgaagcctgagcttgagattgggattggaacctctgtgttaacatggccatcaacctttgacattgagaagccaaatcatgatcatcagaaccaatttctgcccaatcacttcctataaaatagtttgctgaagatccatttggctgatttccaagcttgttaggaatttcttttgaaaaccttccatatagtctatgacatggtggatagccatgaattctataacacttagcaacagtgtgaccaggtacaccacagtgtgtacaaacaggtctgttgttgttgttgttcctatttccaaatctatttccagaaagctgtccagcaaattgtcctgcattctcatttgagttgccaggattttcagtctgaggtatgattattcctctttacttctcttcttggatcatagctgcataagctttattgatatttggaagaagatcttgaagtaagatctgtgatcgaacatttatataggaatcattcaaactaattaaaaattcaaacaccttatcttcattgagatactcttgtatagttttcatagcaccacaattgcagatcagttgtggtctatattcctgcaacaaatcccaaatacttttaagtctggtgtagtatga

SEQ ID NO: 96052 - DNA, 530 bp, Cannabis sativa
aaaaaaaaaaaaaagaatatcgaacaatttactgaagttcataattttgtaaataaaaaattgcaaacagtaaaaataaaaattttcccgtgttaaggtattttatttcaaaattttggtttattatgtaaaaatttgaaaaaaaataaaattaacctatcaactcattccaattgtgtaaaccccaaaatgttgtgtcttttagttatgttacctgttcttcaaaaggtttttgtaatgtgtatatgaatccacaatcaaggcaaatgtgagtagctctagcctgcaacataagtaaagtacattacgaaaaaaaatggtatttggtagattttggttgattgattgtgtaatcatcatgcaaccataactgtgaatttcgtattcataccttttgcgtctcggttaatttcctcccgaaacggggaggagccggacgtttcggtaatcgtttaacatctacatcagcaccacctctacatcaaaagaaaaccaaacataatattaaaatgtcaatatttcctaagtaa

SEQ ID NO: 96053 - DNA, 976 bp, Cannabis sativa
ggattcaccagaccgagtttttcctcttggggagctctagtgttatttgtgaaaaagaaagatgggtcactttgcatgtgtgtcaattatcaggaactgactaagctcactattaagaacaaatatcgtctacctcgaattgatgacatgtttgaccagttgaagggtaagacggtctattcttagattgaccttcgttccagttaccattagttaagaattcgagaagaggatatcccgaagactgcattccatacttggtatggacagtacgaatttctagtgatgtcttttggactcaccaatgccccaactacattcatggatcttatgaactgagtattcaaagattttctagacaagcatgtgatagtattcattgacgatattctggtttatttgaaccagaagaagaacatgaattacatctcagattagtacttcaacgattatgtgatcacaaactttatgctaaatttaagaagtgtgagttctggttatcacgtgtctctttcttagggtacatagtggataaaaatgggatcatggttgacctggccaaaattgaagttgttcgagattggccaacactaaaatcaactactgaggttagaagcttttttggtatagctagttattatcgtcagttcattgaaggtttctcaaagatagcgacacctttaacaaaattgacccgaaagaatttgaagttcaactaaacagaccggtgtgagaaaagttttcaggagttaaagcaacgcttaattactgctccaatattaactcttccttttgataaggaaaagtttgtcatttgtgatgcctcaagacaatgtctaggctatataattatgcaaactggaaatgtaatagcttatgcttctcgacaattaaaagagtacggacagaggtgccctactcacaatctagagctcgtagtagtagtatttgtactaaagatttggcggcattactt

SEQ ID NO: 96054 - DNA, 893 bp, Cannabis sativa
  modified_base (647)..(650): a, c, t, g, unknown or other
taaaagtgtatatatgaaccagagctgcacgaagcccccccttcttccccatttccattttttcattttcagagaaaaaaaaattctttcagccccccttctctgattctctcaatctctaactcaatccctctcattcctctcaatcctctcaatcccatcaatcaccctctttttttcttcaaaaaaaccaccaccaccacttcgtcggccaccaccgccaccaccatcggtggtcaccgttcccatcaacgacagccgagggacgacagccaccaccgcagaccaccaaggcttaaggtatttttaatttttttaattttaattttttttaatgtgggtataaatgtatgtgtatgtataaatacatgtatgtatgtatgtatatgtatgtgtatatatgttggattatgtatatatatgtgtatgtatgtgtgtgtatgtgtatatatgtgtatgtgtaggtgtatgtggatgtgtatatatatgtgtgtatatgtatgtatgtatgtatgtgtgtatgtgtatatgtgtaagtatttatgtgtatgtgggtgtgggtatgtatatatatgtatgcatgtattttgtatgtgtatattggtatatgtatatatatatgtatgtatgtaaatatgtatgcatannnntgtgtatgtatgtatatatgtatatatgtatgtaaatatatatatgtgtatgtgtgtgtatgtgtgtgtgtataagtgtatgtgagtgtgtgtgagtgtatgtgtatgagtgtgtatatgtgtaagttagtgtagggtaatggatatgtgaagtggcgttgaaatttttatcggtattaattgaatgtttggttttacttttttatggaattagattcgtgttcgaccgctccggattaccgc

SEQ ID NO: 96055 - DNA, 565 bp, Cannabis sativa
aaaaagcaaccaagctagtcctaccctgactctctaattcgaccctagcaaaattctgaatcttaatgctggccgcatcatccctgaggtagctgtccgagggccggaaccagctagaagaaagataggccgaagggtccgagggaacaggcttcggaggtccaaaacccatccgggaccgacctaggaaatctcctaagttggaaaaataataatccttggcatgatctccccacctggtcgagggcatcccaaacctaaggagacgttcatcaaaccctacaggcctaaggctagaatattcgctaacagaagggacgtaatgtattgctaaaggtgacttaccggagctggatgtactggcgtcaggagcccctgtattcggtacctggatcgtaggccttggcttgggagccctcttctcaaccgggctcccaatgcgaagggatctagcggcaaccggttggcttctcctctcaagcgggctcccaacgcgaaggggcctcccggaagccgcctgggccttggtataagctttctcctgggccttctggtagaggtactc

SEQ ID NO: 96056 - DNA, 548 bp, Cannabis sativa
tacctacagaagttttagaattataaattaagtattatcatcgccaaaaattaaaattgaatattttttgcaactgagagataaacttaggtatttatgtcggaaattagtcttattattttaattttttttgttaattaaaaaaaataaatatgtttaataaaaaaatacatatctaattttaaaaataaaaagatatatataaaatgtgtcataaaaataagaatatgttagcatgtgcaatttatggcatttgacgaaactaaaatttatgtataaataaataaaaaaaaagtgtatgaatatgacttgtatagataatagcattaaacagagcttgaaaagtagatttaatcttgtacaggaagttgtttatcataaataaaattgttcttaaaaaatataaaagagtcgtaagttgttattttgaaggggaatccctttgtgggtaattgactcgatttgattgacaaaaattatctttctttataaaaataattaataaagtaaattaatctaaaaagtaattatggtaaaactatgtatct

SEQ ID NO: 96057 - DNA, 654 bp, Cannabis sativa
tgtatttaggcgcccatacacttaatcacaaggcttaacaaaggattaagaacgttcttaacaaaagtgcaacttttgtaccacatgcactacgtaccgctactgtactagtgttggtagggtttaaatcgtaccccgagtaccgttaagtgttgtaccacattcactacgtacccaattgtactagtgttggtaacaccgaatcgtactcttaaatatcatgtgctatactacatgcactcagtaccctttcgtactagtgttggtagtatataaatcatataacaacatgtatatacacatatacatacatatatattctatgctattaatataacagcatgcatataatatacatacatatatacatatatattctatgctaatcttacctcgtttccaaatttaaatgttctggtcgacctgaatgaaaaatcacgcgctgaacagaggccttatgtcgcattcacataaaatggataaataaccttctaacatcttttcagggttctaaacttgaaactaaaagtttctctatctataaaaagcatgggaaagccctaggtattgagaaaacacgagaaaaataatgaaacgggaaacttgccagcaaaatggttggtcgttttttgaaaaatgacaggccgtttttct

SEQ ID NO: 96058 - DNA, 527 bp, Cannabis sativa
ttggacctggtagatagagttcagagaggcgcaagcagcatatcttttaggcgggaattgcgtcaggtgggagacgaactagctggtcgtctccgaggcaaaaggagccaaggtgggcccaacgaagcggttgaactagtccgtcaacggatccctattcaagtcccacggattccggaaggcttcctcgtggagagtattttgctgctccttccaaagaatcttcttcaaggcctctacctcagcatgcccccgactgtattcgtcgagggtgtaattgtgtttggccactcggagattctgcctctcctcatccgcaggaacagcggtgaacactatgtcatgaggcatagtgtatccctccgcctcggaaggaatcctggagtcgttgcttggcgccggagtgtcccccgtccgggtccatttagaaggctccgcctcaaccatcttgcccttttgcttacgctcaagggcgcccgcgtccgccacttcaccttcttcaacttcctcctcctcatccaccaaga

SEQ ID NO: 96059 - DNA, 658 bp, Cannabis sativa
agggattgctacccatcaaccacttagcagatcgacaatgcccaaccatttgatcccccacccaacctcccagaagagaaccagaacctgagaaacaccacaaccccgtcattgccatccccaaactagcaaagattcacctaagaagaagatttctagcaagacagataagaaaaaattgttggggtatcaactcaagtcccgcgttggaagaatagacaagagttgtcttgaatataagtgttttacgtactccattagtatgaggcttttgggaaggttctcaaaaataaaaccgtgagaatctagtccaaagcagacattatcatactaatgtgggagtcaaagtcagtagcagccctacaaagtagaaaaacggggcccaacaaaaaccaaaagcccctccaatccttgagaggaacggcaaaacaacaatgcaaaggataagacccatctatgtagaatcatcaactctgatcagagccacacctaagccctaagaaaaggcgacaagccttggtcggaaaaatggaagacacccatgcaacgactagggaaaagaatagaaacgggagagaaaccctagtagcgtgattaaaatttattagtagagtgattcataagattaataactttttatttttcaataattaataac

SEQ ID NO: 96060 - DNA, 815 bp, Cannabis sativa
agaaaggcaaataatgtaacttagatcaaaaaatgtaccgttagcggtcttaacatataaataatgtaacttagttatattttatttatagtgcattcttactatgtgaattaattttatattttggatcccattcaatttgcatagtatctcaaattcaatgtgtagattaaattagttattttagattggttattttttaatattaaattatttcataattattaaaaaatatttttttttataactaataacaaaataaaataaattattattattttatgtctctaacaataaatactaactaaataaaacaaaaaaaaataataaattcaaagcaagaagaaaaaaattgtaagtataaagatgtttaattatatttttcttataaataaaaacagattaacatttaagttttgaaatacatatgatttttgtatcagtattagatttttaaatttttattttttacattaaaatataaattgtatatataatttttaaaatatatataaatatgtgtgaattagattggatcggttacttttacatgtcaatcaacaatatgcaatccgcacaagtggtgatttttaatttttcaatccaatccaatctgcacaagtatggatatctgtattttgccaattggattagattgaatcgtgcagattggaataaattaattattttatgaacactccttaaaaatatttattcatgactgaagtttaaaatattacatcagcaatgtgagttacatcattaatttactggtagtagggtcgcaaatgtttcatgttccagtagttctttat

SEQ ID NO: 96061 - DNA, 750 bp, Cannabis sativa
ataaaatgttcctaggaatggtagataacagaatcaaaccaaacttgttttgagaaaaagcccactttgccacattatgggcgacaaaattataagctctgctaatattagagaaaataaaactactaaataaaggagaataactattacaaaatgagacatagttttcaatttcccagtgtgactctttctcgataaaaacattaataactatcctcgagtcgctctccacaataacgaagtcggagccaatgtccctagcagccaaaagagccagacaacaagccactgcttcgccacataacacatctgagaaatctaactgagacgtttgaatccaaatcacctgacctagatggtttctggccacaactgcagcacacatgctttcaaaccccactgtaacatcgcagttcagctttatccaatcctgggggggagaataccagtcctcctttaggtaagaagcaggggtagggaaaatagctgcatgtagatctgcaaaagaagtacaaatggaatcaatacacttcacatcaatagtagcattattatgtaccttttcattgcgcaatcaccaaattgtgtcaataatgatcgaagcataaaggaaaacctcatcaataggaatgcccttatgtttaaggtcccaaatgaatttgacccagtctcacatgcgaataccggaatcacaaacaaggtaaatgccccaaggagaagacctccaaacatgaaaagccacctcacagg

SEQ ID NO: 96062 - DNA, 3278 bp, Cannabis sativa
actcgacaagtcgccgccacttacaatcgggtggtgtatcacctgagcctaatccaactagcgcaaaagggagctagacactcccgaaaaaataatttacgatttgaattcttgacctctaagtctaacacatgtcactttaccattagaccacttgttgttggtggttacatttgattctcattggtcactttaaagcataataattgttaataaaagtttattttttttttctaaaaaaaaaaaaaagcataatcatattaattgcaaaggtagaaactttagttaaggggggtgattgatattttagtaaaaatcaaatttttgcatttatgacccgtgaaaaggggcatggactatttttggtactgccagtgctaacgtacgcctggtagtgacctttatatatacaactactagtatacaccacaccacaaacaaaccccataacacaaaaagctctaaactttatcaaaattgtgggaaaactaaccaaccccacatagcaaatatttcatatttctcttcttcttcttcatcatctttttcttgagctttttccattgaaatagtcatggatattgagaatgaaataaggctatcaaaattcaaaaaaatatgtgttttttgtggaagtagtcctggaaaaaagactagttataaagaggctgctattgaacttgctgaagaattggtaataataatgtctcttctctaaaaatcactctgtttttcttattactctaaaaatgggatttttactatttttattgtgttataatttctgggtttctcttctctcttagtttttccaacaaaagattctatttttatgcttttttctatattttctctaaagaaaaaagccccttttttcttgtgatatttctaaaggttgcaaggaacattgacttagtttatggaggaggaagtgttggtttaatgggtttaatttcacaagctgtttatgatggtggtcgtcatgttcttgggtgagaaagttttcaccttttttctttctctttacttaatttttctggaaaattttcaagttagtaacttttcttttttgatatatacaatttgggttttttttcttctttaaactaatttttgtcatgttattgtctatagagtaattcccaagacactcatgcctagagaggtaagcttctcactactactgttatattacttcttctttaatatttttattataatttgaaaatgactaaacaacttataataataataaaaaaatcttcatctactattatatataaacatgaaattgtgtatacctcaccttttgttatctttaaaactcatggtttttatttcttcataattcttctttttcttctcacttttttataactctatttggttggttctgaaattttctattttttttttctttaacccaattgtgtatatggggttttgaccattttgtccttctttaagtttatacaccccacttgtttgaattggatatcttaaattttgaaacaaactaaaaatatcatcttttttttttaatgtataatgtaatcccttgagtttgttcttcttagacaatcccattaagtgttccttttctcccctgttctttatgctctcttaagtgttttttgctctacaaaacaatattggccgatttatttgacattttctaattgagcccaccacttcttttgccactcaccatttattttctctctcattcatccttccttctcactcactttctctttcatatatatatattggtgtttctaccatgaaccttctaaaacagatacacgatatatctcttatttgtttcggtattcaagaaatttttttattttgattttttttataaacgtgtacgttatagttatttaaaatattctataaaattttaaaataatttaaaatatatttacacgtataaaataaaatagtgacgcatgcaatagattgtttgaatcttatttttaacgtattaaattcaaaatttaacagaatattttaaataactataacatataaaattataaaaaaaaaatagactaaaagattatagtagatatcgaaatagataagagtgcatcgtacaattttttttaaatttcttaatatacatatatagggattcaattttattctatgaaagtatacattttgtagtctcaatcaatcaaagagtttaaagtgtattctattttaatcaaaatacataaaacaaaacttatagtacataagagaatgcatttcattttttctttcatttatgtataaaaaagataaaattcatttctaatacatctaattagacaaaaataagcacatttagaatttgttgtttggattattaacttagggttttgatgaatatttagataacaggagaaacagttggagaagtaaaggcagtagcagatatgcaccaaagaaaagcagagatggctaaacaatccgatgctttcattgctttacctggttagtaaagcttaacactttcttctcacaaattatattgaaagatatttgaaaatatcgaattttacatattttaatttaataattattataaaaaaaaactatactgatttacttgtatggtgtataggttgcttaattctctttatccattaaagatttcttttacacctctcaataaatattcctttcattcttcttttttattattcttttctttctttctttaggagtaacaactaacaagtttaaggtttaaacatgtacttgttttcaaaagtcaactatgttgatatgtcatgttctatgttctgcacttaaaaataattttttttttaaaaaaaaatagagaatattctgttaaatgtcaagatccatgtgaaagttgttcccctttgccctaacccccttttttttatctaaatgtctattttactttctttgtctaaccttttcataaagcaaattctttaaattccaaacaaattggtctaagtatgaatttggtgcttaaaagtagaataaaagaactaagtaaagaatctttttgtctatgagaaaactattaaaattagcttgtattaaaataatttttcaaaaataaaagctaaaatttactagttacccatccaaaccatcatcagaaatgtttttgtatctttaaaagttcaaaatccaaagcctaaaagtagtttttaaaagcttaggtccgagcctagaattagcgacttatgcctaaggcccaccaagtctagaggctaggaaattatactctataccctttttatatt

SEQ ID NO: 96063 - DNA, 544 bp, Cannabis sativa
tggttcttggtaacccaaccacaatgtccatggtaaaatcctcccacttccatttaggaagtgttagtggttacaataatcgtgacgatctttgatgttcaacctagatctgctgacaaattaagcatcaggatacaaattccaccacttatttcttcaatccgcaccaccagtagtagggtcttagatcctggtacatcttggtagtgccaggatgtagtgaatattgagtggtatgatctagcttgaggatttcacttctatgttccgcattagttggaacacaaaccctagtctcttacaatagcatcccgttatctgacatcgtaaactctttagcttgactagcttaaacctcttctcagatcttcactaattctggatcagtaaatttagcagatttaattcattctaacagattagattggaacgtcagtttatgaaggttgcctacaataaactcaatgcctgatctgaccatgtcttctgctagctgaggtgaaatcttattcttactagttacttgctcgggatccttcctgct

SEQ ID NO: 96064 - DNA, 1210 bp, Cannabis sativa
  modified_base (66)..(66): a, c, t, g, unknown or other
tgtactaaatcatgtcccttgaactttcatccatattagaattttttcactaaaattagacaaaantccttaaatttaacaatctcaattcaggggaaatttttaacggccaaaaaagttcaggaggcacgatgtagtgcatgtcaaaattcaggggaaaaaattactaattagccttaatttaatgaagtgactcaaattattcttcaaaacttaaacattatatatatttggcaaaaaaaaaaaaaagtctgccttggcaaaaaaaaaaaaaaaagagacacgtttgacaatgtcttaagattaataattgcatataattgttatcttacattttagcatgtatgacatgcaatcaaaattataacatgtagcaagacagattatcataaaattatatctcgtcgacacattaagattgcacagagaagtattttccttgttgaatgcttatattaaaggatcgatatatgcttgaccaatatatatatatatttacaaagttaatggttcagcgagacaattatttctttggttcccacaatcccgacgatgacatactcaattcaaatccactattagttcaggattccagaagattcactttttataatgttctttttaattttgaaattaatttaaattaattaaagtattttaaacttttatgatagtatattaattgaacttgttattatggaaaaactcttatacatttttttattaaaaaaatttttaatacaaataatcttctcaaggtactttattctaaagagggttgtcagcgcctaagtatagtttaagttatacttctcgtgtccttccataagtgttgggcaaatctaacgcaaaacaccattaaagtataataattccgagatgagttcatctcaccaatcttacaattggtagtgattattcatagcttgcccttatctttaaaagggtgagtttaaatatttctaccacatgtattttctgatgcgagtttattgaatgcattaattgctttataacacgagctagttttttttacacgtgccaacaccatattgttgctcgaaatatgggtataatagagatataaaacaacaataatttattatattttgttgttacttatgtcaaaaagaattaaaatttttaagtaattcaatattaaaaagtaaccaatctaaaataattaattcaatatgcacttttgcaaatt

SEQ ID NO: 96065 - DNA, 986 bp, Cannabis sativa
ttttggagttaggataggattatttgagtcgttttaagctgagtttattgattgtggtaaagtttgtgcaaaattgaggtttgagaactcaacttggttcactaatggtgatttgaatttttgacataattattggattttgttgcttgaattgagtctattatggtatatacaggtgttttggaggttattgaaaagtttggggttgagttgaggcgttgggagcatttttgggatttcctacattgaactggtcgaccgattcatggggacgtgtaggaacaaaaattccggttggtccccaagaaaccccaccgaaccaaaattctagttggagaaccggtctaccgattggggcagttttatgaaccctagtttttcctgtttttgcgatatttagggtattaccatgctattcatcgatagagaaatctctagttttaattttaagtctccaaaaagcgtgttagcgtgtctctcattagctttacaaattttgtgatattgggacctgtaaagcgtcgagctgctgttgcacgcaggttgaccggcacacctgaactcgaaaacaaggtaagattagcataaagtatatatgtatgtgaatgaatgcatgttattattgtttacactactaacactgaaatagttgtagaattaagtgtgttagtacaatatagggtattttaagggtagttacggtgttaccaacacgagtacaagtgggtacggaatgcatgcggtacaacacccagtaactcttaaaagtacaatatggccctaccaacactagtatggagtcggtagtgcatgtggtacagaggtcgtacttccgttgagaacgttcttaaccatttggtgagctttgtatttaggtccaggagggcctaggtgcaagctgatattgcattatatatatagtttatgcatatcttactgagtctgtcgattcatcagtttattaccttgtgtgggtaagggtaagg

SEQ ID NO: 96066 - DNA, 636 bp, Cannabis sativa
aaataaattaggaatgtttatttaggtgaaataaattgggaagataaaataggtatttgtgtgtaaaatgtgggagaaaaaaataagaattttgactttttttaatgagaaattcggctgagagaaaagccaattaacaagtcattttcttcttcttttttttggtctcagcgaacacatggcgtggttggattggaggaggaggccgacggagacctgcgtggcaggccttggttggcggagagctgctgacgaggggacacgctgctcgcgtggcatgctggaggggaagttggcaggacccacgcggaaggttggagcaggcagtgtgcaggagctcactctccgctgtctggggcgaagcacactctcgcccttgggcctttggatcaaagcatggacgactcaatttgggtcaaatatttgatcgagagtgggcttgcataaaggctcatcatattttctttttgaaattgtattttaaccccatatcttcaatatttctccaatttattcctaaccttcaccaccaattactcctaaaaatacataaaataaattagaaactaaaataaaattaaaaataaataccacataacacattataataaaataattataaaaacacacaaaaac

SEQ ID NO: 96067 - DNA, 1122 bp, Cannabis sativa
ttactttgacccagtaaaagcgggcttgttacagctgtgagatattcaaatattaaccgcaattatattacgtgatatgtaatcaaactccacgatttcttatatatttaaataattttttaattaacttttttaattttaaaataatttctaaatatttgttataccaaaaattcggttactattttaatggaagacacgtgtcaaagtaggaagaatatggatcaatatgtgtaacggtaattataatagaataactcattaaatgcggacgtgacagagtatatttacagcttgctgactataagatcttatgcgagataaagatatacaaactattgcctcatgcattaacgagaaaccatacagcattggatgcacaaggcgagacatcaacctcgttacgcatgagtagacgtaagcgaggtataatgactgtgaagacacttagcgtataatatatagtatacaaactaagtataacagttgggtaaacccaagcaactaatagcgaggcacccatctcgctataggaaagcacactcgttgtgctttcaccaatcagcttcaggcatcttttagtgagatttatagtctttacgagtcaattctctcagatagaagctaacattcaaatgatattggctgttgaagtttacctcgtcaccgagaactgcaattgacagatggagcgttatgtcttcagagcagaagcgacgagatttacattttcaacctcggaaagatatggaaaaagctccaactcgctttcaaggtcattggtactgagttcctatcgagacatcccagaatattatgatttataacgtgtttaatacacgtttactttgacccagtaaaagcgggcttgttacagctgtgagatattcaaatattaaccgcaattatattacgtgatatgtaatcaaactccacgatttcttatatatttaaataattttttaattaacttttttaattttaaaataatttctaaatatttgttataccaaaaattcggttactattttaatggaagacacgtgtcaaagtaggaagaatatggatcaatatgtgtaacggtaattataatagaataactcattaaatgcggacgtgaca

SEQ ID NO: 96068 - DNA, 980 bp, Cannabis sativa
agagagagagagattaaaatagattcaatttgagatagaaaacactgattatcgaagttttataccgaaccaacatagcatataatgatattgagactatatagcatatgataatgaaggggaaaaaatgaaaagaatatgcctggtaggaatatggtattaatctagtttgaaccattagggtttgattaataaagattatcattgatgaactgtattatatatatggtgctaaagaatatgcttaacgaaaatgctatctttacgtggacgagcagcttattaattttaatattattatatcaatgtttcatactgaacaatacgcatttttttaattgattttatcatatatatgatgaagatgagatgaaatttgaacttcacgtgttagttcatctgtaatgggaaatggtttaatgacaatatgctaactgatttggctttataaacatttacacttcaagttttttttttaaaaaaaaaattaaatggaataaacaataattaacaaattaatctctcgagtgattaacacttcaaatatagctcacgactttagtttagttacattattattacttgacctcttgagattcgccactttcttatcaagtacaattttatgaaactgatcaaaacaactgttcttcccttacaattcattaaataaatagtcctacatttttttattttaatagattatttaatttgagaggaatatataataaagttattactaataatgaaggaagcttctttatctggtactcaaggtttatttttaaagaggcgatagattgaatagattatcttttaaccaaactgatcagacattatttttcatataaaaaaaactgctataaattaattaatcattgtgttgttttattattttgtttagagaaaacaatttttgagtcttaaataattaagaaagaaagtataggcaaagtatataggaggtgtaatgtacggat

SEQ ID NO: 96069 - DNA, 1973 bp, Cannabis sativa
ctctctctctctctctctcacctcgttgacgaccaccccaccccctccctctgtctcgtctttctctccctctcattgaagaccacccaccacctcgtctccctttcatctcatctgatcaaagcccacgacgaattcaaactcgaaggtttttctctcttgtttctttatttattattataatgataattattttttttattttacagatcagctccgatgagctattagttaaggcgggtggtctcaatttgagggtttttttttatataaatctatggttatttagcgtaaattttatggtaatttttagtgtattatttaaagattattttgaatatgttgtttttatatattgcgggatcgtatactgctatttattttgatctgaaattgtagttatttctttgggcttagatttaaaatggccgaatatatcaaaaaattgatttttttttaaatttttttactctttcaggaattgtgcaaaaccatcgacaattcttcctattaatgccgacgacttttaactgtcagtaaatcttgttactgactattttccacggatacctattacactcctagttcctaggggtgaacatcgaacaggtggaccaagtttagggttagtgaattttagattcacaggtttcgaatgaaaaaaagtgaactcgcatcagcccgttcacgtgtggcgggctgcaggtttgcaagtttgcgggtcctaattgggcaggttgatcatgtcaacaaattagacatacataaatataaacgtacaactaaactcgaaacacttacctaattatatataaatatataattaaaccattagatttaataaaatatatagatatataaattttcaatactatggtttataatattttacgaataattaatattcttatattagaggtccgatgtatgtgttaggtttttattagcactattttttggttgattttagtgtatttttaaataaattttactcttgttttgtacaattttaagtttttggtagctgttatattaaaggtttaaaatagaatctaaatggagtaatattgaaaaaaatatgagaacatggtcaaacaaatcaactctgggggcaagagcatctgaaaattaattcgaggaaaaaattcagaaattttggtgcgattagagctcttgagatgaagaaattacaaaacttggtggagcgcctcaacactaaaaatccatgccaaggaattaagggctaaaaatggcagagaaggtcgaactggaacaaggcatgggcgtgcctcaacactagatcttagtgttgatgcaaaaactcgtaaagagctcatagcccaaatttaggggggttatgcctcgacactagcttttaaagttaaggcccatgtttaaaaaatatcaagggaatatcttattcgagcacatgggtcacagcactaagaatccagtgtcgcagcccgcccccctaaaagttgatatttttacatttgttttatcttttttcggcaatgaaaagaggtggactttcatatttttcaggaagcaatcagagagtacaaaaattagagagtagaaaggaccgagaaggcttttttgatggagttttcaatattctcttcttttctgccttttttcttttgttcttaattgatatgagtcgatttgttacgatgaacaagagtagctaaacagtttattagagtattgatggatattgtttgacatcgatttataatttttggtgtgatttaattcttccccaattttctatgtattctatttcattcgtacttaattactttaattgcataatcactaattaaatattaagtattttcatacgagatatgagaaataagtgtcaattatgctatactgaagtatgaacaaatttctatctaggatgagagtacttatgtggtttggatagcttataggatttttgtgtttaatatcttttacatgtt

SEQ ID NO: 96070 - DNA, 1211 bp, Cannabis sativa
  modified_base (229)..(261): a, c, t, g, unknown or other
taatagaagtaattcaatactattaatgaaataaatacaaatagatatttacagatagtcttttcatttcatactttatatattatgaatgtgtatgtattattactattattattgtggcacttttaatattcttatatttcatatgtaatttattgaagaaaaaaaagagtgaaaactttatcatatatattacatcaaaagatatattaattattattattattannnnnnnnnnnnnnnnnnnnnnnnnnnnnnnnnttattattattgttattattaatagtattatatttatatatacatattcgttaattatatttttttttattttatattatttattaaataatatattattttattttcatttttaaagtaaggcaataaaaattaatttaagtttaaaaatttattaaattttaaattttaattatatagaagcttctataatgatactttcacatatcctccatacatattttccacatatattttatataaactatatgtatctttcttcttaaaaaaaatatatgtattctttttttttagaaaaaaaaaatatttagtattattcttaaattttattattaattatttgtaaattttaaacaaaatcagaaatttgatggaaaaaaaatgaaaatttaactatagaaattatacatataaataatttttaactatataaattataaaaagtaaccatagaaagtaattattgattatataaatttgaatataaaattaattattatttaagtatgtatcttctaattattaataatcactaatataataaaatataaaatgtgaaataatacatatattatcaacatatattatgatgaaaatagaaaataaatttatattatgaatattatattacactatttttttaacaaattatattgcactacgtaattaatcataaatttaataaataatttattgatagttttatgcacggttacatatttatcaatttataataaatatttattggataaatataaatattattttaattagcagtttctataataatatgaatcctcatatacatatataaaagtataaagaccgcgcgaagcgcagtttcgttctctagttttaaataattttaccttaataaaaaattaaaaagtgagagaactaaggagagaataattaaaagtatttagagtaattttagagtgtcacgtcac

SEQ ID NO: 96071 - DNA, 532 bp, Cannabis sativa
atttcaggagttacacaaccccacttactcgcagaacatcagtgagagtaattttctcatttaaaacaacactgccactttggtgaacatagagacaattgctatttggtaaaattaattttgtagaaggtatcttacacatatattggaagagtttaatgttagaacaaatatgtcttgttgctcctgagtccataatccaagaattatgtaaaggagattgggaattatgggatagtatgatacctgtgttcccggatgaagtagatggttcgggattattcataccagattgctgtgaggcaagcaaattaagcaattgttgatattgagctgtggttaattgaggaaaaagggcctgactttcttgttggctgctgcagttttcatcattagtttgcacctgatttgcattggcttctttaggcttgttcttgttaaaacccggagggtacccatgaattttataacacctttcgatagtgtgtccaaggatattacaatgagtacaaaaggggcggttcttcttagg

SEQ ID NO: 96072 - DNA, 741 bp, Cannabis sativa
aacatttatagagatatatataaggggacatgaatgtatgtatgtaaggtcctcttttgcttttaattttgaaaaaccaactcatcttttcttgtctccccatcattatatttattagtgttttacttgcttggccagaatctatacatacataaatatatatatatattatatataaaaaaaaaaaacaaatactaaattttgaagttgaaccatccaatattaaacatgcaccacccaataacttgacaaaatctaaaatgatatgagaagagtataaaaatatatgtatatatagatataatatgatagtatgtattagttagtatatttgagtttttagcttatatgtggttaattaatattaatataatataatacatttttaagcaaatttctaatatgaacaatttatgggagtcctaattaaaatagggttttttatttatttatatatatataacattcagtatatattaactatttaaaatatatatttttttttttatattttagaagaattatgaataatttatataataattaaatagagtaatttataatattatctccacacacaaaatatgtaccaaaatgttacatcgatcgatacaatacttttttaagttatagatcttaattatcttcactagatcataatatgattgactaaaaaatatgtcatatatatacatatgtcacatgagtttagtaactagtaagtataatttttggatgtat

SEQ ID NO: 96073 - DNA, 1087 bp, Cannabis sativa
atataatcagagtcaggcattggctcctacatcttctcattacgggaatccttcagggataaatgggcaagtcccatctcactctgctcctgctgcaagcctagcgggaccttctcaaggctctcgaaactagaagtcctcgaaaggtaacaaccagacggatgaccagtgacagaaaagggggtacactccccaatacacccagtacacggaactgacagactcctaagaacgtgtgtgtttcgccaccaggcaaaatacgcattaccggagaccgcctcctttatacagagatagctcccgaagggatcccaacaaaagatgtgaataccataacgacattggacacaacaacaatgaatgcaaaaatcttaaagatgagatcaaaaacttgattcgattgggtcatctctacgagtggattaagaaccagctgcctcatctcaacttggttccggtagcaggaccttatccccaaggagtgccagggggtgcgtccggagatttggcaccagtcgctcccccgggggaacctcagcagattcctggcttgccactgagacccaatggaagagtagctatgacctccagaggaccgcatattggagggactactcgaaaggaattgaaacgctatgctagggccgtaacacattgaggtttgggaagttactcagctcccagctcaaaggccccgactcatggatcaacccattacgttcatagaagaggacgcagagacggtgtgttttcttcatcatgaccctctggtcatagcaacacccattgccaagaagattatggctagaatcctaattgacaatgggagttctgtgaatttgttatttaaagaagccttaacggtaagaggcctcacagaccgagatctctcgccaagtggttcccagctcacgggattcaattggacaccacttatcccaatgggaaaagtaaggttgtcagtcaccttgtgctcagacacaccccaaatcacttttaaatactgcacattcgtggtggtagactgcccgactgcgtacaacgcaatcctcggccgaccggccctggtggacttcggcgcagttac

SEQ ID NO: 96074 - DNA, 592 bp, Cannabis sativa
cctttgtcatgcaagaagacttttaatataggtcctaacaccaatctccatcttgtaccgccgtaatcatcaataggacaagccacccgactacgtcaatatcatatagactttcgatagaaggcaccatataaatcttccatcgcgaggtcatcaatttaagagcttctctcacacatcacaaatgcagcccactattctagcgctccaaaacctttggctctgatactacttgttgggtcccgttctttcatcttgtcaggctgctacctcactttgactctcacattagtatgatatggtttgttttaggtctaagccctcacaattttatttttaggcaccttctcaaaagacttcatactaatagagtaagtagaacactacttatatctaagacaattcttgcatattcttctaatgtgggacttgattgagttgatacctcaacaaattgttccctattttttttttcttattttagattttaaataatattcctcctaaattataaaaccattacaaatttcctaattcaattacattttgttttttagtataatactattatgatgtcaatttagcaatttaa

SEQ ID NO: 96075 - DNA, 1098 bp, Cannabis sativa
ggcacctagacagtggtacaaaaagtttgattacttcatgttgagccatggagacttttgattattgggtgcttacaaacaggtcgagtctacctacacctaacttctcataacattcaaagaaaaattatgtgaaaaattaataaagttaaaatttgatacaatttttattatttaattatttatttaataaattacacaatttatttcatatatataattttaaaaaatttaaatatatgccgcgtaaattatttactagttagaatataatttgattaatcttaaatatattcttgacagatgttctaatgtatataaataaatatttgtgtttatatttttttttttccagagagatatgttatatatattttctaatatcaagtatataaaatagtaataaaaattttactgactaaagttgaatcaacttgcaagttgcaagtatgcatattactatcaagttagaaaaattgtttaaaatgacttgtttttgatttaattgtcaaaaataatttcgtcaaattttaataacgtttttatttatttgaatttatttcaatacacttatttatatatttctttccttttttttttcctcttttttccttttcttacgctactctctttctctctttctctttttcttatttttttctcttatctcaaattttaaaaataatttctgataacgtcattacttagatgaacctaaaaaaatactattacaatctacttttcaatgtgaaaatttcaagatgtggaaaatatattttttgtttgctatttctagaaaaaaaaactatttagttactaatatagtgattagttactgttttatatatatgtttttaaaatttcaattaacattcattttataatttcgttaactgaattatattatattatacgaccactaattagctttcaaaataataaagatataaataaaataatcagtatattaaaatagtagcttgttatattacatgtcagctcattaatttcgaaaatattttttaaggttacctaaatgtattttaaattataatctatcataatataacttaaaaataactaattagttactaagat

SEQ ID NO: 96076 - DNA, 594 bp, Cannabis sativa
gatgttcacctgacagttgtgcctataagaattgtgcgattatttggtgatttcatgcgatttttgtgcgatgacttacaccatttgttctctgtttttatgcgatttcaatgcaatttttatgcgattttatgcgatttatgataaataagcatttttgttttgtttgattgcagatggctccagaactgattctgtcattggctgagcatttttcaagccgtatcatcttactatacgatgcatgtggaacactatactctaatattttatcttaagatgatgactattttttactcactaattttaaatcatcgaatcattgacaatcatttatttgtttgtttatttcaagtctctttatattatgttgatctcatgcgatttactcttcatcttgtacactatttgggagaactgcatgtatttatggagtggccatggcctctcctaattttttagaaaaagaaaaagtaaaaagtatgcgtaagatataaattaaattagaataattagattttacttattagaaaaatatgaattttcttattagtaagcctaataataaactgtgaagttaaaattaaaaatgaa

SEQ ID NO: 96077 - DNA, 687 bp, Cannabis sativa
  modified_base (564)..(568): a, c, t, g, unknown or other
cggctggggtggcgcctttagtaggggctatgtgggcagatggggctttggctggagcttgatgagttaaactcattgtggtgtgagataagataagaagtaggaatgaaaaagagatgagagtttgcttcatctttgtatatagctagggtttaattatttagttattatttatttttatttttttttttgattatgttgagagattttgtgagtgtttgatgatatggtgaatgggaggaatattggggttttatataagttaatatggtttgaagggagattaattaaatcatgaggtggttataatgattattgttattattatttagttgtgggaagtaccaaatattatggtggctagttagttggattataatgtgttgatgatatctacttttgagttggaaaggtacgttaaataatattgaagtgagagtgatatatatgatcataaaatatagagaaatgttaaagtgtaccagtggtgcttagcatccttctatgtattagtatcgctattggtccaactaagtattggattccatataatttaatataatnnnnnttaaagaatatcgctaaccaatcgcaacgtgacatgtcgagaaggtgcgagaagatgctaaacactactggtgccttatagctctaaaatataagaagccattagattttttactgatt

SEQ ID NO: 96078 - DNA, 1249 bp, Cannabis sativa
  modified_base (26)..(27): a, c, t, g, unknown or other
tcgaacatataattaagattatattnnactgtgctgacaacactataatgattaacaaattcatatgttctggacttaaatagaattcatacagttggaataaacccccttatttcctacacactgtaaaaaccagtttattacaaagagagttacaagtcagtaaaaataaattcgtaggtggccttcaacctctaatatacctaggcagaacacttaagttagttacaaagtatttaaccactttggaactaactcttatgttttctctgcattccactacaacagatataaaaggcaaaaaataatctcaatcaaagaccgagagaaaaactagagaatatacaacagaaaatagaatgtttctcaagagcagaaatctcacagatcagatccaaaggagagaaggttgaaggagacttacattgagtgtgttttggagccctagggttagggcttggatgtgcaacaccaaaaccagggggatcgagtgatgaaaaacaaggagacgaagatgattagagattaaactcagagagggaaaaagagagagaaacacataccgtaattaaaaagggatttccaaattcatgcctttgttttagaatccagaactttgtacacttgatctttgaagagttatagcggaatcgagctatctgaggcgagctcaagaggatgtacccagtaattgttttttggggaacctctataaatctggtgcattctttcctttaattttctgcattttctctatattgtgtttatgtgtgtatatgatttctgggttgggttttaattggtttaaggtgtttattcatctctggttttttctaggtttcattgttgtgttcttcgtgttcttcaaataagaacaacgaagaaagaggctcggtgtagaggatttatttttctgggttgtattttgtttttgggctggtgttcttcatgttcttcattgaagaacattgaagaagaagaaggcatttgtttctctgctagggttattttaggaggctgccgtttgaatgtttgggaaggaaagataatatatatatgagatagattagggttgctggttttaatattaaaagtaaagaggggctgtcgtttattaaatgctgagggtcaaaagaaaactttgactggtaaaagggtcagatttgaccaagagaactgatttattctctactgtgtgtagggcattaattcgtacacatacattatatgtatataatcatgaaataaa

SEQ ID NO: 96079 - DNA, 698 bp, Cannabis sativa
aagttggctttggtgtggctggtgcctactgcctggtgagtttgatagtgtgactatccttattatgttaattttgtaagagaaatgttaaaacacagttgtgtaacacttttttaagtgtgatattattattggtacaattaattattaggttttatataatttaatttaataattttaagcaatattattaagtaattgcaaggtaccacttataacttataagtgatgctttgtaatgattttttttggctgaaagttatttttgtaatgattgatattgaacaatatcaatgacattttggtatgatctttttctgcttggagtttccgctcattcctgtttttatatgttatagatatagtcgtagttagtactataaaacctagttagtactatataaacgtgtatattgaatataatgatggctgtatttcttaaagactaaataatacctaaaatcaaacttaatacaaatctcatagaattaagccatatataaaaaacaatatatatatatatataaatatatatataaagaaaaagcaaaatccagcttacattactcaattgcattttatgtgatgaaactgaaaattattaactaattatatatagtgaataattgtttaattacatcatgactaagaaactacatctctacttaatataatttgacgcagtattctcagcctta

SEQ ID NO: 96080 - DNA, 679 bp, Cannabis sativa
cagccccgtacggcttcaccaattgctccacagattgttcgaaccttttcggacatgagcgctccgagtgtccaatgattccacacacaaagcaaaaggtaggaaggtgttcatatttaaagtttgcccaaatccattctccattctccttgcaaagcttcattcttctctttagaggcttagcaatatcaaccgttgtacgaacacgtaaatattctcgccaaatgccattgaaattctttggatcggatttaatatacgtacccacataaccgccagcactacgaaccactctctctaacatgaaacccgatttcaagtcatgtatttgaacccagaaatcgatcttgtgtaacggcactaccttcgggtcttcgccttttttcagcctatgaaacacaagagggcatcgattaaacgtccaagggctgccatctatgacagtttggacatcaagttcatgaaagaattggaatagatatctattcgggccaaattctttgatgaaaacacccttgcctggttgccaaagcgaagccatcaaatgcctcatcgcatcaaagtccaccggccttcctgtaagaaacctcccaaccaaacaccaccggtcatcgaataaaacgtcctcagcctcatcctcccccccaatcaagactccttcctcctcatcatccaagct

SEQ ID NO: 96081 - DNA, 2050 bp, Cannabis sativa
  modified_base (1995)..(2000): a, c, t, g, unknown or other
tttttaaagtatagtttttcaaatttccattataaaataataataaaaattattattatttttactgaaaaaatatatttttataaataaaatagttgaaagaataaaaaaaaaattcttattaacataattttataacttttagtctattttataaaaatttcattattttatacattaaattctagcttttcatataaataattatactaataaggacattttgtaccataatcgggaaaaaaattgtacacatgtttataggaaaacaaaaattgtaggggcatgttttctttagtaagcaagcaagtgagaattttattgccaacaaagaactcttttacaaattgaaggggcatgtctttgtcttatatcgtccattggtacgttatttagagcatttatggtacatttataaattataatttttctttttgataaatgaccatttatattgtataagttctcataaaattatgaatacaatttaggataacgaaaataagcttccaaataactatttcgtgttttcaaaataatatatttttttttatcaataacaaatatattctagtgtttatatatatacatttatatatagagaattattgcaattgtatattaactatgtgtttgatgtgtgtattctattaattttttttaagaaaatttataataatctatgtattgtatgatagtgattttttaaaattataaaaaaaaatgtgacatttaaaaataaataaaaaagttatttataaattagtaaagtgatttaattaataatataattgtaataaaattatgactaaatatataagtaaaaatggatattgtttaatacttacacttgtgtgcttaatactactcactgaattatttttttaaataaaacaaacttttttaattaatcctaatttaaatatattgcatttaagattacggtattacaatacaattttctaattaaaataaaatcttaaatgcgaaatattttttaaattcccaaaaatccattatatttatatgtcccattttttatttttttttttaaaaattcaaaaaagtttaatgagctcaccaacaaaacttacaagataaaattacttacaacgcttttgttaaagcttctacccactttctatttattttactcaagttcttagctttcaaagagttcattctagaacaaatactattactatttttttttgaattactattactattagcaacagtgacggacgcacatgtattattgtgggggctatagcccccactaacaaaattgttattatcttttaaaaaaaattaaatgtaatttttttaatttgataattataagttaaaatagtaaaaaagcccccacaaaattaaataaatataataagagtgattataatataggtataaatattttttattgataaataaacccctacaaaataaaaattctgagttcgtcactgattagcaatacaattaaaagtaaccttaacagtaggaagcttttgctcccaaagcaccttatttctaacatgccaaaggaataaattattgctgtaataacactcaaaagaacatttcttttaccatgcatgcttatttatattaagatttacaattagcatgcatgtataaaattaagcatattaatcaaaatcattgtttttttaaggataattacacaaagtactactttttgtaaaaaaattacattttaacggttaaagatttttttttcttacatttttacggttttcctaaaaacaacacgaaaacaataaggaaactacataaaagtaacatgaaaataacatctaaataacatcaaatcaacaacaaaaaataacatacatattacaaaaaatcaacaacaaattaacaagagtacaacataaaaagaccatattttaattaatttctgtaaataaaatcaaaaatatcgtaaaaatatttaaaattctgtaaaactgtatttttttaatttttttnnnnnntttttgtgtatttgtaaaatattctcttttttttttaatataatataatt

SEQ ID NO: 96082 - DNA, 717 bp, Cannabis sativa
tgaacatcatttttccaattctttcaattgagcatgtctaaccatttccaaataccaccttgccagtgttttgattctgagatctttgatccaactatttttgttagttatatggaagttacaccttaagtcaattatccgttcatttttttgttcagttgaggttagagctttaggtacctcaactataaatacatctccatcttcaaattgttcactatagtttgttgaattcttctggtcttgatcatttgatcttgaatattttggtttctttgtcaattcgtaacaaaatttccttatgtgttttatcttccataattgtaacaaattattgtcggtcttggatccctttgattgagatcgacccattcccttagcactttgacttcttcctttccttccatgtgagtaattttcatttaagttattgcctctgtaattatttcttcctaaagaatagtgggcctctaaattgttcttctgaaccttgcctgcttgcttcaaagatagctccttcgagtatatgattgtatctttgaattgctggtattgagatggcaacaaattaagcaacactactaacaacctagaattcctaacatttttacactattgggtaaagaattcctgacggtctataaaactgttacctataagaccgtcacgaatactgagcagaataggcgatgttggaaaaatatcaaggaaaagaat

SEQ ID NO: 96083 - DNA, 750 bp, Cannabis sativa
tcaatatattattaattagtttataatatgatgaatagagagatttctacatgatcatgaaatattcgaaaaatgagataatggactagtaattaacttatttttattgttacggctaaaaaaagaagatttaagtattaaagtgcagccattaaaacatatgagtattatcatcttatataatccaaatatataaatttataaaaattaaaaaatatatatattaatttcatcggagtgaaagtaaaaaaaaaatattttacttaggtacgtaaggaaatttagaaacataatttaaatattattactgttaaaaattaaacttaattatttatttataatcgagaattaaatttaagtatttatatttcatattactcaaaaaattaatcaaagtgagacatataaatctgattgtactattgtagtatgtgtataccaattataagtgtattgattccacaataagtttttacaacactagcatcaccaattatagtaggcctgccaatttcttcacaaatttttaaaccaggaactatttttttttttttttgctactttatcaagcatatataatactctttactcttctttttacatcaagtttaattctttttacaataaaatttattgtgtatatcttcatgattcatagagcttaattatttgtccaccaaatatgatatatggttgccaccaatgtggctatgaatacttggtgtctgaacctgtttgtttaagcatttg

SEQ ID NO: 96084 - DNA, 614 bp, Cannabis sativa
tatttcctccaaaaaaaaattaaacaataaatcaatttttaatagcattttttaggggaatttttatatatagtaagtaattactataatttttttttgtacgtattcataactctaatttagtggatttaaaaaataataataataaaaagaaaaaactcaaaaaattacacatgtttaattttcttcaatgaaatttagtattatttgatgatggcggtttttttttattcaatgatcattttagatgatgggaaaataaaaatcatgttaaagaagaagagtcttttccatttaaaaaacttcattatctatcataaaaatatgttaatttaatttatgagctcataaaattaccactaacataagagagatattctagaaaaactaaataataaagttttaatgtatgataataagacactttgagcccataataatactacagtagaacctctacccaagaatattctattcaagaataacctctaatttattataaaaaattgaagtcccaatttgggcctattataaataagaataacctctaaattgtaattagttatatattttctaagtcccaacttaaaaatgtatacctctatataagaata

SEQ ID NO: 96085 - DNA, 1626 bp, Cannabis sativa
gcttgagaagccatagttactactagtgaattcaaggttaaattaggtcaatcaaatacatatttcaaacccaaagtaaagacaacgattttctcctaaaatataaacattgaactctttccctgtaattgtaaacaaatataatcaaaatcctaagaaaattcctatccacacaaattaagtggactcaaaattaattctttgacaatcccttcaacaataagagagcattataatatccatgaaggaagaactgaagccaaaattgatctacatagaactttctgacattctaaaatctaatgaagaaagaaagaaactaatattatttcaatataaaaaagaaacaggcactgacttaccgaaatctgattttcaactttgattatgaaccttcacaaaaactctcaatgaaaattctccgatgaataaaatgtgattttgtgagtttggcgctaaccttcagaaagctaaggagagagagaaggaagaaggaatgagttgcagttataataataaaacgattgtttgaagtgagtgagttgaatgaggccactggccggaaaatgctgggtttcgccggagactaaggcgagagacagagaatggtggaaaatagcggcttacagtgagttgtgttgatactttcgtaagggtttaggctttacttgtttgggaatgtcatgtcgtattgtaattttattgtcgtatgtttatacaatgcaaatttcacaataatttctttccaatttactatttaattttttcttttttatattttatattaaccatttaattatttttaaaatagtattatctatttaattaaatatatatgatatacaaattatctagcaacatagatataaagtgagtaagaacaacactcttattgaaaacaaataggaagttctaataaaatataagccattctcttaatgggacttcggtcatacaattaagcaattattaacaactaaactaaaaaaaaaagttatcatttaattgactatgaatagccttacttcaggagaggatttgtttaagtcttacttcgaaagaaagtaagcacacattaatagctgaaagaaattcattacttggtgtgtttcagagatcaattagcaaggtagttaacaaagggttgcggcaaatcactagaaaaagtctaaatttatttaagttaattgtttttgtaatatttgatactatactaattgatttcattatttgggtgtgcccccgtagattaggagtgtttaaaagaatactgataccacgtataattctcttgtgtcaaattttttaaattcttcatttatttatttctagttctggtttgattctacaaatatgtgttctgcaatgacaggattgcaatctattgctgcagactatttcaattgtgttttttttttgctaaaatttagtaaaattattggcatttgcaaaatatagtttttcaattagtattagagcgggacattaaactcttaatgtaatccttttaacattttcttgtatttttgcaatatattttcctttatagaaggaagttctattctttgtagtttgtccaccattccttaatgattataaataaccttattggaaggttagaatgtt

SEQ ID NO: 96086 - DNA, 644 bp, Cannabis sativa
taataacatcattccccactatctcccaatatctcctatagaaaaaacccggcatcccatccggccccggggcttttaagggatgcatagaagctaccgcattccaaacctcttcatgggacggaatccctttcagcattgtgttctcctcaaccgtaaccagaggtgcaaacagatcatggaagtcttcgtctaaggtcgtcccttccgccttgtataactcctcaaaaaaatcattaaaaaccttccccatcctatgagtttttgtttcccagcctccctctctattcttaatcgcagtaataccatttcttcttcttcgaatgactgtggaggcgtgaaaaaactttgagtttctatcacccacctttaaccaaatttcccttgatttctgcctccacatagactcctttctaatccaaagctctgaaattttcgataggagggcagattcctcttgcaaaagattgcttgacaccggttgttgttgtatccatcccaatctagtctctgcttccttaatcaaagactcgcaatccccaaaagctccatttttccatttccgaagggctaatcgagtgtcgtttagtctaccactaagaattccacacggtctgcctttctcaccccacgcccaccgaatc

SEQ ID NO: 96087 - DNA, 726 bp, Cannabis sativa
aacatgaaaaattatttattatgtctccatagtttggagtgatttttaatgatgaaaaaaaatcttaattaaactttaaactatttcatgaaaataatatttcatataagttgaggatgattagttttgctaaccaaccttaatacaaatacaaaacaaaatattaagtggactttgagtaattcaaacttcaaagtttgtttgagagagcaggtaacattatatttccaaaacaaatttataaatttaaataataagccggtttaaacttgaactataattaaaaaaaaaaaaaagaaatatagatatacattaattatttttaaataaaagttgggttttgaaagtgtcacaagattgaaatggccttgtaactttaatttgaacaagtatattttgttcttaataaactaggtcacagctcgtggaagccgatgatgatgatgatgatgatgttgtcacattattccatgtgaacaaataaattaaacactattttttttaattaattaatttatttattattaatggtaaagaatgataattaaaaggaaaagttgggttttaatttaaaattaatgaagacgagtatgcggcttatgttgcggtcacgtctttgtcaaaagaaaccaaacactttacaccacaacgctacaacgtgtgattattactttcttatgtttgatttaattttatgtaattataattacaacctctatatatttt

SEQ ID NO: 96088 - DNA, 1305 bp, Cannabis sativa
acccataggccttttttttgcgacaaagtcaccggccaatcaatttttaaacttggaataagtttttcatttttaagacaactagctgaccgagtagcctttaatctcggtttaaccgtgcatcgttatctcttttcaatgaatacaactccttgttatgataattgtttgtgcaaatgtgtctattttttttagcttgttatttacttctaccaatgctttgtacgggtatagttgcccccaagtgatcgagtagacttttgaccattggtcacttgcatttcacaagtatggtttttgtttctttggttccttggatttgagcagacctttgtatgcatttaatggtaaatatataacttgctaatagaattgacacaatctgaatttaaatagacatctttattcattcattggtcggaacctttttgataccatagtaacttacataatagctattatattgatctaatccgatcattagctaaatttaaataaaacaaattgcatttaaaagaaattgtacttttagaggtggtcatccgacctgagtactttgttatttcacccgaaccttagggcagggtacgccaagaaggccatttacttaaagagtaaatgttcttagattttgtacttacagtggtcatccaacctgatacttttactagtagtattttattaaatgttccccgttccaataccttggtactagaacgagtttcatattttcgtaatgtctaaaacttcaacaacctgatatggtccttccgagtctggtccgagaacaccagccgtaccatcttttgtgttcagaaacactcccctgaggaccatatgtcccacaaaaaaattttgtgcctttacttgcttattgaagtacaaagctagcttttgttgacgggccaccaattttaggtttgctgcagctagtttttcttcaatttcgtcaagtgattctgctaggagggcatgattactctcttgatcataggtcaatcttctatgggtactactacaaaaagggatttttactttagtttttaagagacacataaagtatttgcttcgattggtgtaaccgatgctattaccgtagatgcaaatacttatttttttgcttcggttatgaatcgacgctaattttttttttgctttacttatgaaccggagcaaaaaaaaaaaagtttttgcttcagttcataactaaagcaaaaaatcagtgcaacgacactaattgtttttttgcttcggtttataactgaagcaaaacatattttaaaaaaaaatctaaaaccaaacaat

SEQ ID NO: 96089 - DNA, 1482 bp, Cannabis sativa
ttttttgtaggttttccctctttaagtttataatgcttcctcaatcccttactttgtttatattgtacgctcattgcatgtatgtttgtattatcatattttaatgctatgatagacacgtgcacctatgagttgttaatttttagtaattaggtttacattgttatctttgatgaaacatcttttccattttccacattacccaaacaaaccactgattcttactcatattttgaattttacacctcttctgtcattcctacaacatctcagccttcatctgttgacactcatatcagacctataaccactaactcaattgtgccaaatctggcaagttattctatgcatgtgcagggttccagttccagcaacattgcaccagcagctattattgagtttccagtgccacccgctgcaccctcattatcaattcccacaggttcagcaagtgatacccctcctgtgcatgaggctcctggttctcgaaatagaaatcttgtaatgccaacttcacttgatgaaaatcaaaatgctactggtgtgaccaatgctactggtgtgaacaacattactggagtgtagaatgttgcagctgttcctgtgcaagttgtctttactaattcccaaaatgttgttgctactcagaatcccttggtcaattctcactccatacaaacttagggaaagtcaggaatccacaaaccaaagctctacatggttatcaaaattcccaaaacagtaaaggaagcactacaagatgagcaatggaaccaagcaatgtctgatgaaatgcttgccttaattcgaaatgccacttatacattggctccattgccacctggtagagaacccattggttgtaaatgggtctttagacacaaagagaactctgatggtactcacaacaagttcaaagctcaacttgttgcaaaagggttccaccaatagccggggtttgacttcatagagacattcagccttgtagttaaaccagccaccatacgcattgtcattaccttggccttgcctcatggatggtgtataaagaaattagatgtgaacaatgcgtttctaaatggtgatctcaaataggaagtgtacatggtacaacctcctggctttgaaatacaatcatcccctccccttgtctgcaaactgcacaaagcattatatggcctcaagtaggctcctcgagcatggttcgataaattgcatcactgtctcattcaacttgggttctttccatcaaaatcagatcattccctgttcattcaacatacatccacttacacaacactgattcttgtctatgtggacaatattcttatcactgaaagtgaccccaaaattgtctccaatctcaatactgctctcaatgacaggttctctctaaaggatctcgatgatcttcattattttatgggaattgaaatcaatccaacaccatctagtttacacttatctcaagcaaaatatgct

SEQ ID NO: 96090 - DNA, 515 bp, Cannabis sativa
aaaataattactaaaattagtgtaaataatttcgtaaagcttttataactagaaaaaattaaatgtgtatggtacttaattaatagataattcagttgtttttagaataattattatgaagtattgttttacaaaaaatatatatagaaaaataatttagtttagtttaatattatttttacaaaaatttaagtcttcttttctcattttagaataataaaaagttttttttttatatatatatataaaaaaaagatgaatcatatgttataaattattttttttaaaatgtataacaatcaaattaattttaaataatttattttgttttaattatataaggcactgcataccacgtgttttctccactatatagtatatagaaaaaccaattaaaactctttttcagctacttttatttattcatttacttatttaaattttttattttgtcttatctatatgtggatttatctacatagtaaaatatgataaaatagacaagttgcaatttt

SEQ ID NO: 96091 - DNA, 2076 bp, Cannabis sativa
  modified_base (901)..(907): a, c, t, g, unknown or other
ggccaataaatcaattctcaaccttttcttcaccattttttttagaatcaggataaattaatggatgaatgtaactgaataaatgaagaaaatttagaattaatatttgcaatatcttatttactaaaattattcaaatattgaatgttaataatttatcttatttactttatcaggaacgtaattgaaatacttaaatttattaaattatcatttttaattaaaacataatatatagtaattattttataaactatatttgaaaagagaaacttgtcaataaatatttaattttataaaataagataaaaataaatagaagtcattatattccttataaaattagtgggagatgtatctattttcttttattttctatttaatcaaattttggaatttttaatttttataaattaaaagaaacacatataaagaaatgactaatttaccatcgattcacattatttattaataaatatgtgtagttatgaagaattgaatcttgaaactcttaaaagttttacaaagttttgtctctacacccaaatactagagctattattttgacgataattaaattatttatatactttaagaccgacccagttatgtgcaaagttaaaggaccccttacttagtgacaaagttaatgtttggtccaccaagaccatctccaaccttattagataaattagtgatttattgctaaaatatgtcttacattgtaaaaaaagtttgctctaataatgtgtcaaaaatttatctaaatcttaaagtagaataattgtatatatatatatatgttaaaaaaaaatatgttaaggctcgtttagtacgtcatattatattgtatttgtattgtgttgtgctgtgttggattgtattgtattgtattagtatnnnnnnntacaatactatgtttggtattgagctattaataatttgtgtaaagttataatatattttcaatacactcgacctaacaccaactacgggtcaggtctgggtctcgggtcccgggtctcgggtccaagtcacgggtccaagtctcagtccggattcaggtcttggtctgggtccggggtccaagtccaggtccacgacccaggtctgggtctaggtccccaggtcctaggttcaggtctgagtccaagtcccaagtctaggtcctggtctgggttcgagttttgggtcttgagtctaggtcccggatccgagtctaggggttcgggtttgggtctgagtcccaagtttgggtccgggtcacgtgtcttgggtttgggttcgggtttgaatccggatctgggtcgaaaattggtgttgaccccgaatcctttgtaaatattataatataagttaatatgaattatttgttatgtattaaataatataatatatattgtattaataattttagtcgtaataattaatacaatacattgatttatccaaatataatgttatttattatttaatacaataaaattcttatacaacgtaccaaatgagctcttacggtcaaatacactctgtagttgattaaaaatagttcttaaagcaagaattcttagtataggcagtagaaagttgaacaagtgagatgtggtctttatgagtttactaataatttgtaatgggtttcttattttcctcctttggagctgttttcttctagataaaaaaaaattaattcaaaattaaattatgacataataaatgtattgtctttatatttactttttttgtaattttaatattttattattaaatttagttatgtattaaattataaactatttacatttattttttattgttttatataataaaatagtaataaaactaataataaagtttttttaaataaaattattaattaaacattaaattttgtattaagatttataattatatattttaagtaaaatactaaaaattaatacaaatatattacaaaattacttcttgtgttaaatatagcacacatggtccattgaggatgttcttagataccaaatttggtattgtaccaataccaaatatggtattatagtctctttcaataaatcataacat

SEQ ID NO: 96092 - DNA, 1028 bp, Cannabis sativa
  modified_base (743)..(745): a, c, t, g, unknown or other
  modified_base (975)..(975): a, c, t, g, unknown or other
ttgaagaggtgaaatggagtcttaggactcgggttcaaagttttttgccaaagaaactttcaagtgtagatagagaatggttttgtgctctataatcatcatagtgttctgttgtaaagctgttggaaagaaaaaaaaaacatacagcagttggaaaaatctggtgtagttttctggtgtaaagcttttgaaaggaaaaaaaaaacatacagcagtaaaaaaaaaaaatctgtatagattgaggcctcttttttggggtgctcttagattgtataatttgtttgtgcaatacatatccttgatttatcaaaaaaaaaaataattaagttgattttattctagatacttaattatttctatttatatgaatttaattaaatagaaaattatatttaagtcaaaaaaaattcaatttcagatcaacttaaaatagaataattttcagaatatatttttattttattttaataatcattttcccacattaatttcgaaatgcatttattttaaatgtagacattttgaaagttttcaattttgaaaattaaattaagttaaaaattaattttaattaattttggacgaacttaaatcaagtagttttaattaatgatttaattaaaataaatagactaaaatatattatattttaattaaaaaaacagtaattagtttatgaattatctagatagatattttctaggtagatttttggtatgtttctagatatatttaattaaatnnnaaaattaatatttaagttgattatgttctaaatacttaaatatttgatattttttcttaagagatttaattaaatatgaaaattatatttatgttgaaaattaatttatttaattttagaccaacataaattagaaatttttttctagttttattttattagaattacgaaaatgtatttttattaatacattgaattttgaattcaattatatatttatagaaaattanatttgagttgaaaattaattatttgattaattttggaccaacttaattttttt

SEQ ID NO: 96093 - DNA, 888 bp, Cannabis sativa
tcgaatgttactataagataacatcttacaagtaattaataatttttcacatattaaactaaaaatgtaagacttgatattatattatactaatataataaaaaaaatactaaatgtacaaacgtggccaagtggtaccacaagatatcgtgtataattaagtataacttccacatattttaatttaataataattatataaaattattaatcattcgtaaaattttacatcaatcataattgtgctggaacattatcagtatctaataataatattcaatataatacattgtattataaaatatttaacagtggcaacaactgatgttgctaaaacgactttatgtataattggttttgagccacttatatttttttttctttttgtaaaaaaaaaaattggtgttatttagaattagcaatagtatcataattatctcataaaaattgactctctctcctccacctcacaatcatttgatctcacagctaacaaattatatttaaaagaataaataagaattttgctctctaaacttttatatgttacaaaaaattttactcaactataaaaaaatcattgtatgtatcagtatcaattactttttgctcatttctctaagtaatttgttaaaataacactaataatatatcgttaatttcaccaagctcaagaattcaaacaataaaataaatacataaatagaaatttaatgatggattgttcatactaatgaagatagtgttcatcctttatatacacatgtgggactttagttgcacacttaacaagtctccccttaaatgattttccatccgtttactctctacccattagtgtactttctttcaatgcatgactaactttggaacctaactctaatacca

SEQ ID NO: 96094 - DNA, 638 bp, Cannabis sativa
caatatatttggatacattataacctatatatatacatctatatacatatatatatacttaatgtttatatatatatatatatataattactaataatcgatcgaagaacactagtatggtccaatatcgtcaggctggcctattgttctataatattatgagctaggtgtactccaatattaaagtaattaactaggtttttttaatatacatttgtatttaataactgtatatacaaaatattcacacatatataaaacatgagccaactagttaatttggctggacagccatcgtttcatccttttaattttattcagttaattaaattaaatccatatgatgatgatgtttctttcatcttcgtctctcaaatttatatgatttttagattttatttaatattatataaatataattttaattaaatatattacatatgtatattatagttaataataaaagagatgtactaatttatttttaattgttttggtatttaaaataatttttagttattttttttttcagattatgtatgttatatagttatttaattttgtaaaattttaagaaatttgaaaaaaaaaaaaataccgaaaaacagaattcaaacagtgtattgtaaatttgcacg

SEQ ID NO: 96095 - DNA, 731 bp, Cannabis sativa
tactaatatttttatttatcttctatttgtatgaagaagtagggtgagcttttttttttttcatatgggcactcaacattttaccaaatcacaaaatatatataattataaaaagtaaaaaaagaacaacaataatttcaagacaatttgtttcagtgtgctagttgaaattatgttttgtattgacatgaaaaaaaggttgaatatctgcatagctaaaaggtgtaagatgaaagagttttactgttttatgtcatgtactattatatacttttgttttttttttttccaaaaatattgtttttattatgaaaaatatattcttgtatagttgttatatcactattcttgaaaagtagttataagcataatctcattattgttatatagagattgatgtaaatttataaatacattattttgtgtataaattaaaatattagagaaaatatttttaccctaatctacttggtatcagagccaattgcctcttaatcataatcctaatcattttcttctccttcttcaccatgtgtgacacttcaaatgaatcaataaacattctatccaaatccactattgttatagtcacatctaccacttttttaatcattattcctgcaaaaaccattccttttgattctcactttgtccaaatcactaccattcggttgaatggtgattacttcctcatatggtcataagtgatacaaatgtacatgtgtggtcgt

SEQ ID NO: 96096 - DNA, 590 bp, Cannabis sativa
  modified_base (42)..(48): a, c, t, g, unknown or other
  modified_base (516)..(564): a, c, t, g, unknown or other
tttattgatatttaaaagaatagggattacattgaaatggannnnnnnttagggtataaaacccaacagaatcaccaccacccctaccaaaactggaagtaggaagcgtaatgaccccactaacacttcgagtcccttggtaatcctgaataaattccacagtcacctcggctcgaagggccttttctaccatctgggcatacgaattagtattgtgagtagtgatcattagctcatgcttgatctgggcatttaatccagccaaatacttctcctttttcctaaaatcagtgggtacaatacatgaggccaatctggcgagcctttcaaacttagtggtatactcaattacatacattgattcctcctgaatcaattgagtaaactctctctttttggtgctacacattgcatcattgtagtatttggcattaaataggtcttgaaactcatccaaggtaatgacaataacatcctgagtgagagacaccaactccatgttggaaattattttannnnnnnnnnnnnnnnnnnnnnnnnnnnnnnnnnnnnnnnnnnnnnnnngaacttctaaaacgatgaaataaaca

SEQ ID NO: 96097 - DNA, 765 bp, Cannabis sativa
  modified_base (55)..(55): a, c, t, g, unknown or other
  modified_base (83)..(83): a, c, t, g, unknown or other
  modified_base (284)..(289): a, c, t, g, unknown or other
  modified_base (438)..(440): a, c, t, g, unknown or other
accacgtaaaaatcctcatctcgctttcttacagctcactactataatcatattncactactataatcatattttaatagttnccgaaaatctcggtcaacaatcatattctttgaaattactacttccacattgagataattagaataacgtagtaaaaacatttttgattattacacaatgccaaataatatagatatgataataataataataagatgcttctaagtgtgtatatgattaatatacccgacgaaacgagcactacaaaaaatcttactttnnnnnncaacaaaacttgtgactaaaaataaaaaaagttgtgactaattataaattatcattcctatgttatgactaaaaggtttgtggctaaaagtattagttataaaaattacaatttgttgtgactggatgtatttttagtcacaatatttnnngtgactaaaagtaaattagtgacaacttgtatctaaataatatgttttagtcacaagtaatagtttattgtggctaaaagtcacatttagttacaaaaaaattatattgtggctaaaaaattgtcactaaaagtagcagttttttgtagtggagggctgaggcgttgatgttgtgcaccatctatgagggttcaaagcaacatctaggggcgtgttactatgtgattcaagacgtttaagtcaagttttgaatcccaagtcagagtggtgaccacttttgcatgagcggcatcgggagctaagtgcaatctttctggttaataag

SEQ ID NO: 96098 - DNA, 642 bp, Cannabis sativa
taagagactgagactaaccctttatcacatttactcacctaagtcttcttcatttgcttatgccccacttgttcacaacccttttaagaagatcatttttatgaatagaaagagcaaattcaataagctcactaccattaaggacactaaatgccattccatggagtaattaatcattcccacatccttactactcttaatatgttgaagtgaccaatgtatatatttcccattactcaaatgaaaatgtaagattatagaatttgtgaaatatttagttaaaaaagtaaattagaatgaaagaataaatgattgttattcctttgattagaaactttctatcttggaaatcaaacaccagaatctaatttttcatctagcattactttccaaaccattcttcttgtgataataacaaacattctagtaccattttactcgttttttttttaattctttgcattgtttctcattctcttggtactaacactcgtttctaacactatttaatatatcatatcattattagtaggattaagtatcggatcacacaaaatttaattatttttatagaatatcgctaatcatttacaaaacgtcacgttatggtagtgcacgtgatagcaatgctcattattatac

SEQ ID NO: 96099 - DNA, 775 bp, Cannabis sativa
aatctgcgtcaacttcaaatttttagaaactttttgctgcaattatcctattaataaaaaataccataaaatattttttttaactgtcacatcaacttaattttttaaacggaaagaacagaagtctacttctaccgtaatttggaagcagtggcggacctaggatttaattttagggtgggcttagttatacatttaacataatccaaaataataatttacaagctaaatttaagtggaatgatgatttagcaacatcctcctattctagtggtcataagttcaaatctattttgaattttatacttccttagtttttttaataaataaaatgtagatacacatagaaaaaaagagtaaatggattcgaaacatgaaagcatcttaacaaatttactctctttaactactatatatatgaaagcataattgtatattaatgtattgggtaaatagcggtataaatacctaaagtcttaagttggtaatcggcataaagccagtatttatttttagcagtatattaacacaaagtctgtactgaaaaaattagagaaaaattacagttttacaaacattgagtacttatgccacgaaaaataaacattaagtttatgcccattaaaaacctaaaactttaagtactacttatgccgctgcatttttcttaacaaataaaatatagatacacatagaattaaaaaaaacgcggcaaagggatttgaaacatgagcatcataacaaatttgttctatttaactactatatatatata

SEQ ID NO: 96100 - DNA, 777 bp, Cannabis sativa
aaggtgagcaaaatcctggcaagtcgaaagctccttccactggaaagttcacccaactccctcattacccaaatagttcaagctcaagtggtaaacattcaaacaacaacgacaagtcagggaatgggaagaagggaaagttcgccgacaaatccgagcaagctctctgggagaatcaagcaaagtacactgcattcaccatcttgactgaagacatagaaagtgtttacatggctactcagtcgctggccccatataaaaagcctgggcccatgaagaaagatgtcagcaagaaagacatgacaaaactttgtcgattccacggagactacggccacgacactaacgaatgcaacaacctgaagcgggaaattgaattcctgataagaaaaacaacccatacctacagaagtatgtcaagaccgattagggtcagaggaacgacaataacaaagatttactacctccaccggtagacggacatctgcaagtcatcgttggaggccagcatattgctaaaaattcgggcaaagctcgggagaggtatgcccgaacagcgcagcatgaacaagatgaagtaaccctggccgttgatgaaaggaagcccaaaattccacgagcaggagggcctaccataaccttcaacgatgaagacactgtcaaaatcagatttctacacaatgacccgctggtcatggaagttcaaatagccaataagatggtggccagaaccatgattgataatggagcctcttccaatatcttgttcaaaactgc

SEQ ID NO: 96101 - DNA, 717 bp, Cannabis sativa
acatcaattacatatattacatttctttttgccaactcagtaaaataatgtattttctaaccattttttttattttaaaaatggcatttaaaaaaaaatagctaatgcatatttttttgaaaatattgtatatgaaaaataggtatgacttaaagatcataaattcaatgtaaatatggaagtgagattagtttcatagaatcttattacatttacttcattgatttataaaaaaagcaataagatatgcttatttttggttatctacaaatactataatgacattaactatcgataaatttatttagatgatgatatatatttattaatttttattgtatgatgtactatatcattaaagatttaattaagtatataatgtcatttaagaagaaaaatagttaaaatgaagtattagtgtcaaatattcttattaggtaaatattcttttacgatatatttttccatctctcagaagtaatggacaacgatgatattataccaaatgaagttgttttgtgcctcctaggatttagggaatcaatatgattctatctccgtttgttccgtttgcagaaaggaagaattctaaagaattgatctttcgtttagttgaatctctctttgattgatcaatatgtgatattctgaatcctcattactattgaaatcaaatgatatctggatctatctgatgatcctttcaattggctataa

SEQ ID NO: 96102 - DNA, 532 bp, Cannabis sativa
ttgagacaaaaatcgcggttcccttttttatttcctcactaaaaatccttggccatgccatctattttggacgtcaaccgttatgaaagtcttattgtttgcaaagtataaactgagagggccacacaaaccgattcaataagcatgactcgaccctctttggaaagagtttttacttttcaaacttgaagctttgaagctaggttctccaagataaagttaaaatcaccatccttttgatgggttctaaacacataggaagcatcaagtatttgatgtttctattcgagctttctatccctagaatatcttaaacacagttttcattactccttcaatcgtgttttttctgaagaagtaaatgatgctttaagcttgactttttgacccgaccaagaacaaattttttccaaacaaccccaaaagttacgggcttccttactattagctcttccgacaaggaccctacaaaaaatagctacctttagtaataactttttagtcacaacattatttttttgtgactaaatgt

SEQ ID NO: 96103 - DNA, 525 bp, Cannabis sativa
cgccactcaagggtggtgctaccattgctaatatgtagtgtcacctggctgatgttaggtttatggacaaaatttggataatcagagtaagaaatgagaagttagtgctactagagccggaaacatgtcaatcacaatgcttgtggcatcgtgacacaattattattctttttaaattttaatagctgaaaagcatcataaaactgatacaaacgagattagtgtcgatttaaaactaatgtaaaagagcttaaaatttttgtcagagtaataattactgatgttattaacttcaataggtcaattacaaacctaagcaaaaattcttgaggaaattacattgtatactcactttattttacttgttttaatttttacctctattttcatatttttttaaatatacccacttttatggatgatgtccccgttaaaacccttaagttatgtaaattatatgctagacttaagtagagtcagggtatattagacaatccactcaaaaaagtatgtatattttaataa

SEQ ID NO: 96104 - DNA, 1718 bp, Cannabis sativa
  modified_base (862)..(880): a, c, t, g, unknown or other
tttcttaatttctgaatgtctaagcctaaaatatagtatttatgaaacaaaagaaaaataaaggaaagtgatataatatagtattcatactgctttttgggtcctaagtcatcctaccatgctctatgaagttgtctgtctctgaagttgtgatatggtttgctaggtgattatccataatcttcagtacctgttttggattacatgcatgcctattactatgtttgaaaagctggttaatgagaaggtagaattaatagtcttttgtttatttggtggttggctttcttgaatcgtttcaacaatgctaaattatcatggcttctggaacatggacttggtctggttgctttcctcatgtcgtcgttgaagctttgagtatattttcaggaatgaagctagcggttcgccttgggtacaattttgtggttatggaatcagattctaatggtgttattaattctattcataatcttacctagattgtattgttggagatatacttgctttctgttataatttttctactctctttcttgtattgttcgagggttgtcaacagtgttgctcactcgtcggcaaagttaactctttctatgttggtggcatagttatcctgctgattgaatctctgttgatttgcaaaaagaattataaattaatgacatttcctcacactcttttccatcttaagagtttttctactggacttactcttaaggtaggttttaatgagattatttttctaaaaaaaaggaaaaaaaaataacaaaataacattctatatgttgttgttattgtcgaaaatgctagcacaactcaatttgtaagaatttcttcacaaaataataataataataannnnnnnnnnnnnnnnnnnaataataataataatattttgtcatttcgtatttttttataattagtgtgacaaataaattaagaaatgttccaaatataatttttattttagagttgtgtttacattttttttttaagcaaaggagactaattttttattttaacaatcaccacactgtaacttaggggttgattggttgagcatttgaaaactgtatttttaaaaattgtgattctgaaatgaaaatttgaaaactgtgactgaaaatatgattggtttagtatttgtaaactgtttttaaattttaaaattgaaaatctgtgattggtacagaatttgaaaatataacaatatcaagatatgtgattggtttaactgaatttgaatacaatttaatttgaaagcaacaaactcatgcaatgctttcaggtaccttttgtcatctagatctggaataccatctgaaatatttttacaatcttctatattaatcgaattagtgatattgttagtgtcttcgttaattctgttttctcttgaatcaatatacttacgcatactctcacttcgtactagcgatgcctcagttttagcagcaatactttttgcaagttgctccatgacatgttccatatcagagttagcccctttgttcttttttttctttggctcagctcgacgacgtataccagtaacttcttcttcctctccaaaattttcaccatcacattcaatatcaatatcaacatcaatatgtgctccagtaccaataaagtgacgctcttgctggcattcctcaactgaagtaggcggaggttgagtggagacgtacctcatcccaccagtggctgttgtg

SEQ ID NO: 96105 - DNA, 967 bp, Cannabis sativa
  modified_base (256)..(269): a, c, t, g, unknown or other
tataaatagatagtgatggactcaaaactgacagcttaagtcacattagccttcagtcaaattttgagcattctatccctctcaaatttgaatccttcctctctccttctctcttcaatttcgaaccctttagtgatagagtacatgcccacgcatagtaagttggtactcaatcatagcgtctaagactgtgaagagtccaatcaactgaaggagaatcggactcaaattttggtgatactctactacagaaagnnnnnnnnnnnnnnagatctgagcggaaggagtcatttaattccgctgcaaccaatggaaggtttcttgaactttgtatgtgtttaaattctattgttttagaaactcatatttatgatgttaaacaatatacatggtagtaaatctagatccaagtaaaatgatcaccaataactggcctcagagccatggtaataatttactttcatgaaatatggatttaaaacgatgtttgtattgatttggatgtgttcatgttggtttatgtgcatatttgatgattttatggaaatcacaatttacgttgatacatgttttttgctttactctaaaattatttttccttgaaagtagatgaaaaattaataaatttaggcttttacaaaacttaatttgaattttttatgaattagctatgattttttgattttggatgaaaatatctgattttgggaagcacacgtgcgcgcggaggaggtttcactcggacagcccgtgcttcaggcaagtgcctgaccgaggatactcagacaaggccctatctgaagggctgctccctcggccaacataagttgcacgcagccttttccctcacccattccccttcatgcgcgagcaggggtatgcattgcatacccttgtgcccaattttgtttttgtcatatcttttgattcaaaaatcattttttcattgaaagaaaattcaaatttt

SEQ ID NO: 96106 - DNA, 632 bp, Cannabis sativa
gattttctcgttacctatttcataatttcacaacttctctattgtgattatttctcttaaaactttgagaagcattttatgttattatcacatagtttggtcgagattttatgttcaaaacgcttgttttgaagcgaagatattctgtttaagtaagacaaggtgaaagccgttaaataaaacacccttaaaaggagagggacgggaagattagtcttttttccagcaaaaaatatatcaaccaagttcatttttcatgataagttatgtaattttgttgaataatgattttcataagtaaggaatttaaagatttatccttttcaaaggtaatgtgtgaatagaaccaaatgggagctcctacagaaaatggaagtggagaaaaatataaagaacatggttgtcctaaggagtgagttggaaagaaatattataagttttacttacgtacacagtagaaattgtggaattggcttgctttatggatcttcaacgctaaggagtttaaggcattcacattctcaattcttctttgtgattggtatttgaggttgtttaaaggtttacaggaaattgttatgattttgtctttccctatcttcaacactgcgtgctgaaaaagctttttagtc

SEQ ID NO: 96107 - DNA, 517 bp, Cannabis sativa
gatctcctccacctgctactgtattgccttctgctgcaacagagaagggagttgctgcatcaactccaacagggccgtccactcgcactcgtgcccagcaagcttctatcgagaaggaactttgcttgaaacgaagtcatgacaaatcagctcctccagccaagaagctgaaattgaatccaccctcagtttcttcaagttctgaagaagaagaacccatggaggatccatctgttaatttcgagaacaaatccgagtctctccattctgaaaaagagattcctaaagacatcggagtttcttctgacagtgaagacactgaacttgaacccgagtccacctttgccaaaatctgctctagcacctccttgagcatcttcaacaaccaaggattgtgctactgccaatggcaagtagcctatgaatagttcttcacctggtaatatctctccatctcaagctgttagttctcgattttactttcgtgataatgagcgtgattggaatatttatgcta

SEQ ID NO: 96108 - DNA, 641 bp, Cannabis sativa
aaataattaaataaaataaatgataaatatcattttttaccatgtattttgtaaaaattatcacttgaaccttttattttattaaatgataaatcagtcttatatttttcgaaatagtaaaattaagactctgagttcaatttttgaaaaatttatttttttaatataacgaactttaagacaatttctaacatgaacagatacagaaaatgtaattagttttgtcataatatctctagatcatattattattaagttttattttgacaaaaaataagtttagggttctatttgtacaattttaaaaaatacagggttcattttgttatttaacaaaacagaaagtccaattaataacttttgtaaaacatccgaaatagtatttaccctaaaataaaaatacaataatgtacaatgcaatgagaacaactcaaataaaccaaagaatcaaacaatacacgtgcttttagaagggatgagaccctaaattcaattgtgacaaaaaaaactaacatcatacttgttggagtaaatctccacttacactgatattggacttaatacaaaggacagaaaaataattacaagtaaaaaccctaatttggcctttgacctccagaatccctaacagaaattagtta

SEQ ID NO: 96109 - DNA, 793 bp, Cannabis sativa
ttcaaatatcaaaattaacataaacaaaagatattaaaaatctttaccacaaattcatcaagctccaagcaagaactagcacaaagccacacccaaaatttcaagctattccttccaaaattattttgaaataccaaaatggagagggtgaaagagagatgtggctagggagaagcgaaacccgaaaaaatgttttctaattttgccaaaatcagattttgttgaatatgcattatttggtcaaatgaccaaattaccccttagacacacttataagcatattcacatcaaaggaccattttttccatttccactcgcacaaataaatcatatatttctatttaacatataaaagccataataaaatcccaaaaatatattgtgggccctaaacccagttcagcccaaaatactcggttgtgactataccgtatcgacttgtcagaaaacacatgtagagaaacaaaataaatatactatataataatattgtctataagcacaatataccataacattataattttactcatcctgggtcaaaattataaaaatgccttgacacaccaacaatggtcttaaaaagaaataactcataataattttacaattaaatcatataataatataatttctcattaacacttaattaacttagttagggttgctaatccggttattaaatcttagggtattacagatctacccgaaattgtaggagcttcaacaatcgtagctacaccctataatataggaatatttgctttctggttactccttttgcggagctaat

SEQ ID NO: 96110 - DNA, 554 bp, Cannabis sativa
cccccaagacccaagttgggggggaggggtgacaaccacccaagttggggggagccccccaagacccaagttgggggtgtgacaaccacccaagttggcccccccaagaccgaagttggagggggggtgacccccccaaaacccaagttgagggggagggcaacccctcgttcgttgtcaataactatggtacaatgtcgatgtttcacatacctcatagttgacggtcatctcaacagtcatgactttacaccttcttcattaatttagtcccggtatttttgtgccacgtggtgctactcttgacacgtcatcgtctaaaaatttttggataaacatttgccccccaagtttctagcggtatgaccatacggtaggaactttcttgtgttgttcgggtcttgcttctgttgttgacggcttggcacagcggcaccaaaaatactatgtctatactaaaattacatttttttgaaaaaattcaaacaaatatttcccactcactacttttttcacattttacaatataacccaataataatttcccaagaaaa

SEQ ID NO: 96111 - DNA, 730 bp, Cannabis sativa
tttaaacaaacttcaaatctcctttttacaatacacaaccaaatatgtctgtaatagtcatatcagacgatacttttgaagaacacgaacaggttacaaagtctcaagtagcctctgaagaggaagccgagtctcctctttaaaaagtgaagctggagaaggacactgaccgtactccaatcccatgtttgaatcctccaccactggaagaggttgatgctgtcaaatgtactaaaaaaatgaagacgaagatcagtactgatccacaactgaaaaagaaaataaacgatgttgttggagttagtctagacgatctcaccaaaatctctaatgcaatatagaaaatgcacgattctacgaaatgttattttgaaaaggttgtggagatggtgaataaagaaaaaacgacaacactgcagagattgtcaaggatgacaaggatgatggcgaaccagtgaaggacgatggcgtgaagcaaaatgcgaatgaggatgtcaaaccggaaggaaaatgaagtatcattatgcatgttttttcaaatttaaataattagtgttaatatattaaatatttattaattagtaagggactcttaagttaattgtattacgtatgtattaaatatgttttaattttttgaactcatgcatgtattaaatatgaaatattttaaaaaaaatgcatgtatttaatgtatgaaatattttgaggatttaattaatgttaattt

SEQ ID NO: 96112 - DNA, 876 bp, Cannabis sativa
agtccttggactttcaataaaaaacaattgattattcataggttgaaggaaggggaaaatcctagaaatgtgaatcttcattttttggatctatgggttcatatttatgatatggaacatggttttcaatctctaaaggtggtgacggatattggtaatttgatggggaagtttgtggaatctgacatcaataatttctccggggtttggagagaatacatgaggatccgagttactatagatgtcgataaaccccttcggcgacggatgaaaatcttcagagaggatcgtagttggttctgggcaaattttaaatatgaaaatctctcaacgttttgtttcatctgtggaattttgggtcattcggaacggttttgccccaagctatttcatactcctgcccatctgattcagaagccatatgggttgttcttgaaagctaattctaagcgggcgtctgagaaaataggggcgaagtggctcaggtctggagcggctggaggagtgctcgagagaggagaaggcagttctgacgtggtgactccggcgatgttcggggctggacagacggagatgatggaggaggcgattgaggggagagggaatcgtgggttggcagctaagattgggggcgtgggagttatggtgcgtgatttaagggaggaaatcgtggagggagattcaaatggcaataaggaggatattcatgtgattaatagcaatgattttattgccttttcggatccaaagagaaaaagggctgatagtaaaggggttcatggagtgagtgggtttgttgggaatatcggcccaagtggtggtgggccattggtagatgttttgaattatgatgatatggagcaagatgggcttcgg

SEQ ID NO: 96113 - DNA, 1772 bp, Cannabis sativa
tagaaaattgttcaaaatttatttccgatacgaaaaatttataaataatcttaaataattacaaaatacatgaacaaaaatagactaaaaaactcttcaaaatgcttaaatagataaaaaatctaccaaaacacgagaggtgtgtactacaaattttcccaaaataagtatgaatattttttttaaaaaaaataaataaaatttgggtgaagatgataaaccctagctctagtgaatattaatgagaagaagacaaatagtctcatgaaaccaacgtgtttagttaagcaacatagtaacgaagatgccacaatgaaaagctcatcagagaaataaagaaccaaccaaatcatgccacgtcatcacaaagtcaaagttagagagagaaagagtcagtttcgtcttcaccattcgaaaaggcacgtgccacgtggcatgaaacaattggttgaaagactgtaaaagaaaaaagaaaatggtagttcccaaaacacaaaacccatttattaaagaagaggaggtgaaagtgaaagagtgttatttttatttatttatttattatattaataattatggatgattatacagtttttgtagtataaatgagaagtttttaatttaattttttttatgatcgtgtacattataattaattcgctcaaacaatttgaagaataggcaaaaattttagaattatctgtatttaaatcacaaatttttatcattttttcagtgttatgaacacttactatatatattatcaaaaaaaaaatattatattatatagagaatattgctaaaaggaacttattcgatgtcataccgttatcagtgtaattaagtatcatgtttcatataacttaagaaaatagctttaagggaacattgctaaccaatcgtagagcaccacttatagaatgtattgggcatcactaatgcctaatagtaatgctttattatatataaagatgatttaaaatagggtgccttttaaattaagtggctttgtgcaatggtccaaactgattaatgcttagatcgaccctagctatagtacttaagacattcaacaaaattttgaggaatttaaaataatttacaatataaaagacagtgttacaataattttgttcacatgcgtataaaattaaagagtcacgtatgcaacaaaatatttgaattttattttcgacatgttaatttttttcaaattcttcaaaattttacaaaatatatcttaaataactacaacaatcatgaaaaaataaactaaaaaattcttctgcataccgaaacagataggagtaacttagagcatctccaatgacagcatccttaaatgatgctaaaaatttactcatcatatctaaaaatataatattttattttatctctcttccacatcattttttggcacttacttttaaaaacactacgatgtataacactctttaaaaatactataattatgatctcacacattataatttaatatatatcctaatttttagctacaataactttttaatttcaattttttattacaaaataatgaataacattgattctacatcatagcatccatgtaaatatttagaatgccatcctcttctctccaatggtataacatctcaatgttttgccacataatatgtccacgtcaccaagcatcatctaaaaatttaacattagagatgctcttagtgtattgtaaaattttgcaataattattataagatcatagctattgggcaccagtggagcctaacacc

SEQ ID NO: 96114 - DNA, 1977 bp, Cannabis sativa
tttaaattcaaatagcaacctacataacaaccacctaaataatctaaacagtgaaaattcccataaaatcatattgtgtatttcatatttatacctcactaatagttaatatgccaattttagtatggcagtatccatagagatgaaatcaacagtaattatattaagtgacttaattaaaatgtgtagtatagtctcctttcacttaaatcttattgagactagcttaaacttaaagtcgacattttttttttattttgtagtattcttcaaaagaaaaaaaattaaaacatcgatatttattaaaaaaaaagtaagtttaatttatcaaaacatcaccaaatatgtagaaaaataggtgggcatgcactatatgcactcactttgcgattaatttgagccattttcttcatacatgaacacgttgctgttgaaaggtcatgatggtaatcatttgcgcttcaacaaaagaaagagtgtagtcgcttccttaaagtgtgttagtagccgatctgagagctcttcagttttcttatgaattctatgaaagagttcctcaataatctcacttccaaagtgtttggcaattataccctccatggctgcccttagatgcatagtaactgtcgatggagtgattttaatttccccattattaacacttgacatgggcttgtataactctattttctcaatgctaaaacatccgtttctttctattatacctatcatttcatttggagaaacaatatatataggtaagttgaatgagtgcactttactttcactaataaatccctgcaaataaaatgcaataaataattatatattgagctttgtatcaagttaagaagttagttagagtagaagttaattaacttgtgtgtgaattgttcaatgagttaattagctttggtgagtgagttagctactataagtagctgataatcacttgtaatagaaagtgagttcttgaataaagactttgtttcttttttcctcttactttattttctctttgctatttctgcactaatacggtatcaaagacaccatattggtgtgagctactttattcttgtttgcttcatctctttttgttattcgcattttcataatcatgacacgtggattttaatcaagaaaagggcttaagaagtcattagctctgaccaacttcctcatttgatgctccgggaagacaaggtccataactttgcgaaaagagtttccgtgatagggagttccctgactgatagcaacacggagggtattcgtgacccaaagtctccctccgttccaagaaccaaagccatcaaatcccgagaagagtatgggttttccctacagggccaaggcatttaaaggatgcaccaaaccggcctatgcctttagcctgtggaagctttgcctatatgtgttcgactatggatttagtgaccaggcttttttaggtacgacgtcagaggctgtctcccacaacacgctatcatacagagcatgtgtgtccttgtgtacctaaccaaatgatccaacaactagggataagggaaattcataaaggaaaagccatgggatgacacgcgtatgaggcccagtcggtacaatttaacgcccttaaatgccatatgggagtaatgccacctaccaatccaacagtcatatttcacccaaggatgatccatctaaggcatcacatgcaaagaagttggcctataaatatcctaaaaaagcacaagagagggcaggaactttttttttttatgagagaagactcattcttcgtcatcctaagaaaacatattttgtttaaccctacagacaacaccaaaatattcttactaagcttcctcttctttaagaggaacacgggagaaggagttctagtccattgtatatctatttgtgtaaacagttatcgaccaatgagtttaataaaatagactcgtggactaaggatagttaatgcctgaacca

SEQ ID NO: 96115 - DNA, 623 bp, Cannabis sativa
acttgaatctctttgtttatacataatcaattcagctcggattttcatcatcattgtattttgaatttttattagtttatacatatctttgtactattttgattttggccttaattttttttttttaaaacttgtaccttatcttagactacccatttaactctagcattgttattgctatatggcactatatgatatccaataccatttgggatagcactaaagtgaattaaattgtgttaatatttagatatttgatattaggtacccatagtgttcaatatcattatgaagtgatgccttactaatatagttaagagtttaatttttctaaaatatttcaaattatagtgactagttagcacattgaatttatacaaaattaaacacgtaatgtctatacattttttaattaatatagtcacaaaaatatacaaagtaaaatgggttgatcattttttcaacaaaatggtaattaaatatgcaaagttaaaaatccaatgaactaagtacaaagagaatatttcatttcattccatgtaccattagtgaaataatccccatataacatattacataatatatttttatatatatatagaagatgggagggaccaaaactc

SEQ ID NO: 96116 - DNA, 517 bp, Cannabis sativa
  modified_base (469)..(469): a, c, t, g, unknown or other
cccaacttatttttctacaagaaacaatttaatccattttttagaccttttgtcggtgcattatatgccgaaaaaaagttgttgaaccattggaatggttcacgccatttggcggttaattctaagatttttgtctgtacatttcatgaactttattgatataggtgagtgcgtcggtataaatttttctccaaattttagattttgccatagccactttatctcgttaagttttgccaacgtatttgactaaatgcactgacaaaagtggtattttttggagtggtagcatctgttgttctttctctacttggtgggtagttcttatttctcttcatatatatcttgttttcaagtttttgatttattgcataaattacataaattgtgtactattataattctcatgaaataatttcatggaaaaagtagttgagtattaaactacaatttttttttacttttagtnacaataaaatttgtgactaaagatgaaaaagttgtggctaattataaa

SEQ ID NO: 96117 - DNA, 516 bp, Cannabis sativa
ggacttcttaaatttgctcattttcgctttgcctggccacttgacagcacttaccaaggaggtagagttcatgttccaataaaccaatttcgtctggtttaagcaatcctgtgaaaaggagcaagcaaaaaatagatgatccaccgattgctcttcattgctgcaaaacaaacatgtatctaattaagtattgaactttatagcctatttttagtcttgagtctcttaagcatagccaaccacaaaatgaagctgtgcttgggagagttaagtcgactccacacaatgacaagccaatgctctttagttattgcagggacaagttttttatatccttgtgcaatctgatgcttgctccttgtattttccctatatcatcactatcaaacagctcattcattctctcctttaaagtaactaattttctccaataccaactatcacttgctttaacactgtaattccaccaattatcttctttaatatacacaaaatgcacccatttaacccataaat

SEQ ID NO: 96118 - DNA, 816 bp, Cannabis sativa
gctctagaatttgaaggtaccactgaaaactcttaatttggtatggtgggctgcttcaaattatttgcccatcttgacattaagtggtaagagagtcccagttcaaactatgtatccggtttgtcaaaaaggtgaggaaagtatttccatgcacttatttcctttcaattgctgctcaatgttggtagagacttttggctgcagttaggccggttgttgctgttgatttttgcagctggtttgattaaattttgtaaaggtgtcgtaaggacaagtgtggggaggttgttatattgtgttgggggttatggaaggctcgaaacgaattggtttgaaaccaaaagtatgctacggtggatgatgttcttatctcatttataagttgtcttgtgcaatagaagtcagcccaaaatagaggttcaaaggcttcttttccagtttttgaagctggtgaaggagctgaatgttgggttaagccgtaggagaatacaaacaaggtaattgttgatgcgcccgccattttctgtgatcgagcagtgtttggctatggcatagtcgctcgagactctcaaggggaggtagtgatgattaagtcgggtagttttgctggtatatgcgctccgaatttggctgaagcaattggtataaaggaagcgctaagctggattaaaactcaaccaaggtagaaagtggagctggagtcggattgcttgatagcagtccaagttattcgaaattcattacctatgctttcttcttttgggattgttatagaagattgtcgtagacttcttgcatctttaaataatatttttt

SEQ ID NO: 96119 - DNA, 508 bp, Cannabis sativa
gtattttcatgccatagctacagcaaggagaagaagcaatttaattcagagattacggagtgatgaagggaactgggttgactggcaaggaggctttcccacggtgattactgagtattactctcagctgtttacggcttcagcagttgatgtttctgaggttgttaattgcacctcagctgtgttatcgaatgaagacaacaggcggctgttagagcctattttggaggatgagattcggcgtgcactttttcaaatgcatcccgataaatcctcgggcccggatggaatgtctcctggattttatcaaaaaagttggaagaccgttggtggagatattgtgaaatttgtgcaaactttctgtgttacgggttcttttccaagagagttaaattgtacaaattttgtcttattccagagaagaaacatcctgaagtcatgacggatcttcgcccaatttccttgtgtaatgttttgtataagattatttcgaaggttatggcgaatc

SEQ ID NO: 96120 - DNA, 822 bp, Cannabis sativa
tccactataaaaatggaattaaacgcttagtaattatagaattatatttactgagttttactgcagtgtctattgatataatcaattccagtgattagctctctttgtgtcacttcgtacttagttttaataaaattattgtcttactcttcttattacttctttatcatttagtaccattaattcattagtggaagtacaatttggattccatctgaatttacgcacaactctccagttctagaattaatacataaaggaaccaaccttcgatctgttaagaaagtcatgattccataattatagatcacgttctcagccatccacattattagattcctaaaacagaagatttaagaatcattttctctgagaaactttaacaagtgaatcaaagaaactaataacatgaacatgagttcgtgattactcaggatttaggctaatctactattgatcatcatgataatatgaattaagtcttcatagtaaacgatatgtaacgccctatcccataggaatgccacgtgtgtgattttataaactagtttattagtaataagttaattaattattaaaatctgtaatgatgttaaaaacttcactaaaataaaatactaataatggactttataacgacactaaaagtgtgttctgggtatctatgttgtaaaacttttacaaaaaggctaaatacaatgacaagtcacaatacgaaatcaaaatacacagcagatacaacccaaaataactcctggcaactcggcacgcaggtcagtagggtcaatatgtacattgttgaagaaaactgtcacctcatgg

SEQ ID NO: 96121 - DNA, 608 bp, Cannabis sativa
aggcttgaagaacaccaaaataactaaaaatatagatctccaaacatttctcctaaaaaacaaacaacaaaataatatgcataaattcgaacaataaagtaataaaaatattaaaacacacactaaaatagactataaaaactgcataaaataaacctaacatatttcccaaacttaacctttactcgccctctattaaagacctagttatactaacgaaaaaaaaaataaaaacaaacacacagatatgccaacattgtttccaattactatgaaatatcaattgcactttttaatcaaattttcagttcaactgtctcaaagtttaaccttaaagttccattagggaaataactaattggacacatgtgcaaatgaccacagtaacttaaactccaccatatatgcgcaactcataccaaacaattccaaaattgaattttcaatatggttgcatcatttaacttttgttactaatgtcaacaataaatgctttaaaattaaaagaactttttacaagtaataatgtcaggcttatgtaaaggtagataaaaatatcatttaagctcaactataccataaacttatttccttttaggtgcctcact

SEQ ID NO: 96122 - DNA, 995 bp, Cannabis sativa
actagtttcttatttcactcattgtaattataaaaagtagatagcttcctaaatttatttcttattggttttgggaggccaattgtttgtaatgcttccctataaatagtggaatttctcactatttagggacacaaaattcatttagagaaaacacaagagagaaatctagatttaagagtaaaatactcagagattattgtaagagcttttcgagagagatcatcacaaggccttcttgcttctctactcacaagttaatacaaactaaaggggagtaggctattaccatcatcaaggggttaaacttctataattctggtgttttgtttacttaatcttaattcaatcttattgtttaattattcctaattgatttaatttgactcatttctgttggctaaaagtgaggtcaatattttggtgctttcattaatagcgaagaagcacaagtctttgtttaaagtcttttcaggacacaagatggttgtacaaacacggaggtaaaatttgacaaatcaactactgatccaatggctacggatcctaacgtgcatacacttgtgaatcctagagatccattcaggacagatcccgatctaactaatcctcaccaataggcccagaaacagtagggcaaggagtgaccaccccctctggctgggttcactcaaggcgtgcaagaaactggaaccactagtacttagattgaacaaactggccctagaactggaattccatctactacaaattctcaaaggtcgatcggtgatgacactgaaagataaaatttacgagttgctctagggaaaatacaagagcataacaacactcttcattacaatcagcaagatacccaagtagtcgtaaattttgctttgtagaacaaaggtgccacttctaaaaatggataaatgaacaaatggaaatcataagggctcaacaagaaataattgacaattgttccaggcaggctaccgtgctgatcaggcgag

SEQ ID NO: 96123 - DNA, 614 bp, Cannabis sativa
gttggctagagcctggctggcatgtaacaccccatttccaaggtttctttgttgttcaccaatgcctcctggtgctaagaactggctgtttgtgccatactatctatatggtaagatttgagtgtcgttaggcaagaaagggcttattcttgtgttcgaggaactttgttggattgtctgtccatgctctacattcttgtagaccctacatgatctgtctacgagccttccttataatggaactcttatcatatcctaacctcttctacaagttctctctttgaactaccttattaggtccttggcctcccgattacgacagtttacttctgcttggcaagcgcagaggatgtacttctagtcatcaatccactttaggaattcacatatcttctaggcaaaagtatcacaaccaacaacatgtgattcttcttgtcctcttaggaatgcacatctctactgggcgaaagcataacaaccagcagtgcatgattcttctcttatctgagtgacctggcctacagattccctaagggaaatttgattttctatacttagaaaatcaaaaatttttttccctaaaccaaaaatttaaaacctaaaaaaactattcc

SEQ ID NO: 96124 - DNA, 587 bp, Cannabis sativa
ttgtaattagtggtctatctacaaatattttaaatttagaaatagtcatagtattaggcatttattaatttttaattaaaattataattattatttttcgaaattaatttgaattatttttatgtaggtatttaattgtaaaaaaaatatttagttaggaactttgctttaattttcttatactagtagtgaactataacaaaattgatcatttaagtaccttcgttaccaatttatttacataaatagttaatagtaacaaataaaactagacaacgagttttgtcataattatctttcaaattaattcgctataatatttatataaattatgtattaatatttttatttaaaaatattttattgagtgaagtttgctccccgatcacatcttcttattaaaaaacatattatttttttaaataacaaaccacaacaacaatcaaacccatataacaagcagccccgactcaataaaacaactgaaattttttttttatttaaactagaaaaagatcacttctgtcaaaaaaaaaactaaaaaaatactaccataacatgtaccatttactcattttattctcatt

SEQ ID NO: 96125 - DNA, 612 bp, Cannabis sativa
catgtcaaaagacaagacggacaagagaaactaaaaaaccatgtcaaaagacaagactaacggaaaaacttaattagtttcaatacagaaactaaaaaattccaaccccataaaacattaattggaaataacataaaaacagcaaataaataaaaataagcaaataaaaacaaaactaaaaagagtagatttcctttaaacactctaaaaactacaaactattaatcaaacagtttataaaaagaaaatcaaaactttagttggagaagccggtcataagaaaatcgcaggaagaaatcgcctgcgactatgaagaagacgtcaccaacggagatcacggcaccaacggagactggggacaacatgcaccaacggagatcgctgagtggtcaacggagaggtcatggcatagttgcgattcctaacgaagcttcatgcgctgtcgcctgcgaagcccgagaatcaccgtcgtcctcagaggggaagaccgaaaaccaccgtcgtctgcaaagggaagagttgtgcaccaccgtcgcctgggaatggaaccctagaacgtgccgccgccgtccacaaggctgagctgaagcgatggaaccctagagattaggg

SEQ ID NO: 96126 - DNA, 986 bp, Cannabis sativa
aactctggggagcatgatttagtatataaacaattactgaaatagcaaaattgaatgaaattagacaaaagtccttgataaccgaactgaccatgttattagagatgatgtgatttgtctctaatgtatttttttttttaataaaaagtatttattatttaaatttaatattaaaaaggttaaacatccatttttttatatcaaacaatttcattaaaattaaatatttttatattaaatgtgatgttatctcaatttttgcccacatgagatggcactccacgtggccaaaagtagaagacaggtgggggacaggtcagcaccaatcagtcaggttattgttgtgcagtaagggtgtacgtcagtcaatttagtcggtttatgctatattttactcaacccagtgtaaaaattgggttacaaaaatctaagtgtgacttgtccaattaagaaaaaagaaaatagtaacctgctcaatgaaattggtcagtttggtcgggttaacccatccaaaccaaccactaatatttttttaaattcttatatttttacatttaatggtcatattttagttaattttaataatgagataaatatatatcaaccaccgttaaaaaaaatatattaatttgaatttatatttttaaaaagtcatacatataaaccctcttaatcgggttggtcgaggtacttcgggttgattgggcgggttggtattatttttaatctacccaatataaagattgtgtgggttatattttcatcaggtttttcgatttgtatttttcttcgggttatctcagtttagcttggacgagttattctggttgggtggcttacaaaaatttatgtacaaccctatgtgcagctcctcatacctcaagatctcaaggttgcaagatggactcaaacaagaagagcatggagacctacaagattcacatctttaaggttctgaagcaagttcatcctgatatcagaatctc

SEQ ID NO: 96127 - DNA, 773 bp, Cannabis sativa
  modified_base (725)..(733): a, c, t, g, unknown or other
ctatgatgtcatcaacgtagataaggaccatgatgatagaactctaagttttatagaaaaatagtgagcagtcaactttggagaagtgtggcttttaactttccaaaccatgctctaggggactgtcgaaggccatgagagacttggtcaacttatattttttttcctttgaataagctccatacaacgcctcaagagcactccaaagggtagcaaaagtttcagatcccatcacctcagtcacaatctcctccgtaatagatccatacagccagcccattagaagttgttcgtgtacgatccattgttcgaagaccaaagtgaattgaaccccaaaaccaatcttctcatcaccatctccattgacaacacttggaacaaaatttggtggcttcagacgagtaccaatcacatagtaatctagacgatggcccctaactatggtggataccatatgttgacattgaaatagtggcaaatgaaaaaataatgaaaaataaagagaacaccacattctatagtatttcactctccatatcacgatgttaatggaattatgtctactttgagcttttattatcgtaaaaatacattttcttataagagaacgagagaaaaaattactgagtctagcttcacctcacaatttttagagagagaaatagtgaggaaagagaagttatgaccttgtaaagagaatggtgttggagattattttaccaggnnnnnnnnnctactcacaagtatgtttattaatgttgggttttatgccc

SEQ ID NO: 96128 - DNA, 557 bp, Cannabis sativa
  modified_base (509)..(528): a, c, t, g, unknown or other
aagagcaacccagtctcaacttcgactcagcctactcacacgctctaggaaaataactagttgaacgacatcttggtccaatattcagaccatctcgacccttccttatgcctacaacatcactaggagtagaatattcacgcaacaccttgacgtctcttggcaaggtcagccttcaaaccacccgagtaataatggcatcattttttgcgtgactgtgtgccgtgtgcacactctttttccttgaaaaactccgactgagtcatctatgcattgaggctctctagctaagacactcgcactatccatatgttctcattatgttaaaggaaatcctaacaccgtcgctcacctagtcactcatgaccaaggtagcatgtgtggccagatgcaaataccaagctgacgtgccaatgcctctagtcatgacccattcgatactgttcaaaaaattgttgggttttatgccctaaataaaattcatttaaatataatcagatttacttatnnnnnnnnnnnnnnnnnnnnatttaatgttgcatggttcgcatgattta

SEQ ID NO: 96129 - DNA, 1036 bp, Cannabis sativa
  modified_base (352)..(356): a, c, t, g, unknown or other
  modified_base (886)..(887): a, c, t, g, unknown or other
aaaatagaaaactgattaaaaaaagtgttaccaaacgtcaccttagaaaacataattttcattatttgaaactgctaaacgaaaggtgctatatattattattgtattggtttcacataattaaattaatggtaatagactctgtgttttgcaaaagttaccaatttgaccttctgctttgttaaatgataaaatagatcctgtattttctaaaattatataaataggactctgaactgattttttgtcaaaataaagcttaataataatctgatctagagatgttatgataaaactggttacattttctatatttgttcgtactataaattgtcttaaagttagttatatnnnnnaataaaattgttaaaaattgagttcagggtcctgtttttaccattttggaaaatatatggtctattttgtcatttaacaaaaaagatggtccaattaataatgttcgtaaaatataaaatctaaaatagtatttacctttaaattaaatagttattataaaatatcactaactatatacaaaatgtcacttctatctatgttaaaaaaaaagtgtcacttctatctaatgctaattattatgaaagaccaatggccagtttggcacagctgtgctgtgagaaaaaaatattgagtgtttggtaaatataattttaaaatagttgtgaattggaaaaattgtatataagtatttagtaagctagatgattgaatagctgttaaatatacaattaccaaaataagtatgacatttattatctaatttatttaaataaattcatacatattaatatatttataattattttttatttaattacaaattacaataattttttttcttataatatttattttttaaaaaatatanntaataaaataattagttagactttactaataataataaaaaaaaattacataaatattatctattagataaagatatattggggagaagagaatcttaaaataaaatggtaaaaagagaattttataattagaatgagggtaattttgt

SEQ ID NO: 96130 - DNA, 848 bp, Cannabis sativa
ggcataaaacccaacagttttatctccctgctcacaaaaccaggagcccgacaatacatgttataccagcagtcattcctattctgccataagaaatacactgcatcagccatgacagcgttcatcaacctgtccagtaagtcattcatcgtcttcgaacaccagtccttccaatgattgaagttgctcggccaaatattcaaaccaaaccagctacctatctcagtcatcaccaatttggcaaagtgacactcaaagaaaacatggttgtgtgtctccgaattcatctcacaaacagggcagttcttattagtgatctccatcactctactaaggtgatccctagtcaaaagttggtcatttatagcttgccaacaaatgaacatatgcttgggcacatacatcttatgccaaatagtagacgcatattcagaaattacagtagagataagagaactataaaagatttttgctttaaatttcccattcttacccgccctcaagagagcttctcagttaatgatctccctgagtctcaagattttcttgaaataccagctgctatcctgtttaaaagttagcaaccagaagtcttgaccctttagatagatggaactaatccacttaatccaaagattatcttgtttctctgagatagcccaaatgtttttggctatcaaagcaacattctacttctttccctctcggaagccaattcctctaaactttttcgagagacagattttctcctaagaatgtaaatggaatttacttcgatttccattgaccccccagagaaaatccctataacttttgtcaatggcagccgtcactttcttgggaagaat

SEQ ID NO: 96131 - DNA, 588 bp, Cannabis sativa
tcatcaaatttttaactaaaaggatattttgttaatttttttaaaaaaatgacatttattaacttaattgttagatttaggaccattttacatcttggctcataaaatttcccctaacaagttatttcccattcatactaccacatcttacaagttatttcctattcatactaccacatcaaagcatcattaacactgtagtttggagaatgaggagtatttaattgaaataatagttttaattgaggagtattccaatctgtagtaatcggacggatgaggagtatttaattgaaataatagttttaataataataaaatttcttataaaaggtaaattaataagtgtaaccattttatttcaaaaaaaaaaaaaaagtgtaaccatttgagcaagttttatttgtgagagtgttttgtcttatcgatgcatgaagtgactaaggaaccccatacctttccactctcatttttctttgaactccttctctcatacaatgaaaccacactaagtgcatgtttggcatcataactaaaaaattgttttttgtttttaaaaacaaaaaattgttttttgaaaacaatttg

SEQ ID NO: 96132 - DNA, 567 bp, Cannabis sativa
tattattattattattattgcaatctttataatagttatattcatctcctaaaaaatttcatattaaaacttttatcattaagtggtaataaaagtattatatatatatatggttaatggttgaaaatagattattttcaaaattattttgcagtatcatgtgttttgaagtgttatgtgcaaacattataagaaggatgcaattctaaaagataactataaatataaacaaaaaaaaaaaaattgcaaaaattaattaatcacatctcataactaattaaagatgtaatacctcaatgaagaagggagattgggaaataaattagggttcctcaatgcatgtggtaaggtaaagagaaataagtcatctttccaattaactttttgttcgtcgttaaaaacaaaagtgtgaccaaaaccttctatttctcccggcctttgccatagcttttccctctcctctattggcaattcgaacaattttttcacttcttctttcattttttctaccacagaattacttacaccgtgatttatcagctgcaaaaattattattattattatta

SEQ ID NO: 96133 - DNA, 622 bp, Cannabis sativa
  modified_base (110)..(121): a, c, t, g, unknown or other
gagtctatcgactcacagtgctatctttatgtgtaggtaagggtaaggctaaagttgaggagacgtgaatacgagcgggtgaagaatgtacatgtcggggcggttaggcnnnnnnnnnnnnatctttgggacatcgaggcttttgttgtatagtcactaggcgacgaacttttgattatatgtatagcaaacttttttaaagtactttgtaaacgggatcctgaaatattatatatgtaatactttatgtttttaattaaataagcaaattttaattaatcacgattttcaataacctcgttgattagcaacgagctgcacaataggtttaaaatcacattaacacgcccatgctagttagggtgttacacctaaacattttttttaaatcactcaaaatctttttcatcttgaagataaaatatcaaagcatcctcgtcttaagtcctggctgttagattttttatttggagttctttgttaatgggcttagcatctttgtgtgtaaagtctaggttaagcaaaagtgtgggcttttttagttgactgaagcctttgatgagcaggcccagtccaactagggttatgtagctaagtcttctccctaactctataaatacat

SEQ ID NO: 96134 - DNA, 615 bp, Cannabis sativa
tatctcaaccatagaaaaaaaaaacagtacgcataaaaagtacacaaaacacctacgaaacttagttattaaaacaattacactcacgtgcatagtcttagtgtggagtttaaaaattaattgtggtagcaagcagtagagtttatgagcatccacttttttgttagttgaagcatcatcatgtcaccttcaaggatatcaatctatcagaaattcatattatttccataaaacaaaaatagaaagaatttgctttaaggaagaatatatagttccatgaatgctttgtgtatatagatgaacttgagtcaatgtaataaagcaatgcatggccaaggcatatcacctagtgactgctagaggctcatgagctgcaatttttctaatcttatcaaggaaacaacattaagaaatgcattgaacataataaaagaacttaaatcaacaacattttaaatcagttaacttctactaaagaattcctatctcaactcacacaagaaaaagaccaaataatatactaatagattctttaattcatgcttagtaaaatatctcaatttatttaatttttatcttatatctgtagtgtcatcaaactatcctaaaagcttt

SEQ ID NO: 96135 - DNA, 603 bp, Cannabis sativa
tctcttagctccttcacctccacagttaggttggccgtcgactgcaagtctagctgatgcaactccttcaaggattttaacttggcagccatctcgtccattgcctccctggcttcccgaagctcgggcttggccctagctgcagtctcgccctctgcctttagctcctcccggtgcctcgcctccgcctcagcctccctttgctaggcctcctcccggtacttggcctccgcaagggcttccctttgtcgagcctcctcctggaacgccctcctttcggcagacaagtcccgcaggatcctaacggcctcatctatgcccccaaattcggacatgatgaacccatgatcgatcacggtcttggaaaggcggccggtctcggcagtaatctgaaaaaagaaataagaatgaaatcagatgccttagacaaaatataagagaagggaataaattacaagtactcgccgctaccatagcagagctgatgtcttgcacctggtatacggagttcatggaggcacaagtcgcgtatctcttggctaggaattgagtcaggtgggagacaaactggctggtcatctccgaggcgaagggagctagggt

SEQ ID NO: 96136 - DNA, 1438 bp, Cannabis sativa
cgacgaggttggtttctggcctttttagttatttgattattcaattataatttatataactgtttaagctctttgaatagcacagtaattgcctgcgattgataacaaagtgatcaatatattaacactcacacttatgtaacttgtatgaaaatttaataatgtccttattccaacttgggtttgctcggtaattttcagccagtgggtgacctgagaacattagatgctaatgagaaaggtgaggcctttttctcaggtgtcaaaccaaagttgagagttgctgaactgattggacggtcaatagcaatctacaaaacagaaaacagatcagattctggcatcgcagctgcagtaattgccagaagtgctggtgttggtgaaaactacaaaaagctttgcacctgtgatggcaccaccatatgggaagccaccaacagcgactttgtcaccagcaaggtctaaagatttaaggcaaacagttctaatgcacgagttgaattttgataccagcagtggaaaaatagttcatgtagcctgtagtcatcgagttttattcattgaaaaatagcaatgtatttttttctatactttactttattcaaggtgataatagatgagccgagagctcctgctttgtaagatttgaatcagcatatgttatgcgcgaacaataactaatctgaccctgtcattttctagaccaaaagtgtctaaagttctgcttaaatcatatcagttttcatacagaaaaacagattattctttataaatttcactggaagggaaaaacaagttctactttggaggagacaagaaaccttctctttttgccatttcatacagagcaatggctgttaaaacctttgcatcagctgttatgcgccatagtttagcataaggaacaacacgaaccttgatcagctccccgtgatcacgaagacctgtttctttgccttccagctgtgcaataactcctttatcaactttccctctatatagaaatatgcttaattcttcatcgcaccctccctgatcatgggaaaagcttaataagaagagagtttattcacaaaccatgtcaactgattataagttgcattgacattcttggtcattcttaagaaatttatatttttgtaactttcttgtcgaattcattttctttcatagccaagggatataagcaatcttaatagcctaacaggcatttgtgcagctgagctcacatcctatcctcatgaaagaaaaaaaaaatgcaaatgccaacttaccggagaaggaataacactgcacccagtagatggatcaaggaaggctgtgaggtctatcatgtcttctacatttaattttataccagtttcttcttcaacctgccacagtcaagactataaaaatacgtttaaaaaatgacactaacaaataccactaatcaaat

SEQ ID NO: 96137 - DNA, 648 bp, Cannabis sativa
aatatcttttggcactgttttaccaaatagttgcttatcaaattgatttatttatatagaattatttccctttattttatttgtataattaattatttgattaattctttgttaattgtatatcatcacttcattatttatttattcaattcttttacattagtcttacaatgattgttgtaatttaactttctcaagccatttgatcgatcatgaatatattacagtatccacttgttgaatatttgagtattccattaattgtatttatttgaaaaacttaattagtgaaaatacttcttactttaattatttttttaaaatatatatatttattgtcacaaataaatttaaatctataaccttataatttacagcaacagaatatatcattggaaatatattatcattaatacaacatattataggggcacaaataacatgaaatcagatatataaatatatatgtttaaaggttaataacttgagaaaataaaataaatattttataatttttactgagaaactaaaagtaaaagaataacataaagataacataattgtaaaatatcatgagattcaccttatatgtattgttcctttatatttggatttgattctgaaaaactgtctacagagttagttagg

SEQ ID NO: 96138 - DNA, 1605 bp, Cannabis sativa
  modified_base (576)..(583): a, c, t, g, unknown or other
  modified_base (667)..(677): a, c, t, g, unknown or other
atccaaccaacaaccattaaaaccagcttaaatccacttatctaaacataattaagcttaagaaaataaaactaaacactaacagcagccacaacaacaaaaccacaagcatgcacaatttttctttccttaaacttcaagaaaaacaaagaggaggttgcaagagctataccttggcttggatttacttgaaacttagttggaaatcccctagagcggctgaagaacacccaaccttagctggttctatgggtttcgaaaatgagagagaatagagagaaaatgagattttcctttactttgattttttttttcatgaaaatgagataatacccttttgatttattcaactaatatcagccttaaacattactaaaaatcagatttaccactaaaccccaatctcacaaagacaaactaaggcttggcaaaaatgacaattttgcccttccatactattagccacttaagatcactaaggggtaatttcagaaattctaaattcccgactattctcgacatacccaatgtctaactaagtcgccccactatactaaaatactaagatctgattcnnnnnnnncatacaccgcgttccaatattgcttgacactaaacatgcaaaattataaaatttctatatatgacatataaaatgcattctgannnnnnnnnnntcatcataaattaataattcaaaattaataaataatttctataattaaatcctaattatttgctaatttccaaattaaagctaaggacaatatgaacatactatataattatatagtccataagcacgtaaataaattaaattcatagttttacccttctcgggtcaaaattactaaaatacccctagctcaccaacagggtcttaacatgacatatctcatattaattcacgtataatagattatataataatataatcccacaataatacacatttatctagttagggttttctaatccatttctttaaatcttagggtattacatacgtgttacgctcacaagtctacttacaataaggcattagaatggtttatctcggttctgattaccgagtctaacctaattatgcattgagcacataattctttatatcaatatatacaacacataatttcattcatattcacttaaattctagagtaatagccctatatcccataatagctgaattttagggtaataaccctaatctcagtttctcacatagcatatacaaaataacatacatgagcgccactatgctaatctctatgtgatagttttttgtcttacctaataatccaagtatgtggagattccaagtccccggttgttcctaagaaagcatcggtaatcctactcacacattctcgagaattcacaaataaggttaatcccaaatttatttttccacatatgaataatttgaaatccaatgataaattaacacatagagctcaaaacgagctttccaatggtatgaagaacgtccaaaacggagtttggaatcaaaagttatggcaaaaatgagaaaaacaaaaacctgggaaaatagggccctcgacgcggtgaccgaggcccttgccgtggcggctccaacctgct

SEQ ID NO: 96139 - DNA, 593 bp, Cannabis sativa
tcgtacacacatggtctgttggtaaccgacgattcatcggagaacctacttttgttcccaaaggaactgaagaagacgacggctaccttctcgttgttgaggcaagtgttactgactgccaacactaatctattgtgacatctttaactaatatgttgattttcttgttaccttgttcatctttcttcttcttctttttcagtatgcagtttcaatacagaagtgcttcctagttatactgaatgccaaaagaattggccaaaccgacgctcttgtggccagacttgaagtccctaaacacttgaacttccctcttggttttcatgggctttgggcaaattccaactaattctcattttaaattttctttgttgaagttgtgaagcaattgtacagagatcataatttgacatgaaattgaaatcacaattttgtaatattggtcatatctttcaattttttgtgttcactttttgtatatatacatgagcataacgaaattattccacgtccagcaatactggacaaaattaaaatgttaaccaagatcatttgttttggctaagcaacctcacaaatctaaaaatcacgac

SEQ ID NO: 96140 - DNA, 529 bp, Cannabis sativa
tccagtcttcggcctgtggcatcacagattgacaggatattattacaattccttctttccctgatgcttgagtgaaaaagaggtgagtttttcgtccccttcctttagccaacttattcgagatttctgctgcagaaaagagtagtaatcttttcggattttcacataaagctcccttatttctttttcttgtttctgtacattaacatcaagcaaattttgatgaagaagcccttggatgtcctctagatcctgcttagccttcctctcagctgcttggatatccgagtaatgctctctattgagatccctgaagaagttcttcaagattttcaactttgagactacttggaacatttttgaaccacttatcttcccttcccatattttcttgacttccgtatgatagctgggatgagaggaccacatacgaaagtatttaaatggcttctttccaaccggggcagccgggtatatattcaacacaactggagtatggtcaaaagttccctcattaagaaagagagct

SEQ ID NO: 96141 - DNA, 570 bp, Cannabis sativa
ttttcactctttttcaaattttccatatttctttggatcatttcgcaaatttacgccatttcgaacaaaactttttggttttgttttctaattagacatgtatgcacagacatgcatgttttatttatatgcaataatgatatatttttgggatataagtttcgaaatggtctgttctgcaatggttttactcttaggaaggccctttttgtttttagttttagttggtatggattgtcttgatatttttgttttgtctctcagactttgataattgagttttgtggttcacgtaaccagtagttggaaataagatagttttgagttctgtgttctttaattaatgttttgatgtggactttgtgggtatagtcttggaaaagttgggcaaggttttcattattaccaaatctctctatattataactgagaaagattgtatctgattattttgttattttatttgatttgcatctaattatttcccgctgtgataattaattatacatatgttatataaatatattataatgttacattaaatcgcataataataatccatatacattt

SEQ ID NO: 96142 - DNA, 607 bp, Cannabis sativa
accactaaaacctgcttaaatccatttatttaaacataattaagctttagaaaacaaaactaaacactaacagcagccacagcaagcaaaaccacaaagcatgcaaaaattatttccttacacttcaagaaaacaaagaggaggttgcaagagctataccttggcttggattcactaaccactagctgagaatgacttgaattactgggaaaaattccaacccttgcagccctagaaattttcgagagagagagagagagctttgaaagtgaaatgtgttttccttctttttttttttttttgtaaaatgaatactataaatttgttttatttaaattaaaatcatctactaatagtagtaaaattatgatttaaaataaattagaaccctcactaaaggacaaattacaatgtcggaaaatagactaaaatgtccttcccacacaaaagccatcaaaagatcactaaggggtattttgggaaattcttaaatcccgacattcccaaagtctaactgcaccaccccgctaaactaaaatgtgattcaactaagccatacaccgcgttccaatgttgccggacactgaacatgcaaaattatgaaatt

SEQ ID NO: 96143 - DNA, 659 bp, Cannabis sativa
gtaaaaagttaaattacaattttataacacagaaaataaattaaaatttaaatattaataaaataaaattatacatgtaatttaatatttaataaagtggtattataaatttaataataagtgactttaatttaaataacaaatgaaataaaactataatttaatattaatgtgtaatttaaaattaaataaagtgatatgataaattttaaaaaataagtaattctcaatttaaattataaatgatataaaaattaaattgtaaattaatttcaatatgtaatttaaaatttaataaagcgattataatttttaaaatatataatttttttaatttaaataatgaatgaaatgaaataataaatgaactgtaatatgtaatatgtcatttaaactagcataagatattaaaaatgagcataaaatattataaaatagcataagatattgtaaaatagcataaactgagatttttatattacattgatctctttggttataaactaataataagatagaataattgtatttgtattatcacaaagtgataatttttttatttattttttatacatgcacgaaataccttagggccgtttagagaggctgagtcaggaaggactcttaaatatgcttctccaaattatccaggatttttt

SEQ ID NO: 96144 - DNA, 748 bp, Cannabis sativa
tcttttttctcttgagatggcggtgcatagagaaatttcttttgttattgtggagagtgattctaaaattactatcaaagtccttaaaggccaaattggtagatggaaaattgataattattgtattcattgtaaaagaatttctcagtgatttttcagttgtaatttctttagtgttcgtaaattatttttttttaattttgtagctcataatatagctaagtggacattcactctcaatttaaatggggtgctatatttatctagcattctggtaaatagtatctgtaatgatcaagatgttttaatttttttttatttaataaatgctatttaaaagaaataatttttttttataatatttgaataattaaattaaaaatacactatagcaaatattctacaatgtcttttcttattaattttaaagatttttaaaatttattatttatgtttatatttatagaatattattaattactttaaatatattaattaattacttttggttttatacctggatatattaatattatatatataaaatgtatagaaatttaaaaaattgaagagagttaatacatttgaaaagaataaatatacatggagcaatgttacatttgagataaaacaaaaaaaaaagaataattagcatttttactccttaaacttttgagactgtctcattttgccctctaaaatatacggcttgttaagaattcccctgaaattttatatttatagaaat

SEQ ID NO: 96145 - DNA, 1499 bp, Cannabis sativa
agattttttaataaaattattttttatttttttttcaaaaacaattatttattgtattataattagtttatttttaattttttaatttttttaatatgtaataaataagtaaatatggttttagtataaaaaaattattatagtcgtttaaacaaaatatctttttctaaaagttgggttggagtagcttcagcttctccgaaaattcctcaaaaatctattttttaactgtttaccaaacacatttttatcacagctttttcaaaaagcagcttttagcttttccaaaagttgtgccaaacgggcccttaatgtgatttattattttaggtgattttagttagatatggataaagaatggatgaaaggaaatagattgtctaagaaatatgaagagggtgttgagtatttcatggaatttgccataaaaaatgacgacgaccctaatatgataccttgcccatgtctgatgtgtcaaaattttaaaaagttgagtggtgtagacgtaagagtacacctttacaaatttggtatagattcgtcatacaaaaattggatttgacatggtgagcagtcgacttgaccaaattcttcgaaaagagctcacagagagcatgtattaaacaatgattttcatagtgacatgtttaacaatgtagaagaaaattttgcgaaacgcccagatgaatttctaagattgattgaggagtccgaaaagccaatttatccagggtctaaggttacaaaaatgtcattcttggttaggatgtataatttaaaggctagaaatggatggagtgacaatgggttttctcaactactttcttacatgtgtgagatttatcctgaaggtaacaatatccctagtagtacttatgaggcgaagaagatattgtgatcactgggcatggagtatgaaaagatacatgcatgcccaaatgattgcattttgtgtaggaaggagtttgttgaggctagtaattgccctgtgtgtaagtactatcgatggaagttgaatgataatgggaaagagcttaaaattggcactcctgcaaaattgttgtggtatattcccctgatccctaggtttaagcgattatttcgcagtccaaaacattcaaagagtcttgtatggcatgacgaagagagaattaaggatggaaaattgcgtcgtccagcggattctccatcttggaagaaaattgacgatatgtatccaaaattcgtttcggatcctagaaatcttcgtcttggtctttctgcagatggaattaatcctcacagttcaatgagtagcaattatagttgctggccagtcaatcttgttatttatgcatgaagtgagaaacttttattatattttatttttcaaattaaaataaaagatgatttttcgaaattaccataaaaccattatcaaaatcgttgaaatactagtatgcctatctcaattatttatgcataaaccaaatgaggccaaatcgtctgtccctttactc

SEQ ID NO: 96146 - DNA, 1089 bp, Cannabis sativa
actctgtttgcccctattttatttccgattattgtttttgttgttaatcttatcattgttaatttggttgaatattttaaagttttattaatttaattctgtactattagtcttaattttctcacattatgcctatgactaaaatacaaaataaaataaaatttgtgtgtgccaaaaggcttggaataaaattgcataatatcatctatttactagaaaagagagaaaaaaaatcacttttgttttgctttaatttttgtgctttttcaagtgcttgcttggtaacaattatgtctttaaagtaataaaaatgtatttaaaaaaaaagtaataaaattgtttatgcaaacattgttagagaaatattccattacccattttgctagtaaaaagaaaaagaaacaattcaaacattacttactctttgatcaatcaatctatttttgtttttcaaatgtcactattttacaacactaaactaaagaaagtcaccacaatcataattgcaattggacaataagccctaccccacttagctacaaatatcacataaaggttcttttgaatcattaaagccattatatgagaagaaaacaaaaagatgtggtagaaatggaactgaaaagaatttggattttttgtttttgtttttcatgatatttcatagaatattatgaccttatcatagatgtttttgatattgattttaagtaaagcttcttagtacagaaaaggaatatttgcggcgaaaatatttaagtaattaaattattttttagcgataaaattactcaaatcgctgcaaaaaaaaagtacttttagatactggagttctacgaacataataatttaagtacttttacccattaataaaaatagcttggattcttaatgctacaaactatagaaaataaatgatcatcattgttgttgagcatatagacaaaacaccatgtgagtgaggtcacaatcataatactaacagtaagatcttctgtacacaatcaatcagcagaacagaaacaatgagatgatatatatatatttttatatatgtgtgtatatataatataagtaactaaagaagag

SEQ ID NO: 96147 - DNA, 592 bp, Cannabis sativa
ctatataaatctctgtaattaacaaattacgattatttactcacttatagtaaaatttaaattttatgctgaaataaaatagtaggatcattatccaattattacctgattaacgcatgatataaatataaactctaattatttaccattagacttatcgagatattacaatgttattagattaacactcagttttttagacaaataatataacttattggttaaattgattatttatgataataatatgaatttattaatatggtaattaaaatatttttggataaagttgtctttcatatcaatacattttgacattccaaagcttgccatttccatcaaaagtaatctatagtaccttatataggtaatataatgggtacgtatatctcacattatgtacaatctctgttttataataaagatattatttattgtgtaggtaacaatgattgaaatggtaataataaattatttaatcacattttgcagggtgttatcttaactaacgatcatgccctagagacaaaagcaaaaaattgaaaatgagaggaagcgcaaacaattggaagcaaaaaaagatgccatttgt

SEQ ID NO: 96148 - DNA, 782 bp, Cannabis sativa
atagatagatagatatatgtatatcaatcagaattttagattagaaagtgagggaacttacccagctaggcaggaggagagtgttttttaatttatttagtgaagcagtgagagagcattgagaccaagtaaatttgggcaaggggaccaaacctttcttctttgtttcccataaatggttttagactgacacaacaccatccatcaatatataacacccaatgtattgtatttcattccaggttccatatttgaagcactctcttacaacccacgtgggttcgaacactagaaacatatatataatatagttattatattaatttacatcctcattaaaaataataataaagaaagaaagaaacacacaacacaatgactcactcactcactcactacttatctcctttttacttttcctttcatattttcatccactacaaaatatttgattaccaaaaccagaaaacacactccactcattatcaatgttaattaacgcgttatgtaagtattatttggtattggatgatatcatcttatatggattaaatataaaaatgttgagttatataaaagaacataagctactccacttattactaattagttttgaaataaaacttcatcaacatttgaaaagtttatagtttaccctttcattcatatttagtccggctagttttttattaattttttttatagttgtttacgttatagttatttagggttatttttaaaatgtttaatattttttaaataatttaccgtgttgaaaataa

SEQ ID NO: 96149 - DNA, 558 bp, Cannabis sativa
aggccttcagaacagatcaaaaacagaaaaggtgacaatgggtcaccttggcgtagccccctagtaggttgaacatgaccaacatcttctccattaagcatgaatgagaaacttgtagagtgtaagcaactcatgatcagagaaacccatttatgatggaaacccatctttcgcataacctcctcaatatagaaccactccactctatcaaacgctttgctcatgtctaatttgagtgctgagtagcttctgttcccccttgttttatgcttcaaatgatgtatcaactcaaaggcgacaaggatattatcaatgatgagtcgattggagagaaaagcgctttgtgtttcagagattacaacaggaagaacctccttgaaacggattgcaagagtcttggaaatgattttgtagatgacattacatgaacttattggtctgaaatctcccatgccacgtggaaccttaatcttaggaattaacgtgatgagtgactgattaaaggattccatactacagccaccatttaagacacccaaagcaaccttcgtgactaca

SEQ ID NO: 96150 - DNA, 642 bp, Cannabis sativa
ttaaataaaagtttaataatttttgcttattttttattttaggctctcaaaaagtatgtactaagcacaggcctaatctacttatacttaagttggccctgcgcattaaattagatcggatggtacaaattaattagattggattaaaggaccttattaattagtgtgttatgtacaattggggtgggcccatgacgtacgtacgagtgtctgcctttttcaaggcgtcaatcaagtgggattatcctaaaataaagtccggcccaagcttcaatccaatgcctagtcacctaattgatctctctgtccatttgtcttgtagtgagtggagccacatctatctcaaccaaaccatgcctaataatgtcgagtattgctattatatctcaatgatctctagtattttttaaattttataattaactaataatattttttaaaaattattatattaataaaaatattaaacagtattggtaccttaatatttaattgaattaatagtgataataacacgtaaaaaaatatgaatttaatattttttttttaataaacaaacttaatacttaattaaactaatagcgataatatcacgtaaaaaaaatattaagcttaccttttagaatttctcaataatgccta

SEQ ID NO: 96151 - DNA, 504 bp, Cannabis sativa
gactctctagagaataactcccaattgtgaactaattgtgaaccctgtgcttttgaggtcagctcttactaattgtgtaccatgtgcttttcatcagttttatttgaatcagatcattttccaactattataaaactaatttgcaactatatgcataaaacataccatgtataactattatttgttggtacccgtcaactgaaatttttacataatatataaactattataaaacgataatgcaactataatggaaccacaacaaataataaacggacttatacgtaacttgttgtcccttaattcgaatttgctcttcttaatgtgtttttaaaaatctgaattgcacattgtaaaccagcaattaaccaaaatgtaactgtatataatatagatatattattcatgagtttttttttataattttcacatcataccttattttggatttgaagggagctctagaattgtttgttacatatgtacattgcatgaatctggatt

SEQ ID NO: 96152 - DNA, 502 bp, Cannabis sativa
  modified_base (26)..(49): a, c, t, g, unknown or other
gtaacgtccccgcttcaagcctccannnnnnnnnnnnnnnnnnnnnnnnatggctcttatacacgagtacgacactctggctgcttcattgactgcttcatggctgcttcgtggaagaggaagattttagggttttcagtttttcaatgatatgaagaagaagaaaaaactattttttatttttttattttcaatctgatatgaacagatgtaaaagaatactgtaagaactttaaaatgtaatggtagtaggccaaggaggagaccggagacgactcagtttggtcctcccagattcgtcgtcgtggttgtgggaaaatcgccattgacggcgtcgagggtgagctcgggtgggggagggaaatcggagttttgggtttcttggtttggggattccagttttgtggtctgactttagtgggctggagctcatggtccgtcgacggtgccggcggtgcagaagagaaagatagacatgatcaagagaggaagagagagagat

SEQ ID NO: 96153 - DNA, 501 bp, Cannabis sativa
ttaatttgatgttgattttttattatttatacgttattttttgttgttattttgatattgtttggatgttatttttcacttatagttttcttattattttcgtgctacttttatagattaccgtaaaattattttaaacataaaaatataaaaaaaaaaaatctttgaacggaaaaaaataaaaatttcacaaaaaataatgttttatgtaaatattcatttcttttttctcatcaattttccatttactctttttattcttctttattattttatttatttattattaatttttttaactcatataccttatttcttttttattttccatcatttttattttatttcttcttatttttcttttcttctactttttatttcactaattttttactttactttatttttatcttagtatttttctaatttttttttatgtttttttacttattatttatattatatatatatatattaatatttcttcatatattttgctta

SEQ ID NO: 96154 - DNA, 603 bp, Cannabis sativa
aattttaaaggtaataccactaaaatttaacaccaaattcaaaaaaaaaaaaaaaacaatcaacactttttttttctaagcatatatgtaacaccctattcaagctctcactgaaccgaatttctggctccgtcactgcctaggagagtactcagcttaggcctatacctaagagggtactcggcttgggccaatccctaaaggagtgattgtggcctaatccatttttgaggacctttcatcccaagggaatcacccttggtctataggggtggcaccttttgccccttcattatatttgatagttgttcctcatacaaaggtgatcttactacatcttctttatgggttcattctcttctaaccccgtgccacgtcccacgtgtcatcatacaatagagtaaacatatatcgatggctggtaataagtactaatatctggtaagtaaaatgtaatcatacatttatatgctcaacttccgcaatcatttaattgtctcctagcaacttaagtatcgggtcccacatagtttaatataataatttttatagagtatcgctagccaattacaagtcgacacatttagaaggtgctaggcacca

SEQ ID NO: 96155 - DNA, 522 bp, Cannabis sativa
ctcataattagagcttgtcaagattactgtgttaatcttctaattatctcttgaattccttatatacatcattcaatgtgaagagttaatctataataccaattatagttttggatccaactactagcactccctgaactaacaatataaagcagcaaatattcgatccttttgaaaagcttaaatttcactattgtataatatctttccagccactcatgtcattaggttcccataatataaattgtatgaatcatcttgtctaaaaagctctattgagtgaatcaaagaacctaatgaacataaatagaaattcatgaatattcaagattcagactggtctactatagtgatcatcatcattctgatatgataactcttttatgaggaatggtacgttgataaaagaagttagttcatattgctccagtcatgcataatcaaataattatacatagtacatttattaaatgcctattcacatatgtgatccgaatgaaaatcacaggcactaatgtatag

SEQ ID NO: 96156 - DNA, 676 bp, Cannabis sativa
gagttcattgtccactccattaaacataaaataagttcaataaatttaaaatttaaaattagttataaatataattgtatagttaaataaatataattaatttaatttaaggtaattggcagtgaaatagttttaatctttcttacatttaatttatttatctttttttttttttgtagcaatgctactttaatttttttttttacaaatttatttagttagtatttaacaataaaatttaatttgcgtcttaaatttacaaaaataaaaaaaataaaattaatagagtattgctacaaaaaatattagagtttaagtgtataaaattaaaaaaaaaaaaaaacaaaggcatttcactgccaattacctattaatttaattacatacttttttaagaatggaatgtaactttggaaatttatgcagtacatcctctaaatgggtattttggtagactccttatctattatagcatacaccaaagttttttaatctattttttttcataattgcgtacgttgtacatatataagactacctgtaaaaatttcataaaatttcaaatagtttactgtatcgaaattaaatttcagacagctacttaccacgtgtataattcagaatatttcaacttaattttcagcattataaataatttaaatttttttaaaaattt

SEQ ID NO: 96157 - DNA, 677 bp, Cannabis sativa
  modified_base (28)..(36): a, c, t, g, unknown or other
atatgatatataatccaattcaatatannnnnnnnnaatacaatacgacttaatacatcgtttcaaacgagcccttaatacaatattgtgtataatgttcacatataataaccgttattgtataattaattgtcttttacgtttacatctatgacattaatacacatatatctaagataaaatctcacgtaaaatctcacgtaagttttgatacagtatattttatagtacctaacaataattaaataaattctttagcaaaagaataataattaaataaattataaagaaaaaagtgcatcctctatagataatataattagcattaatttgtgtaacttctgttaattttattatttaatttaacttttatatatctattacccctaaaaattatactttttcttaataaatccaacgaaagatataatcggcaaaacatataggaacttaggatatataacatccaataaggacggcacaattaattaattaatattaattataaaattaataatcactaattaattatattatatttttatgtactcgtccttttaattactagctagcttggtaacattcagcttataaattttgttatttagttattatattaaaatattattttaaataaaatattcatattgattatataatttataatttattaattt

SEQ ID NO: 96158 - DNA, 514 bp, Cannabis sativa
ttatttttagcctattatttatgtcatttttagagttaatattcttctttattgtcattttatagaatagaattgtccttttttttttctttaatttcagttttcgacacttgaatgcataaattggtcaaatgtcacaaaaagatgatctataaaatagagaaaagtgtgtaagaatataaagctaaaactataagcctaaattagactatgttctgatcagattttaaagaaagtcgaaacataaaagttctagatctctctttcagctttccaggacatcttgaatcgtccaattacgagaaatatccagagagttttggccaaaatactatcagtcatcgcattaaaagaaatttctagaaaaaaaaaagataaaaagatattgaaaaaaaagatagagttgcgatttttatcttgtttaagtttaaattttgaatctttttagtgtcttttagttatctttgttagcctatataaacacattattattagtatgtttagtacgttttca

SEQ ID NO: 96159 - DNA, 638 bp, Cannabis sativa
tttaattaatggttaaattcctctttttggggccttgtgtgagagttagggggccatagtagtgggtacgacatactgaaccaaactctccctcaaattaatcaccccaactgtgaaggtccatttgccttatttaaataattgtattaggctaattatattagtttaacctacttaaatttaatttagcaacataattaatattaaaatatatgaattttttcattagaatattataaaattaatttagaaaaatacctagtttaataagatatattctatatagttatttttagtaactaattgctatacccaaaatttggctgcaacctcaatgaaggacacgtgttaggatgaaaggaatgtgaatcgatgcaattgctcttatggaataactcattaattacataagagttagagtatatttgtaactcgctgtctgtaaggtcttaggcgaggaatcaatgtacaagtttgcgcttagtataaggtcttaggtgagaaactatgtatcgctaaatgcgaatagcaaggcactggagaaagcaacacatatcaatcgtgaaagtccttagcgtgcaatgaacaaactaagtgtaaaagtcagatcagctcaagaacaagtaagcgaggtgacc

SEQ ID NO: 96160 - DNA, 1064 bp, Cannabis sativa
aagaggctaaaaatagagtttaaatttaaacaatttgttgcaagtgtaaaataaactatttgaatcttatttttggagtgttaatttttttaaaaattctcaaaattttaccaaatgttctaaaaataattataacgtagacgactataaaaattattgaagtaattttttttaaaatgccaaaacagatagataagagttgcatcgatggaccctaaaaagggtttcaaaattcttttaatatgtatatatatatttatttttttcactaaaactaacatgacaacactacaaaaggcaataatgcatgaaaagaatagcctcttgcattaattatttgttagccaaccttcctaaatgtaacaagaaatcacatgatgatatataccgttacatgtcacaagctacattgattggcatatactagtaagtaaccatgaatatgaactttggtttctttattgtagtattatagtttaaatataagtgaagagaaaaaaatgtgaaatatgctactttttgaaactgaaattaattatagtgtatatagatatagtagacacaacacatgacacaaaagtggtcctaactagatcaatgagacataagacccaaaggttcacatgggcacaaattgttagaatccattcatttatttttaacacaaaatggcaaaactactgataaaaaagccaagaaaaacttccaaggcgtggaggacccaatttttcagtatgtatgaacaagcatgcaagacccactaactttaattatatgtatatatatgttttgcacttgccacttgggacttcttgcagtttcttctttttgggaatattctacttatctctacacacactcttactttacattggagtagttataatgagtaggcagccccccaatatatatagattattaattgttgtagctcaattggggtcccctacctacaaacaaaaacttgttcagaatgtgtatcatatcaacttgagctaaggtctttaaaagttttaacttctataaggagcttatatatgtattatttaataataataaaaaaa

SEQ ID NO: 96161 - DNA, 788 bp, Cannabis sativa
tcagggaagaaagcagttgaaagaccttgtaaaaaaggtaggggggcagtgcaatgatttgcatctttgtaaaagtaaattcctcttttaatacatatgttggctcttatactttctttttgtcaaaggtccaagctgctcgtgatgaaatgcagtggggagaagagggcccgcctccattgcttgtgaaaattgctccagacttgtctaaagaagaccttgaagatattgcagcagtatgtacacatgcttctcatttagttgcttcctctgtataatttaattttatttgttttgtaatttctgatttctttcctgtgatcatattttttgcttctctatttttacaggttgccttagcccttcgcttggatggattggtacgttatttgggaatgtccttcaattatatgcttcatttactttgccttaagtgtttgaacattgcttttagaggcttaactttgcaaatggtaaaagttatatctggagtacttgtgtgcatatttgattaccacattgtggcatccttcagtagcatatttcatatcaagtccataatcattttacaagccaatgtattactctaagggattctttctttgtgactctcgcattatgacattatttggtcagaacatgggttaaatgaaaccttgcttgtcatagattcccatcaatggtagttgtagtttgcagttcactttgcccaactgagaagatgcattagtctaagggtcgtattctcgacaaattgagctattgattttagcaattttcaagtttcc

SEQ ID NO: 96162 - DNA, 562 bp, Cannabis sativa
gaggcttgtcagacactccaagaagaacttaatgcagccactgtgaagctcgagggcgttgaggccaatgctaaagaacggtgcaacgttgttgctaagagatctatttaacaagcttggatggcgaatcctgagatggactcaagtttcttgggggagggtaccgaagaagtcttagcctattgtgagaaagctaaaaaagaagaagaagatgtaaatgagtttaaagaagatgaagacccatccaagtctcctactatgtaggattggtttttaacttctctttttttttttaatttagaaaaatggcctattggccgagacaatagtttgccccttgtggcaatatttttgcaaagataaatttacattgttggatggccaactttgttttttatttatttcttttcgtttattgcctcgtatctttatatttgaacttaatatgttttttcattggtcactgggttttgggttgaacccgaacccgcccgccaactcggtcacttttcattttttttttaattttttttattacaatatattaaaaataaaaaaaaat

SEQ ID NO: 96163 - DNA, 1063 bp, Cannabis sativa
aaaaaaaaaaaaaacatgtcattactagtgtttgtgttacatttctgatagttttggtcaaaaaaatttaatacttggtattatatttgaattttattatcattttaaattatataaattgataagtaaatattagttattattattattatcatcagaatataagatttttttaatttatcgtgttttcaagttagtctatttatgtatttttttaaacttgttttgttgcatggtgtttataactatatttttcgtatcatattatgctaattttgaacatcgtaccatgtcgtgtccaaattcatatttttttcatattagatggtacttatatcattaatagactcgcactattttcgtgtcatgtcaaaccgtctaacctgcaaattacaacactagtctcacttcaactttgtgaaatcactagattatacataatcaataaatatttaagttaaaaaaagactcacaaattcaaaatagttctagtaataagattaaaaaaaatggttctagtaattttttcattttactctataaattgaaagttggatttttgaattcatacattgcaattaaaccgaaaaatgtctttgtcattatcagaagatatacctttttataaagcacaccagtcttttcatttttcttttattaccacatacccattttctttcatttgtgcttagttggattttgtcttctccttcatatcttatagcagacttaattaggattgtgctatcattgcccaaaaaagtgttatagatgagctgattaggttgtaaagcagaattgtaggagagtcaaatcacctttagttgaagacccaacccaacaatgaatatggaaaacttgattattattaatttagtagccacctcagtagcactaaaaactcaaccaaccccaataattttcttgctaatcaccaaaatggcagtgcaagcaacatagagactgtgattagtcgacaagtgtttccaatattttatgaacacggcaacaacagcaatatatatatggatatgattttgtcccgttattgtactttcacgga

SEQ ID NO: 96164 - DNA, 552 bp, Cannabis sativa
tatctcttcttgattgatgtgatctctcatagagtagtcgtcactagccttattaatcacagcgtaatagctgcaaaagaggggttacgccgtcagtcatattttttcatggtagttccaatacgttttctcccatgcggcattaaatgcgaggtgactgttcaattagagtccagtaccccccggagatgccttagcatggccctggccttcgggagtaggtggagccttctcccatcttctccgggaggtatcttctcgttgacactcctgtcgttacaagacttagtcgatttatctaagagttgagcctctcagatccacgtgtcgtcgttacactggtccacgtattttgggcaaaatcaagggcaacaaaaaggaaagataaaatttagttggaataataaccataaaattatataatccaagattattgatacaatttcaaattaaacctatatatcatacaaaaattattttggcagatgaaaaaaaaagtaacaaaaattaaaacttcttacgtgatatgaaaccaagataagtgacgtacaa

SEQ ID NO: 96165 - DNA, 517 bp, Cannabis sativa
cttttggtttctgagaaagcttcatgatgatacgtttcactattgataagttttctcattttatttatattgtgttgatttttttatatggtttaagatttgaataaacatatatgtctgttaataaattgtgcattgtatttaaatttctttgttcattatgtttaaaattttctttggtttcaagaatttttgtgttttctatgttcagcagtagccatggccattcttacggccgtttttatgggttaattgtgagatattgggatagcagttattttggtagttttgaagatgtccctttttttattttattttattttttatgttatattgtttttttatttatttagaatttaaatttaaattgctaatatctttatttatatacagtttaaaattgttaacaatttatcgatacggtcctctctcttcttattactcttacctctcacaacatttcaacctttctatttcttcatcgttgttcgtgatcgcatccccagtacttacttct

SEQ ID NO: 96166 - DNA, 641 bp, Cannabis sativa
ctctgaaggttttgtttctctccagacatgccaataaccaatagctaagcaatcaacaaatgccacaccattctactgtagaatataaataatccgcctagacttttagttctcaatcaatcattctttccaaaaataactcactagcaaagtgacagcctcctattgtccatagttacaacttaaaccttaaagtcataatccaatccaatgattcactaaaataatagaaaatggaaataattggttgtatttttttgtttacctaaatcaacaaagaaaattaagattgactaattagaacaccaaaatcattagataagagatttggatcactaaatatatattgataatcatgttgctgagcaaagatttttgccatgcaaactttgtttaggaaacttagcaactattcatgaaattttaaccatgtcatctccttttatgagtagatttttcaaaaaatattagtcaaagtagtttccacaaaactttggcacatcatactgggtaatagtcaagaaaactacgaaaggaagtttgacagagagaagattaacataccttaaaatgctccacagggtacttggcttcagccaaattgatttgaccctacgacacaaaagattaaacacaacata

SEQ ID NO: 96167 - DNA, 630 bp, Cannabis sativa
aaaacagataatggtgcatcaatacatgagtacatccatttttaaagagtgtattttagaattttccaaatatatataaaaactataattattgtttacggtctcgtaatgtaatttttagttgatcctgctattataaatggaacatgattattttgttaataaaatttaaaaaattctacaacgcactctcttaaaaatgatgtattgatgcactgttatttgtttttgtatctgacataatttttaactcaaatctattctcatgattacatacattatagttatttaagatattttgtaaaattttaagaaatttagaataatttataatataaaagtaatatttaaatagtctattttacacgagtataaaataaaagattcacgagtgcaactgactctgtttgaatcttattttcaacgtgttaaatttctttgaatatgtcaaaattttgtaagatattttaaataactataatgtttacaactattaaaaaaaaagatgaactaaaaaattctctcaaatgtcgaaatagataaaaatatatcggtatatcttttaagagggaatatggtagaattctccaaaattttataatgattaaacagttttttttttttaatttt

SEQ ID NO: 96168 - DNA, 640 bp, Cannabis sativa
atttttcttagtaaaatatatttatttagtgagatatttggtataatatttagtgtaaattatgagagttactgcatgaatgtaaatatattttacacaagtttagtgtaaatatattccaagtggatcgtccatggaaaggatttttatcccaaacccatctcttctggccatgagagggtggttaaggtggcggatctgctcacgagtcagggggactgggatatctccattctcaggtccttgtttgactctgacacgatcttgaatatccttaaaggggggaggccatgtggtcaggggagagacaggtggatttggactaaggaaagttgcggaaaattctccactaagtctgcttatttgcttctggcagacgagagaacccctgcctgtgtggtggcgccgaccttatggaacaaactttggaactccaaaattctcgaaaagcataaattcctttggtggggtattctctctgacgctttaccgatccgcgacatcctagctaggaggatcccaatcgaagatgacacttgccccttgtgtggggaggctgaagagtctatggaacatcttttcctctattgtaactttacttaccacctctggaggccctctccttggggagtcttcccga

SEQ ID NO: 96169 - DNA, 600 bp, Cannabis sativa
catttctaaaaataattttttgaaaacaaaaaacagaaaactatatcaaacatgctctaaatctctgatgcgtagcaagagagtagatctttgaaaatttgtatttctttggatattgggcttttatgatgataaacctccatattttaatcaaacacatgatatttaggagttttttacttttatactttcagtttttttttttttttttcatgtttaggaaatttacatagtaactcacatactaattaacatatcaacttaaattacaactaaaatacacatttcaatttatatagaaattaccggaataaccactgtaaattaccggaataaccacggtaacaatccaaacgtaaatttaaaaaataaaataatatataaataattctcttcacatttattcaattactataattttattgtaagagttaaattttatatatagagttgttttatttttgccatttaataaaatttctctattatatattatttatattaataaaatttcaaaaaaataaaataaaatttctctattatttattcatggttttgtttgtgtactttactataaagtacaattatatattgacagta

SEQ ID NO: 96170 - DNA, 577 bp, Cannabis sativa
tgtatcaaaatcactatcattagtgtatatgttatgttttttttgttaaatagtcaaggtttgaaggagtgctttcatcattctccaccacaccaccgtaattatcacgacattactttggcattgttttatgactgacgacgtttttggccggaatttatatatcagcgggacggtcggaagctggtatggttggtgtcgaactgcagaatttgttgtcattcctagtcaactatgacttccgagattgcgctattaatggcgtgatttgtatttatgggcttgagttatggtattttaaactatttctattcttaaaatataatcagtttctatatttaggctattttgtaataatgtatttattattattaattttttattaaaattgttatttattttataagtcaatttatatttatgatagtttaaaaaattttgtaaatgaatttatttttgcgttgataggtgtgaattgttttcatatatacaaacgtgaagttataatttacatcttttaaaatcttaattaaatgcagttttcctatatatatacagttagttttttttttttttt

SEQ ID NO: 96171 - DNA, 936 bp, Cannabis sativa
tgttgtattgcctatgactgatattgttgtaccttgtatccaactttgctataaattgaatactttgcctcagtctcatttgagctcagttttatatatcttatacaccataaaatctttctaattaattttttggtgagatgtatttttagtgaaggaacatgagataaagagacaatgtattcttaaagttagttgggttttctttttttttttttattattattatgtttaggagttgcagcgcacttcaactttaatgttattggaaaaaaaataattaaagtgagctaattgtaaatgagttattacaaaatttcttcctaaattatatgtacacatacggtaattttttcttaaattttgaataaataacgtcattttaaaaaaaaatcaataaaaaaacttaagaatgacattaatgaaactaaattttataactaacaaaatttaattattactataccaatactaaaatattctgctcctaattagtatatatttttttttgaaatggctcctaattaatattatattcacacaaaaaaaaatatataaaagaaaatacaaaaattcaatattttttttctgttgttgttttatttttgtgagaatatcatgttaatatcttaaaaaatatgattatttactaagcttacattaaagtataatgtgacgtaacgttacatatctattataaataaattactaagcttacattaaagtatattgtttcttagttcacatgataaattcataattatagatttagtataaaaattaaattaaatccttataaatagtcacatatattgtgttgtctacttagtgaaaaataattataatcatatgcttcgaactaattaatctcataattcaaaaaaaaaaaaaattaatctcataatttattagtgtactactggatttacactaacg

SEQ ID NO: 96172 - DNA, 540 bp, Cannabis sativa
tatataggctatttagattggggtttatgtataatgtcattttcacattttttttttcttttaatctttgtagagtgtagtctcttgtataaagagaggattaaggcaaattaataatgtgaggggcgtaattttttttttatataaaagcaaggagggcaaaaataatttgttttttttaaaaaaataaagtgtagttagtgggatttaaacatttatcctctatgtagaagcttaacaagctaacaacaatggtgaaaaccaagaacaagtaaaaactttagagagagaacagaggaagaatagctcgaaagcttaactcacaattacgagctaagtcatctatttatatgcaaaagaaatacaaggcaggaacaacgattcagttaaaataactgaaaactaactaactaaaaatacaatagtattattagttaacactttgaatgcttctcttgggccgaatcctagtttcatatggaagagtatttttgaaacgcaagctttgattaaggagggagctcgtcggggggttggtcc

SEQ ID NO: 96173 - DNA, 728 bp, Cannabis sativa
  modified_base (686)..(689): a, c, t, g, unknown or other
aaactcattaaaaaagtgttaccaaacgccacctagaatttctttttttggtaaattaaatcagtatattgctaatctctccaattacatcctaagagcagctcgaatgagagttatgagactgcaaaaacaatatatgccatgtatatatcttccaagaaagttgcatttcttatagcattttgtagttttatttacagtgcacggtagtcctgataatatttttatatatatataatatagttaattttatatatatttatattattgtatttgtaaaattaagaattattctttgagaaattttacaatgcacatttataaaagtgatgtacgaattacttatatttgtttcggcacccgacatatttttttagtctatttttttatatgatagtgtatattataattatttaagacatcctataaaacttagaaaaaattatacacttctttaaaagtggcgcactgatatataggggtgagcaacggtcggtttggtcgttttttacacaaaaaaaaaatcgaaatttggttttcggtttccatagttataatccgaaaaccgaccgaccattatacaaatgtaaaaaaaccgaccgttttaattttataaaaaataagtttttaagtttttataattatttgaaaactaaaaaaattagagtattgtatcaaatatcatnnnntttaagaataaaactttcttagttaaataaataatgtaa

SEQ ID NO: 96174 - DNA, 525 bp, Cannabis sativa
tttcagaaccaagtttccagagtcaagtagtttgagactagtattagaagaattggtggctagtttgctagagtttataatgaaggaagttgtgctgttgctatttatcaccaagttcccttctatatttatatttacatatccagaggtatccatcaagggtttttctcggttggcaacccaaacaaacttcgcatcgaaagcgtacatgtgctgaatacccaaataacgcttatttgaaaaagtaggaacaaagaacagtaaacgaaatattttgtttggagactccaagaattgccagtctctcatgatttcaccagctatgagagtgtctgcagcatgtgatgggaggtgaacattgaataactaaagcaaaacaaagcatggaagaagaaacaattggttacttttccatctacgcttcattgtttttttctaaaaaaattacacaattggtatgtacttgttatgaattacagagaatcggattgatcattttctagaaattcatgttcttaaattggt

SEQ ID NO: 96175 - DNA, 616 bp, Cannabis sativa
caaagttcgggggaaaaaaattactaattagcctaaaaaaataaataattaacataatggcaaattaattatggttggattatattatttaagaaatatagaaaactatagcacacagttttatctaattttttaagtacaatcattttcatttaattgaatgagaataaatttaatgaggtaaaagtatttattttttatttgtttatttatttgatgtaaaggtgaaagtattaatagtgggaagtgattttggggaatagagatagataaagaaagtgagggagagtttaaaaagttaacagatgagtgagagagcaaaaagttaacatgtggcatctatttattggagggacagggatgggactgacgtttttttttttttttttcatttgacaccataataagataatattttgcaattgagttcttggagtgaaggagagagtgctgaagcagccatgattctttagtccatttggaatactagaaaaaatttgattttctatgcttcgaaaatcaaaaaatttgatttttaaaccaataattaaaaccctaaaaaaactataccttttttttcaaaaccccaaaaatacccccaaactaaaactatctc

SEQ ID NO: 96176 - DNA, 758 bp, Cannabis sativa
  modified_base (188)..(191): a, c, t, g, unknown or other
  modified_base (714)..(728): a, c, t, g, unknown or other
agggataattgttgtaaacatatttcggtcaactttgtaattaattgtccactatgtaattataaatagtggcagacaagatcaaaaaagggatgaaaaaactcaaatgagaggattcctaaaaaaacgatcagaaatctgaataagattgactcgtggacttttgcagaattttaactgcaaaaccnnnnaaaaaaccctgtgttcatatttttcagtttgatagctttattttttttctgtgtgaaataaatattgtgaggctcaaatttagttaacaaaaatctgcgttaacaatttggtgctttcattgagagcctttaggaaaaagctcagaaaaaaactcccccttcttttgaagaaaaaccacctccttcatggctgaaaatcttgaaaatgttaacaccccacatggggaaaccaatcatcgtcctgggaaagagcccatgggctccagaagatctaccaacccataatctagaaggaccacccgttctaggagggcttaacttgagggtggccccagtgcacagaccacacgttcccggagaactcgacccgacgttggtcctagtatgcggaccacgcgctcgaggagagatcaccgtgggaatagtcagaaccccgggatgagggatgaagagctcaactgtggatgtgcccaatctgtgggagaaggagattatgaaataaaaaactgttgggttttatgcnnnnnnnnnnnnnnntttcaatataatcagattttcttattaata

SEQ ID NO: 96177 - DNA, 650 bp, Cannabis sativa
tatggtattggagtaccatcattactgcaaataaaaatttatgtaatcattaatgtgttatgttcatattacttaaaatttcaaactttgctacgaacaacattgtatatacacacataaataattcaataagttagataaatgtttatgtttcaagaaccactcatccataatttagaagtccaacatactctaaaagagttatagtagatatatggttatagataatatacgttgatattttaaaagtgataacaataatcttatgaggtatattatcaccaagataattatggatcatatatgcataaaggggagacatattcatgttgcattctttttctattagctcaggttctgtctcattgaattttcctgacaatgtttttaacgagacaccttacaaatatctatgaatatgaaatatatatattgtactcgttttctcttagctcaagttttgttccactgggtttttctgacaaagtttttaacgaagtaacttgcaaatatttatgaatatgaaatatatacattgcaatcttttttccttacctcaagttttgtcccactgggttttttgataatatttttaacaaggcaactttaaatcatgttaacatacctgcactttatgaagcaagtagaga

SEQ ID NO: 96178 - DNA, 542 bp, Cannabis sativa
atgttgagtcacaggctaggtcactctctttaagacgtttgtggcactgccgagaaatgtgcaagcagtcggatttgccggtcgtcccaggataaaacagcccagtcaaaataccactatatcggagctctattgtacgatagagaaccgtcaaaatactacacccaacaaatactgctcggactacttatataatataatcgtaaatattaaactgtaaattattttttcctgtgtaagagagatgctgaaaatgaggaggagaacacgtctgtcttcaccaattaattaaacacgtttaaaaactattttaattaattaaataaaaataataattttataaataattttttttcaaaaattaaagtgtcacactagcttggtatgattggacgaaatgatgacacttgcatggtaggtcaagtgtatgtgtcctcactcattcgcacaaaactaagtaccttttggagccctatcccaagtgacaaagttgcaatttatatactattgtaaactaaaactcatattccatgtgagactca

SEQ ID NO: 96179 - DNA, 1077 bp, Cannabis sativa
  modified_base (26)..(49): a, c, t, g, unknown or other
ttttattttaattttaaatatttatnnnnnnnnnnnnnnnnnnnnnnnnacgtgtacactgtgtacacgtagacattccaaccttaacaccaaaaaatggatggagagggctaactgctaacgaaacttgggtttaggaggttttaccaccaaaattttaaaattagggattagttgtaaaaacctcgccacttaaggaggttatgccgcgtgcaaattactctaataattattataataaactattacctatatacaaagtgtcaccctgtagtgtcgaacaatactaatgcataataatgttaaaaaaaaaaatataaaaccgctagtagaaatattcatccatctaattcgtactattttgttcgtagtgcattcgatttgcgctatgtgcgaatttcatattttggatccaatccaatccgcaccatagctcaaatccaatcaaatctagtccacaaaagtacggatattggatcgattattttaggttggttacttttcaatattaaattattttatatgtatgaaaaaatatttttttcacatatctaggaacaaaataaaataaattattgttattttgttctccaataataaattaaaataaataaaatgacaaatgacaaattcaaagtgtaaaaaaaaattgtttttgtataaagaaaagtttaatttttttaaaattatgtgtccaaatttttttttttatataagaatggaataaacatttaatctattaagttttgaaattgagtctattatatgtatttgatttttaacttactattttctttacaataaaattttaattgtatatataatttttgatttttttttataaatatgtgtagattattggatcggttatttttaaatgtcaatcaatatctaattcgcacaagtgcgtattttgaattctccgcagaaatacgaatatccgtaatttacaaattgaattgaattgaatgatcggatttaattagatcgactattttataatcactccaataataatttaataactatatattaaataatattattataatggtttacaaggcacccctatataat

SEQ ID NO: 96180 - DNA, 519 bp, Cannabis sativa
tggagcaccaatacaaaaactaggtcaaatatagcaccatggtatatttgggccaaatttaacccaaaatatacaccatccattggagatggtctaaggtgtctaacaccactataagatgtcctataattagctagtggatctctataatctttatttaattaaaataactgagatctgatattaaattgcacaaatagtaatattacacctcataagtgtgcgatgaggaccacactaaagagaactcgcagaatctaaatggaccttacaataataggtaaaataagtacctcacgatatcaaaaaggaccttgcaatagttgggcaaacttagattatcgaagaaaataagcgaacacaccaatcaataaaaataacagtcaagcattcagaatgcaactataacaaacgttacatgtattttataaaagatgtaattgttaaaattaataaacttattatcatttgtaactatctatcataataataattatttgtagctattatctaatccct

SEQ ID NO: 96181 - DNA, 895 bp, Cannabis sativa
  modified_base (323)..(337): a, c, t, g, unknown or other
gtcggtagtgtattaaagtaataagaatctttaatatgaaactctaaatacggtttactatacactatacttctagcgtgtatgattttaattcgggtcacacatgtggatagacatgtagtaaaagtgtgtataattcgattatgcatgactgggccaatatgttataaacatctttcattaacttgttgtttaccatgaaaagattttatcatatcataatgatgatcatagtagatcaacttgaattcggagtatacatgaactcatgatcattgagttctttgatttactcattaaaatttctcagagaagatgattcnnnnnnnnnnnnnnnttgggagcttaataacatgagtggttggaaacatgttatacaatagtagaatccaagttttcttaacggatcgaatattagttcccttatagtgttaattctgggagggctaacaattggatccaaatctataataaattatagattaattgttcacattaaattaatggtacgtaaggaatcaagaaataattagaagagtaaaacgatattttgaccaacactaattatgaactaataattggagggcaaactgcttatattgattatatcaagaactactagaaagaattctgtaaatataattttatattgtcaaagagtgcaattttacgtaattttgtagttaaaatctacatactctacgagtcctttttattaaggatatttttagagtacagaatacaatatctgattttgaataatagtaattctctctcaaatttgtcgtcattttccatggaatctgcccctatttataagaatataggatgacagttatctttttgggattaatttaaatatatttgttcgtgaaacgtgaacaatccccacgtt

SEQ ID NO: 96182 - DNA, 722 bp, Cannabis sativa
taatttttcattatataaaatattttttaacgtatataaatataattgaatttgatcgatttttaattaaattttgagattgatatttaataaccgatctaatccatttagaatctaatttttagcatctaatccaatcggatatctaatattttgtaattagattagattagatcggttcgattcaatcggattagattagatgttgcccgacttattattttttattttatcacccttaattcctatataacttatctttagtaacattagttttttctataatcaatattttattaatcatcttggttcaagattccttgctactgacgaggtttacttactttttttattttattttacttactctcagatattcacgtgggttccatattaaaaacaaatatgcatgtgattaacatagttaaatatacttgctcaaaaaacatagttttttatatatatatatttttttttttgcttaaccaaaaacatagttaaatagctatatatcgtatgaatattgttaaaaaaatagttaaatatatttgttcaaaagaagaagaagatatatagttacggtactacagcatacttttgtgttgtaccactcaatgtgggtacatcactgtcccaaaaacataccatagatatgtttttctatttttcttttcatgacaatatttattgtagtaaaaattgacttctcagttttaaaaaaa

SEQ ID NO: 96183 - DNA, 895 bp, Cannabis sativa
atctcaatcttgagatggttaagctctagcttaaatgtattgcacgagttctttaacttattcgttacagcttaattaccccgtaggcataatactacattttaaaaacttggcagtgcaactgagtgagagagttaatcgagagatgtatagacatgtatagcttctatgtttattagaattgaaacgatagtttccttagagtttgacttatcacgataaatgatagagcgctcatttcgataattatattattagtttttcgaaatatcatttataagtagttaagtacttaaggacgaaatacattgaagggtaaaacaacaattttgtccccactcaatgtaaaccgtctatagaggatcaatgattgttgtgattgaagcagtaaataattcatctcgaatctatatatagtatataaagctaaaataatattgtttgtagtctcaattgattgatttatttaattaggattataaatctaactatgtcttatttatgaattttattagatggatttactatttttcacagagtagtgagctcagggatcgcgatcctatatatataggtgagacctcccatcaaggtttttgctacaattaattgtaagaatattttgataattaattcagaaaattaaattgggtaataaatattagtaaagcgtaatctaactatatatagaatatcaaccaatgaccaaatataatgaatataaaacattcattctcttgcacacgtataaaatcaattcattgatttttatacttaatatagataatattctaatataccacttgaacctaacgtttcttattacataataaacatatgaatcataacgataagtcttcattatatatcgaatattatcttacatgtattacac

SEQ ID NO: 96184 - DNA, 500 bp, Cannabis sativa
cacatatttacagtgtaggtaaaggaaatgctaaggctgagcaccagtgagtccagaatttggggatgattgtacatgttaagattggttcgacctggagagttcgatttcaagacgacttgtgcctcatttttgtagttgctgtgacgtgtttatataaagtgtattttgaatatgtttgtaaattttaattaaagatgggatctcaactttttgtatggatgtatatatttatagagtttcatttcaaagttttaatatgataagatttttgagaaaatctttgattagcaaaagacagcacagtaagtaataaaatcattgtagcgtgtctaagcattatgatgttacaattttggcatagtacaccacggagtctcatgaaatcatagcactagcaactgctagtgaagaagtaggttagttgagaagcctgctagctgagatccctttatgggaaagaccaatactaactatgttgatccattgtgataatactg

SEQ ID NO: 96185 - DNA, 561 bp, Cannabis sativa
tctagaataaaatactcaaactagaaatttcaagcctaaaatttcctacaacaaaatatttacccctttcaattctacagttaccatccaattcagaactttagatacaggttttaccccccggaatcaactcaattaagagtcaatttcttgctttatcaataacattggtggctcttctgaaaaggcatctagaaacccttggaccacaagattttgtctctgtcccaccgatgttccctttgtaatatttatcacactaactgaaaggttggtacatccatcccataataaaccttctaccttaaatatcgtgattaatggattttgggacctttaaacctagcccaagaacacaaatgggtcctcacctttttgtatcaataattgccacctttctttcacaatcgatgtttgcactatactttactggtcaatccaatccccaacagtaccttaaattctcctactaaaacccataactggtgggttgttaatatttttcccttgagttcataagggttaacaccatttacatgatccaacattggacatttactt

SEQ ID NO: 96186 - DNA, 517 bp, Cannabis sativa
aatctgaaaagattgttgaaaccacgtacaaaaaccttgtgcgtttttacttttctgcactgtttgtttttctggtttattctaaagttacacagttgtcttttgtagctacagaaaaactgtttcagtaccagttttattattctgcatttaattaagtatttaattaaataataaagtgagaatattaaaatgcagaatttcaatttgtatcagagtgggtcactaaaatcttagtgagatcttgagataattccgtttaatttattttgtgtgagatgtctttgtttgtatgaggaaactccattacttgaccacctctgttgaatgattcaaattattcatattggaaggtcaggatgagagcattcattaagtcacaagatgagaaggcttggagagttatacttataggctggtcgcaacttactgaaaatgacgataaaggtaaaacctaaactcaattggactactgaagataaaaaattatatagttataacaataaggttttacatg

SEQ ID NO: 96187 - DNA, 997 bp, Cannabis sativa
attcattttgtttcaggtctgtggttattggagctattacattctgtctatgtaattgggtgtcatttattttcatagatgagttgagatttcctatctatacaagtcttaaaaatgttaagcactggagactttgatagtataaatcattgcctatatccaaaataaaaacaggcttcagccaaaaaaactaatgttttcatctcttcgtctctaggtcttgcattgcaaaactctgcctacaaggtgcaagaatgaaggcactcctctagctaagcctttggttgtgaggtttgggtttaataaaactttctcaaattctgaatcctgccaagattacttccataaatttgcctcagcatgacacagatatgtgtgtactatataaatgtactttataaaggacaaagagaagaaacaggaggactaggaattctcatacaaaaaagaatatagggataaatgatgaagcctgagagaaatcaattagataaccaaggtaaagattaagaatgcaaaagtgattcctaaactctcttatgaaatataaaaattatgcttttaacttttacttctccttaatgtcccaaccactaaactatttcattagaatgttcgttctgtgataaaccatatctagaaaagttgagcttcaagcataatttggcactcactttagcatcatcacagaaagatctccacaagcatgaagcccagctagaaccactgaagttttattgtccccgtggcacaaagattgttgcagttctgtgtcattattgtcacaatcttgcgcactattgttaacccttgcagcggaggtcaaatcttttaacgtgtcaatggacatcacatggcatgtgattgtcttaggcacaatcaaacttctcttccctgatctagtgagaaaaaagataataaatgaacaaccagtcttaacaataataataaaaggtatttcttaaatatattgactactatgaagccaacttcaaaa

SEQ ID NO: 96188 - DNA, 548 bp, Cannabis sativa
  modified_base (232)..(236): a, c, t, g, unknown or other
atagtcagaacaaaagtttgcttttttgagttagtttttgttctaacatcttaaaaaatcttagtgtttttcttttttgaaaggttaaaaaatcttactcaataatgatatgaaatttgcaatcttcttaattggcaacaataattagttatagtttttcatccatctatacattaatatggaaagcatataagagatatacgtgactttctataagttttttttttttttnnnnnatatatatatttttaattttattattcaactaagtttatttttttgtaataaacctacatgaccatctcagtcactaaacaagataacaaataagttggaatagactccaaactaaaagtacaattaggaaacaatacaaaggctctagaaaacttatgagatgccatatttactcattgtctaacaaaataaataaaaatattttttaaaacattgagcatagccttacaatcactaaccatttgaccaaacgtagaagtcataacaatagagcttcataaggcataaacaaccgaaagacagtcggtttc

SEQ ID NO: 96189 - DNA, 560 bp, Cannabis sativa
agaagaagaagaagaagaagcattttactatgttatttgatgttgtgaatgtttaccaatatttttaaaaacgaaaaaataaaatcaataatagtgtaaaggtttttttttttctttttggtagtgataacatgttaattattaccaactctattacaatctgaaactccacacacaacacccaccattcttaagtagtattaattatatatgtcttgtaaatttgaatttggtgaagaatttaaggtacaatgcactttttaaatgggtattttagtagattttttatctatttctacatataagaaagctttcagtttaattttttttataattgcatgtgtaggttaaggtggtgttcgatttgttgtaatataatagtaattgtaatggaataagaatggtaataagaattgattacaatgtttagtttatagttgaaatgaacattgtaatcagaattattgtatttagtttggtataatgtaatagaataaaatgtgtattaactaaaataaccttatttcttttattataaaattataaaatattaaaaaaaa

SEQ ID NO: 96190 - DNA, 1422 bp, Cannabis sativa
aaatgccaaaatattacatattttatagtgtaaaaatacaaaataaaattaattctttataatgtttttaataaattaattcaatatgttatcgtgttaaaaatattttatctagatttaattttatttttatttataaataataattagtatttatggcataatagagaaaaaataaaaagttaagaaaatgcgttattttttaaagaattacaaattaattagattttaaataaatatttttattaaaattattgtgatatattttatgttgaaaatattttgtttgttgtttgaactaaaataatagcatcattaaaagaaaagaaaagaaatcaaagtgacaaaattgtgacccaaaacacacgatattgacatttttaattaaatattaaggcggaagatgaaacctagtgtatttaattaaatatttatttttattttgattctcagtacaatatatgcatatgatattcgtttcttaaattaatttctttcatctttaatatcacgtaattttttattgttagaaattattaatgcttggttatatattttattttttgtatttacattaaattgttttacatttaatacttagaagttataattttaaagcaaagaaaaaattattttttattagaaaataattgttttgattactatttaaattatgagctagaatcaatataaacataaatatttttaaagggaacttggtctcttggtcagccaagaaatagaatattgttgccagatcaagttctaaaagtgaattcagatctcttgctactgctgcagcagagattaagtggctagtatccttactttcaaaacttcaaatcccaacttcattatgttgtgtccatgggtggataatcaaagtgttgttggcattgcagccaatcctatttttcatgccatgtccaaacatatcgagattgacctgcattttgttagggagcacatattgtccaaacaactatctgttcgatatgtccctgccatagaccaggttgcagatgtgctcacaaagcccttgtcaatagagagatttttgtaccttcaatccaaactcaagatgtttgagatcttttcgtttaaggggggatgttaagcatgttttaaaatctgttacttgactgttgttttcagttaaatggttaagttagttaggtgacttaactaattctgttgtgtctgttacatttcagtgtatgttgattaggattgtattgatctttgtgtataaataaagggccaagctacttgagtaatgctttcattcattttctctgtttcacttggttctgcctctttcattttttctctcttttgcttttcttactgaaggtctctaccttcttcaaatcgaataaagagaaaaatgtttaattagatggaaagtcaaacccttattat

SEQ ID NO: 96191 - DNA, 586 bp, Cannabis sativa
aattttaagagattaaggacctatatgcattaaagtgaacttcttaagggtttatgtcgcaatttaatatcaacacgtgatatttttgaagcaactatcgaatctgttaaaatgaggaccaacgaacttataagattttcgagcttaaggactattaccgctattttttaaaattgagaatttatctacatcaaagtaaatttttttgagactttgctacaatttttcctaattgattttgaactatgtaaaattatattaatgatgttcaaaataataaatttaattttttaaagataaattgttgatattaataaatttttaaaattattttaatattattagattaaatttctacatacatataggtagaataaacatatgtctgattggcaaaaggtatttattgaagagaagaagatgagttcacaaataaaaatatagtgcaatagcacaaaagagaatcggtcaccaatttctatagttatattgcccttaccttttggttaaggtcacatatcccttagatcttagcaaaaatttattttttagaatccaatgactaagatgtgttgtggtatgcagt

SEQ ID NO: 96192 - DNA, 1047 bp, Cannabis sativa
tctcaatagttcatgaggcattttcaatgaccttaaaagttcagggggcataatttggtacatatcaaaattgaggggtaaaaatcttaattaacctttatttaaactatttttttctgtaaaaataaaaatttaataacttagaccaatcaaaaattgtcacgtgacaatttacttaacacttaaaaatcatgttcttccaaaatttctaaaattataacttatatattattaaatatttatttgcaatgaaaattaaattcaaatatttatacaataaattataaaaaaaaatgcctttttaatgaattttttatttttttttttcatacaaaacagcatgccaacactggaacacgtgtcttgcattatttatcctgtcgtgttgtataacataacaaaagatatcatgattattatcatctttcttccattaaaaaaatattatcatctatctttttcaattattttatgaaaaaaattattagtgttttaacttttaagaatggttaacgaaattttaaacatataatgttatttatttatttttgttattattatttttttgagaagacatataatgttatttacaaattcaatttctcaacttttttttttttttgcttttaatagaagtcatgctatagttgagagtccaagatgaggcaaggagttaagctccttttttttttttaagaattaaagaaaagatgagtttgcaaatatctaactgtaacccatcaaatgaaaaaataaaaataatgtactctatttaaactgattgttatttttttatttttttattgttgttaacttttggtgttcaaataattgatttgaaaaaataaatgtataatatatgcctttcaaaattaaattagttaccgtttaaattaatgttaaaaaataaatatgaactgaataaacattaaagtatcaaacaatattttttaaaaaataaactcatatgtaaattctaaatttcaactacaatatttaaatgcaatcaaaattatcaactaaaaattctaaatttcaaaataaact

SEQ ID NO: 96193 - DNA, 531 bp, Cannabis sativa
ctgacttgggatttgaatcacaattgtaacacgccactagaatatgttgctttgaaccctaatagatggtgcacaacatcaatgcctcacccctcgtttcgccagctatattaatcatatacacacttagaagcatcttattattattattatcatattatattatttggcattgcatgtggggcggactcatgtaagcaaggcggggacagtcgcctatataaaaaaatttggaaaaaaaaattgtaaatgcaatttagttaatcacgatatatatttgtaataaaaaatgatatttataaatataatattagatttagtattctctaatggttaaattagtagcaaaatgttgacttttatagtaactggttactaataacatttgggccatttttgtaaactttagctttttgagaatgttgtgttcgcgtataatacccaaatcattcatttaagcctagctatagggaaatttacatggtatactaatttttgttatttttttacaaaaatactgccagacggtat

SEQ ID NO: 96194 - DNA, 568 bp, Cannabis sativa
gttcccacttttgccggcgcatataagtgcgccggcaaaagtccccacctacttttgcgcgcacgttttttcactgcgagggaaatttgaccgcctttttttctcgacttttgccgacgtagtttggtgcccgcaaaagaaaataatattaaaaaaataaataaatagttttgtcggcgcatgtgattgccccggcaaaagtggtaactgtacagccaacaattcccaccttttggcggtttggtgccaacgtttgccggcgcaattgttgtatttttccggcaatattggctattgccggcgatattaggcgcccgtaaaaggttgaggtgggcaaaaattgttgacttcctttgtcggggactttgttgacttgcgccagcaaatgtcaactaatgtcggcgcaattacccaatagcgccggcaaaagttggcattcatgtagtgtaaataatatataggaaaggttgtaggaagtttaatgcatgagatttttacgtggttgggacattaatgagtcttagtccacgagtctttgttattcatgagaatatttattacagagaat

SEQ ID NO: 96195 - DNA, 644 bp, Cannabis sativa
gaattggagatcgacacttcctaccatacaacatctaatagagagccatcattgtactctagtaatttttttttttgtatgaaaagtctatcaatggcagatacttgctctaagagccttcaaaatccaccacacgtgctcataaaatgtattccaatatctggattgtcctctcagactaaccatctatctgagggtggaatggcatgctgaactttagcttcgtacccatggccctatggagactttcccaaaacatggaggtgaacttcggatccctatccaaaacaatggattttggagcttcatgaagtcgtacaattttctttacatacaactctgcatactgatctattgaatatattgttttcactggaaaaaagtgtgctgacttagtaaaccaatccccaactacccatatggaatcaaacatacccgtgattctagacaatctaaccacgaaatccatagtgacatcctcccatttctactcaggaagtgttaaaggctacaacaaatctacatggctttgatgttcaaccttaatctattgataagtcgaccttctagacacatattctaccacatcattcttcataccgtagcactaagtaatagaatttcaaatcttgatgcatcttggt

SEQ ID NO: 96196 - DNA, 612 bp, Cannabis sativa
tttttaatcactatttgttttttctttaaaaaaaaatcattatttgtttaattaatatttttaagtggatgaaataaaaatacatatgatcgactaaatattattgattttaaaaagtatacctacatacaaggacgactctggacataggcagattaggctcatgcctaagacccacctagcccagaggccctaaaagaaaatttctctttttaaaattacacatatttttttattgattttgaaaaatatcatatttcttctaaaaaagggccaaaaaactatttttttacttatggcccaaaaattctaagatcggccctgtctacacaattaattaaaaattattaaaggctaaaactcaaactaaaaataatttgatgaaattctaaaaacaaagtacttaaataaataaaaatatcattgttatagtttttttattaaaaaatttgcggcaataatacttgaatctttatggaattatatgtgtgtcgaatgtatatgatatgtgaaacaccctaactagtataggcgtgttaacgtgattttaaacatactgtgcaactcgttgctaatcaacgaggttaatgaaaatcgtaattaattaaaatt

SEQ ID NO: 96197 - DNA, 656 bp, Cannabis sativa
accatgcaattcgaaaataaaaaagaagtaactgttttggttggaccactatataaattttgggtaactagttacttatatagtaaggcatgacaactagactaacacacactacaaaattttttacattcagtcacaataaaatttgtgactaaacataaatcatcttctaattaagctaaaaaaaacaaagtataaatcatctttgtgatatcactaaaaagtttgtaatttaaagaattagtcacaaaaatcataatttgttgtcactaaatgtatttttagccacaacacttgttgtgactaaaactaaattagttacaactgttatcaaaatactactttttaatgtcaagtaatttttgttatgactaaaaatactatttagttacaaaaaatttatgttgtcattaaaaatttatcactgaaggtaatatttttgatagtgaaaactggtaactagttaccccctaagactacttacacttattgttactgggatacttatagtaagtaattggttatccctatgattctaacaagtatcttgatagtacagtaaaatttttatttaagaatactctatttaagaataatttataatttattataaaaaaattcaatttggacccgttataaatagaaataacctttaa

SEQ ID NO: 96198 - DNA, 899 bp, Cannabis sativa
gtgttctatgttatatacaaatagatcttgggttaattgttaatttatttaacatgttagtttactgtgttacttttttttgttttgttttttttttaaaaaaaaaaaaaagaataataggttactttttggttaaaaaatacctactttaagatttaattgaatttaaaattatagaactaagaggacaaaactcttttttttttagaaaaagaaagaccccaaagaaaccattattcaagcaagaagtttttacaaaaggaaatgggacactaattcattgattaaaggtcctcaaacattattgataacttttgacaagacatatttagtaaaagtatgagccacaatattaattgattgaaaaattagcaaaatgaaaaactaacaagctgtgaaatcaattaaaattaggctcaaagaggaggccaaagagacttggttgttaaatgagatagtttcaaaaaaaaaatctcaaaaataacaaaaaaaatgtatttttataatatttttttatgttattttgatgttgttttttctattacttttatgttgtatttttataaaataccataaaaatgtttgaaaaagaaactttgatcataaaagtataaatattttactaaaaatagcaatttatataattttctcttgttaattttcattattattattattattattattattgaattttacttctacttaaaaaataaaaaatgttgttgaataactaagtaatttggaactatactagctagaaataattagaatattgctcatgaagtatatgaaaccatgccaacactttatgtttagttttatagtacccaacaatatatttttttttttgaaaagacccaacaatatattttaattccaagtgatattcaattcaa

SEQ ID NO: 96199 - DNA, 525 bp, Cannabis sativa
caaatccacactcgaaactaggatgatattatgaaaactttatttattttctctcttttctaagctttgaagcttttcttgtattcatccatggtgagtcttatctcaatcccaaaccctcccagagccaaagtgattgagaaacacgaggttgaggaagcatttcccggaaagctatggttatctaacatgtcttctaaataaaatgtcacttttaaggcaacctaaaatgatatcatgaagatttgaacttccaaaaacaacatagaaagaaatgacctaaaaagacttgaacatctgttgtgaaagatttttctatttgtgtaattgctaatcaacttatgttttatttcaaaagctacaagtgataagtagagtaattcgtattacaatgtgagacattttggtcacgacggtcgacaccacagtaaagctggtatcaaatcggtcttgaaacacatttaaacgtgcagcttgatcttgctacatagcttacatttcggtcggaccactaatgctgcattg

SEQ ID NO: 96200 - DNA, 633 bp, Cannabis sativa
agggtccaatctgtaacttttgcaacacacagggtctaaaatgatatttacccaattttttataaaagcattacgttcaagaaaattaacacaaaaaggacttaagttaaaacaggctaggcccattcttaggtccaaccaaaactttgggcccaaaacatgtatggtaatattatacttttgtaaattaagcccatacatacccatttttttaggcccattcggcatctcaatgggtgcaacaatttggtgaaactttttagtttttttactttttttaacaatgtataattgcttcacaaattatataaataaaataaaaactagtatcttttaagtaaattttatttagtgcaatattagatgtcattcttaaagttgtacaaaatttatttaataaaaaggttaattacttgttaaaaaaattaattacaatagtaattattgtatataaggtgtcatcatataaggtgtcatcataatatcatatatgagtgtagatggagtacatcccaatcagattggcacccactctaacctacactctaattaatcatcgtgataatcccatgcaattatgtacgtacaattacaaaccctaacttggcggctactcttcctcaacaacaatcc

SEQ ID NO: 96201 - DNA, 1022 bp, Cannabis sativa
ttataaaaatacacagtaaaaaataccgtctgacaatatttttgtaaaaaaaaatggaaaaagttaatataccatgtaaatttcccaatcacattcgcaattttcctctttgtaaatcataatagctttaatttgagctttttttttcttagttgcgtcgatttataactgatgctacataacatgttttaaattgacacaaatatttaaaatgtcagttttaaatcaacggaagtactattggtctcaaactgacaaataaaattgtgtgctctttttgcatcaattttggcagttgatcgacgcaaaaagactattttatagtgtgtattcaaacagtttttgtatctatgtaaataattttgcaactgtacaataattaattatttattttgaataattaaattggtaattataaacacagaattttaataaatttttttaaagtttgttaaataaataataaaaaagggatttttttaatactatatctaaaattgattttatttgcaaaaataccttcaacaaatttatttgcacaaatactatatatcacgtcagcataaatactgaaattcaaaattataaaatagaaaaaaacttgaaaaattttcacttctagaaattttagtgttttgcaagttttaaaaaaattaaccttttagttgctttttatgtaaataatatatcaattagttactttttattaaaaagaatgtttcaagataattttttctcatacacatttagttacttattttgatcaaatgactttaaaattatgattttattttttaatttttagactatattatttgttattttattatttaggatatcttgaggttactttttttttttctagcaatttaaaagcatattttgagttgtgggaaacagtacatatatttttatcaatgtaaaaatgatgaacaagataaaagtaacaaatccctttcttttatagattattaacaaagaagtaactaaaatattatatttaaataaaataagtataccat

SEQ ID NO: 96202 - DNA, 600 bp, Cannabis sativa
gtattatattaagaaatttacgtaatatacctaaaactagaattcttttacatttttataaactttttttttatttacatttttttgaattttctgttatttttatattgtcataacgtcacactatatttcacaatgtgaaaacgtgtaaacaacgatttgtttagaacaacgtataaacaacggtctgtaaggaaaaaaatgtgtaaaaatatatataaaaaaactcaaaattccttaaaaaaaaatgtaaatttttagttatttttaggtaattacgaaataatctctattatatacatatatatttctatttatatattatctcatattattaataatgtttttttttttgtttttttttttctttttcttcactctttatatcgaccacaacatctctttcatgaaggttctagataaaatagacatcgttgaaagaagagatttagactggatatcattatcagttgttaagaaaattttctttatttattattattctctatctctttatatatatatatataaattttataaatttgtgttataaagtagaaaaattaatttttgtgtgcttatgtttaatttgttgaatga

SEQ ID NO: 96203 - DNA, 521 bp, Cannabis sativa
atttcttattttactaagacagcctcatgttcaaaaaggaaagaatagaggtttttcctaggtaaataagaagaaggaatcataaaatcaaccaacttcacaatatacagaaggctagagcaaccctaaagagcatggaacgatgtctcgtcttcaatcccacaaacaggacaagtaattgtcatggggactttatgagtggcgagattgagagtggtcaggaatcaatctaagcaagcattctaaacaaacactttaactttaggagggatagaaaggctctaaaaatacttccaccaagaggagagacaagaagaggaatcatgttcctactccttttccgaatagtctaataacattctagtaacgactcttcacagtgtacccacttgaagagttatagtgccaaagcaactgatcaacccattattgggaccgaggtaacaataacatctagcgagcttcatccacaagaaataactcatcaataagcttttgtccaaatcaccattagagagttt

SEQ ID NO: 96204 - DNA, 648 bp, Cannabis sativa
ccaagattgagattctaaccctttacgcaaataagttttcttatatttatagtggtagggttcttgcccactgatagggtacatacaaacaatatattgactttgagctcatctgctgaagtccaacccatggggcactgattgtatgctgacgtggaggctatatcttgttgatagttgtcaaatcatgtcctacctttatggataataaagacacattaacgtttgatcgtcaattactatctttctatatatacgctatgctggagggttatattgcttggatgagtcatctgtccaacatccgggagacatgatttcgttaatggatgtcatccattatcgtgattaggcccgttgttgggcttgaagttactgagttataccacttttggaattacatgtgtcaccatccaaaaacacagataacactacccgcaaaaaataataagataatagggtaggatatgggtaaattttttttcatacggtagggtatatgtgtagaaattttttcatagaatcgtagaataaacgtacccaacccatgctctactggttgctatcccaattcaattttatatttaagaatttaaaatctatgaatatttaattttgctgcttaattctcaactcaacaagtataga

SEQ ID NO: 96205 - DNA, 865 bp, Cannabis sativa
tgtagaaaaaagttattacattaaatattattattaattaatcttaattataataataacaatttcataaaaaatatatatagggttgaatatgtacaattctatatattaaatataacataacttttttatgaaattgttattattataaaataatgtaattgatcgatatatatgggaacatttatacttatttctcaattttggtaatgattatcacgtaaataaagtttgaggaatacaaacatataaattttggctaagacatgaattaattatgagactagatttaatttaagatatgtatatacatttaaaaaaaaaatgaaaaaaatatgttatcattagaaaactgaaaaaggattacaatcttctttaaatatagatttcgattttcattgtatttttactgatatcaagaattttgtggctaacttcctaaaagtgaaaatcttttatgtatatatactcataaattagtaaaatatattttttcggtagacataaattgtgtatttggttagatgatactcccctcccttgtttactagtgtatataataactactttcatttttatatataatatataatctcaccatatgtagtacctaattaaccacataataattaaattataatttactagaaataataaaaaaattatataatataatttaaataattaattaaaatttatatatatgtggggttgtgaaggaaggaataggggcctataaagaggggcatgggaagtgctccaaaaagctgaaatttttagtgactttttctttttcttaattgattaattaattaatttttcatttatttatttttaagattaataatattaatttatataaggg

SEQ ID NO: 96206 - DNA, 794 bp, Cannabis sativa
ggatgggtggaatatatatgcatgttagaagagtttgaatatcttaaatattcatccgcagtgaagtaggttctgcaaatacatgtactgcaataggataggtgaataattttatattattaattttattttgttattattttattgttttatgtgtttattggttatttttttttcatatttttaattttcgggaatgtctgattacaaccgttatgctgcaaaatttttactagaattaggataaatttcactaaaatgcataaaattcaataaaatatatatgtgtggtaattaatttaactaattatttactatacatatttaaacaaataacttaataaagttttttttagaagtttcgatagaaattggatgagtgtgaatagattatcagcggagtatagtgaaggtgttgaccatttcttggatttttgtcagaagaatgccaaaaatcctaaattggttctttgtccttgtcttaaatgtggtaacatggagcgtatggatattactaggataaaggagcatttatttaggaacggaatagacaagagttataaggtttgggtttaccacagggaaagaattgagttctgggcaagggaacgtctatgtctaacaaggttaagggtgttaatttagactatgaggatgatcacattccaaaaatgattggagatggaaaatatgaattaaatgctgatcctttgaaatttcaaaattttgtagacgatgccgagaagcctatttaccctaattgtaataggtttactaagttgtcgacacttatt

SEQ ID NO: 96207 - DNA, 834 bp, Cannabis sativa
gaggggggtaaaattgggttttagtaaaatgtatcccactttacaaattatgtctactattgtattaggtgtccaattttattatttattaagtatacaatttcaagtttccctattattacatgttgtgcttgtttaattaattgtttattcaaaacttctaattatctccatataaaagcaagtacagctctatcccactgagtactattttgagaaatagtcaaaggttaatctctaccatcaacaatcatccttaattattaataatgaatgttattccaatttctcaattaagctattaatcccgaaaaaaatgctcaagcagtcaattttttcaatcttcctattacaattaatctaggtgaagcacttggtaattaaatcttttaactaagcaataaatttatgaaggatacaatttatttaatttagataaaacattaaattctatggagataagttgatctaggtaaaaaattaatgaagcatataatcatttaacctaagttctattattcaacacattcaaaaatacttttgacaatattaaaaaattacaattcatcacaaatacttagaatcctagactattaagtgaataataattttaagatgataatagattaaagaaaaacttactttagtgatcatctaaacaaaattaaaataataatcatatcattcaaatagaaaaatagaaacaattaatttaatatcataaaaattaaagaacaacattcatcatagcaattaagaattcatggtttagtgttttgaaataacacttaactaaaaagaaactagagtgatttgcggcataacctccttaag

SEQ ID NO: 96208 - DNA, 638 bp, Cannabis sativa
ggcactactctaatcactaagggtcttattggtttagtattcaaatccaattttatgaatttgaaaacttaaacactgtggggcccatagtaatatctgattggtagcaagtttttgaaaaccaaatccaaatccaactccagatttgggcttgtaaaattaaaaactgtaaaatgacgttttctccgttttcaaattttttctcaaaaacgagaaaacaaaatcaatctcctctaaactgctcccttcccttatatataacatatatattaagatgacatcacattaagaagacatcacatttcccaataacatattttggttttgttatattaatagtttatagatttttcttcaccaattaaatattttttattattttttttattaaaatttaatattacacactatttctcaaaaactaacacaatttttaaattcaattaaatcaatcacatattttaatactgttatatttttagattctataccaatcacagattcaattttttaaaattcaaaaataatttacaaatactgaaccaatcacaatttcaaaaacatgttttcagttacaaaattcagattttcatttcagaatcacggtttttaaaaatactgttttcaaatcaccaacc

SEQ ID NO: 96209 - DNA, 535 bp, Cannabis sativa
ctctaattgtaaaccctagctgcaacattttctttctagctccccatcactcccttcctctctttgctctcttacttgacggcgttgtaagaccacaaaccactgttgccggcgtcgatggtcctatggaccttgaaaccttgttctttgattccaaaaacccaagaacctgaccccctctctccttctcttccattttcccagtgcaatgacaactatatagccgtccacgatcatgggtggtccaacaggaccatgggattttgttccctaggtcccaaaactaaaaatcctaattttttgagagcgagagagaagagctttaatggtggcctaggtcgcgcgagaatgagagagaggagagggtcttagagcaagagagaagagaggaagggaggcggctgcaccgtccactggccttccgcctccatcgagagggaggaacaaagagagaggggggaggcggctgatggaagagatgagcagctaaggttttttttttggttcagctaagaaaaaggagaaagaaaagaaa

SEQ ID NO: 96210 - DNA, 893 bp, Cannabis sativa
tatatataaaaaataaaatattactatacaacctatataaaataccacataaataagtatataaatttagtttttttttttttttaatcatagcttcttagtataacaaatatcaaaattttttttaacattgaaaatcaattagcttaatttaatttatataattataagtatgaaaacaaaattttaaaagaagattaggagggatgatgggcacccaataacccaatgtagttctgcctatggcagcaggcttcggtatttggaggccacttctggctgaagctttagcggttctgtttggtgtttgtcaatgttggcaactaggcaaggctatttcaatttggtggtggaataatcggattgtcaagttctattactatcaacattttggccgattctactcattcttatagcatcttcaataaagtgctaaaaatatagtatattgctaaaatatatattttagcacacttaacaaagactaccactccaaaccaataatgttataaaaagtgttctaaatttggcacttgctaaagattctgccaaattttgtacaaattatagtattgtgtaaaatttaatccacaataaatactatttttttatttactatataattcttttaattatgattaatcgatttatactatactatacattctttattgatcatattgctattatttaaataataaaaagtaaaaattaataattttttgtatattctcttttcttgactttgggggagaggggatttaaaacttatctttgtgaaaggaagtgtgaaactgttaggctatgtctaaaattataattttttttttttgtatattctcactaaaaatattaaatgaccatcaatataattaattattttttttatttta

SEQ ID NO: 96211 - DNA, 733 bp, Cannabis sativa
acagcaaatggacaagccattttatttcaacagcaatattggctaaacttcaaaactcactctcagtactcgatctagcaacaacatgctgctttttggctgaccaggagacaaggttccctcgaagaaaaacaacataatcacttgttgatttcccagtcatcaacagcactggcccaatctgtatcagagtaggcacaaatgtccattgaagctgttggtctaagtagcaatccatctgcaattgtccctttaaggtatcttagtattctcttacatgcttcgcaatgagtaacagtgggagcaagaataaattgactgagtttgttgatgatgaaagcaacatcgggtcgagttaaagtgagatattgaagtgcaccaagagtacttcgataaagagtagggtcccggaatggttcaacatcagttagggacagcttttggtgagaacttgtagggttgggataacttttgactccatcaagttgtaatcgagtgagtaaatcagtaatgtatttactttgagagagatacatacctccagaatctctatagatttctatgccaagaaaataatgaatagataccgaatcttttaatgcagaggaattgttaagattagcaaccaattttgagataagagcagaatttggtccagttactagtatgtcacaacatagactagtaagatgatccaaattcgaatctgaaccatagataaaaaaagaggtgt

SEQ ID NO: 96212 - DNA, 1002 bp, Cannabis sativa
ttgaacatgaggcagagaagatggctgtaattggttaaggactacgattgtgagattttatatcaccccgggaaggccaatgttgtgactgatgctctgagtagataaagggtttcgggcaagtttgtactactgttctgttagccccttaactagcctttgaaatggttagtgcatggattgagttcgtagttgggaaattgcataatttgacactccaatctgatctgttggagagaatcagaaaggcacaactggaagatcccgaactagttaaagttcgaaacgaagtaatggctggtcggcctaaaggctttttcagtctcaaacagtggaatgttgttatacaaagctcgggtttgtgcttctaatgatgaagagattaagaaggaggtacttgatgaagctcataccacacctatttcgtgcatccgggaaccactaaaatgtatcaggatttaaaaccctatttttggtggtatgggataaaaagagaagtggtggattatgtgcccaagtgtttaacctgccagcaagtcaaggctgaacatcagggaccggcagggtttttgcaacctttagttcttcctgagtggaagtgggaggacattgcaatggattttgtaactggattacctagaactatgggaatgtatgatttagtatgggttatagtggatagattcacaaaaatcagctcactttctaccagtgagaattacatattcagtggatcagtacgctgaattgtatgtgaaggacatagttcgtctccatggagtctctaaatccatggtgtcagatagggatccaaagtttgtagcagaattttgggtgagtcttcagaaggctatgagtatcaagttaaaatttagcacagcctttcaccctcagactgatggtcagtcggaaagagcaattcagatattgggaaaacttactgcgagcctgtgtcatggactttgagagttcctggagtaagtacttgcctttaattgagtt

SEQ ID NO: 96213 - DNA, 1344 bp, Cannabis sativa
ggtcgggcctaacccggcccgattatctcgggtcgggcttgacccgctaggcctacaggataagtcgggccagaccgggtcgggccaaagtaatattgggtcgggccaaagtaatattgggtcgggccggatttgtggcgggtcggcccgcccgacccgattgacattcctactgaaacttctttgaattttgctctccaatctctcgaagctttctgccattaaaatcttcatagtaagaactcgtgctactagatccaggaacgttggtcgcactactcagttgcacacttcctcatcacttctagattttccttcgatgattcctccaactaccacagtcatcggagatcttgcaccacaaagcaatcctgctcccattcctcaagctcatgaagatggatcgagttcatatttcttgggttcaagtgataatcccggcctaatcttggtcacaccaccactttcggatataaaatttcagccatgccgttgtgactttgaactttctgctggtgctagaaataagacaatctttctcaaaggcacacttcctcaacctccagctattgatcctctccataaccatcagctccaatgccagcaccaccagatggtgatatcttggtgtttacgccaaaagtagccctggtgacatggacattaatattagacgcatggcaagaaaaaaaaatcctagagttgagtagtctcggatcatagcaattcgacctgggagagtccctagccctgcgcccaagttgactttaggaactccaaaataggtgtttggatcctgtgaagttgtttccaactcactacctttcagtattttgtatcatgaagacatgaaacatccaagtccaaggtttgggagctgaaaacatacgaaacaacacctcaaaaattaactcgagcacctagggtttcacccagcacacaagttgaccatccaatttgggtatcaatttttaggaccgtcttaggacaaatgggtcaaactttaataccacgaacatatttgaagcattagaattagatttggagaactttcatttttgagcacccggtgcccaggttgacaatttgtcacctgggaaacttctaagcatccaactgaaaatctgactcgagcatctttttcgtcttaataaaaaataaggaagcaagtgttttggtggaaacagaccaacctagaggccaaaataagggaccaaggcctaggttgacacctggtgatggcctagtgcccaggttgacattttgtcaagttgggccaattccaatgagtttttccaaaaattcttctaggcacattccatgttttcatcaaagattaagatt

SEQ ID NO: 96214 - DNA, 754 bp, Cannabis sativa
ttttcttaagactcacccattctccttggtaaaaggagaaatccaacgaaacaaatcttttattttcaaattggttgatagtccttaagaccttatttcatggcatactattattagcaaaatttaatactaaattttacatattttaattttaattataccaataataatatgtagatatgttaagatataaattgagaactatcttttttttttattacacattaaccaactataactgtaaatagctttaattgataaatatctttttcttttttataattagtaccatatttaacctcgcataacttattaaaattagagttcttaacgcacacaatgagaatatgacctataaaactaaatataaattaaagagtaatagaaaaaagataaaaattaaaattaaaataaaaaataaaaaataagtatagagtataatttcatctatattaagctccatgtcaatctcctttagatttggagttggtgtgaaatatatatttccatttttcataactggatttttcataattagaaggttgctcaaaagagttatgggctccttgggcttgggcttgggcttgggcttgggttttatgtttattttataaatcaatacttgggctatgcaggattcaaacaagggctattttaaaaaatatgggaaaaattattaaggttatgataaatatggcataaaaagtaaatgccactaaatatagtattatctaaccaattaaattaaaaatat

SEQ ID NO: 96215 - DNA, 1096 bp, Cannabis sativa
taagccagtcgtttattaccattgtcattataattatctctctcttttttttcttttctatatatatttagtccttttcctctttctaagacaatttatattttttcttaaggggagacacttaaggcccgtcaccaggcccttatcttttttagagcatttctttggggtttgaacactttacatttatgcttgaatacatattctgctttttaactttaaaatttttgtctattttacatctgtccgtgtggtatgccttactacccccctgtgacatgaaaattggttttaggtcactcaaatttacaaattttaatttagaggttgcatatacttgtccggtacaaatttacttttcagagcataaacttttattcttttgattattggtaatactttcgaaggtgatcagtattccaggccctaggcaccatgcttccgtccattctttttagcttgtaggtcccagagccaatttcatcctcaatttcatacggtccttcccaattaggctcaagcacccccactctgggttcttgagtagcaaggaagacccttcttaagactagatcaccaatactaaattttctatttttgaccttcgagttgaagtgtttggccaccttcttatggtaagctgccattcgtatttgagactcatcccggagttcttcaatttgatccagcgcttcttgtaataaagccttgtttgttgctggatcgtaaatcgttctcttgtgggatgggaataacatttccaccgggaccattgcctcacaatcgtatgccattgagaatggggagtggccggttgtgattcttggtgtggtccggtaggcccataacactcttggcaattcttcaggtcaattgtttttgtaggccagcagctttttctttagggtgacctttagaattttattgacggattctgcttgtccatttgtttgttgccttgctagcacggagaagcttttcatgactccgtgttggttgcagaagtcggtaaattcttcgcagtcaaactgcttcccgttgtctgagactatcttgtgaggcaagccatattgacacactatgtttttataacaaa

SEQ ID NO: 96216 - DNA, 558 bp, Cannabis sativa
ggtgttgagaaaaaagggcagtgatcactttcatgaatagcaaacactttggatggtggccattgctttatcattttctcttgattctcttgcttgaataggttatctttcattgtccttataaacactcttggcactgagtttacatcacaactcccctcttgggttacgtccatgtaagcccttgctggtgatggcctcagcaacattgatgccagtgtgaaatcctatatcatgaatatcaatgaatgatatcagtcatatacaacatacttggaaattaaagctagccatccaaataattaaagtgattaaccaatcaccaatgcccttcaacaaacagaattagtaacagagaatttttttttaacttattaattaacacctaccaaacatttctgaattctgatcatgtttttcctatttgaatatccttaatatatatcatcacctaacctaattaattaactatacctaattgtttagtaagcattcattggtaatacctattaagaagtattatatataggaacacttcttaatgggtattacccatga

SEQ ID NO: 96217 - DNA, 573 bp, Cannabis sativa
aaaccgaaactccttctccttagccccctgttgtaacaaacgagttagatactccataaccaacacaaacaacatcggggagataaggtccccttgtctaagacccttagctcccttaaaccctttttgtaatcaaccattcatcataagcacataggaagtctcccttaaataaactataatccagtgaatgaacctaataggaaatctgtaacttttcaataattattccaagaaatcccaatctaccgtatcgtaggctttactcaagtcaattttcagtgcaaaacttagagaagcatttttcctactataattcttaatcaaatcctaaaaaataaggatattatgagctagagatctacctttaacaaacgctcactggtttcggccaatcaacaaaggaagcacttcagatagatgcatgcagagtagtgcagtaggcaattggcctgtaatccgccgctttacaaggcacttcatttaaatcttttggcatcctcctagtttcaaagaattcaagaatagactcagttatctcatccacgattaatttccacatggctttaaaaa

SEQ ID NO: 96218 - DNA, 631 bp, Cannabis sativa
caccagctgcaaatcaccttcctttctttgttgcaaatgtatatacatactcttcactgaaaaattcctcgagctctcaaaagaccacaaccaaacatcgtcaatacgacttgaatttaagggaatacttaaaatgagttgagtatccctagtattaaacaaatcacgcaccaagtcaacatcccaggccaaactatcagtgaccataagagcaacaacattttgatttaaaagggcaggatgattcgaactgattatcggattctcatcacatagtagccaagggtccgaaataatactaattgcagaaccatttccaactcgccgacatgcccccatccgcaccggctcctttgtttcaaaaatacttcgccaaaagaaactgggattacttcccaattctacattcaaaaaatcctttcccacataatatctaaccttaaacattcgaccaacaagcgtgtgaggcctacagagcaacctcactccttgcttactcaataaagagagataaaaatcatgaagatttttaaatcccaaccctccttttgatttatgaaccgttaatttatcccaactctttcaatgaatccccttattattcttagaagaggactttcaccaatattta

SEQ ID NO: 96219 - DNA, 690 bp, Cannabis sativa
ttttttgatgtattattatgttatactcttgttattttgttgttgattttttgtttttttttttacatttttagttgacgttgttttcgtgttgtttttatatgggtttcttgttgtttttgtgttatttttataaatactataaaaatgtaaaaaaaaacgaaaaaaatctttaagcgtaaaagtgtaaaattttgataaaaaaaaagtaatttatgtaaatttttcaaaatattatcgagggttaatactattttcaactttgtattttgtaaaaattactcattggactatctattttgccaaatgataaaataaacctatattttataaatagtacaaataggaccctgagctcaatttacgataatattttttgatacaaccaacttgaagacaatttctagcacgaacagatgtagaaaacataaccacttttgtcataatacctttatatcgaattagtattaagttttatttaaaaaaaaaaaattagttcaagacaatatttagtaatatttagaaaattccagattcaatttgtcatttaataaaacagagagtacagagagtttaatcaataatttttgtaaaataggatcaaaaatagtatttaccctattatctcctatcttttctaagtttaatttctaccatctcttttttctttctccaaatctaaacaattaa

SEQ ID NO: 96220 - DNA, 829 bp, Cannabis sativa
ttttacatgttagacattatttttttctctcttgtcactcaaatactcttttttttgttctacaattttactacatatgttctcccattccactctattttttatttgtgaaattattttttttagttcataaatttacaattcactatgggttttttttttaaaaaaaaaaaatgaaaagtaccaagactgtggctatttctagagcttctttatcctttcttctaatcctagatcctagaaatgttactaaaaaaattaagaaaatccaaaatgcaaactaaaataggtaaaaatgttattgcaatggaggatgactatgtttctcaacctattgccatggaggatgaccatgtttttattcaaaaaacttcaaagaaaaggtcattgccatataaggttgaaaataaaaaagcaaaaataaataaataaataaaataaaaacaatgcaaatactagtgtaagtaatgtcatgtataaatgctctacttttatgttttatttataattttacgacctaaagtttttatttacaaaagtacgcttttaaaattacaaaatactctttttctcaacaaaaagtaagaaaacaactaaaaacaacgtgaaatcaacatcatgacaactaacaatcataaagaaactacaaaagaaccaaaaaaaaaaaaaacaacaacaacattgtggcagctacaatacaactttaaataaactataaaacaaaaaaaaaatttattatttttaccaaagtatgtatttttgtaaataaaaaaaattcaaaacataaaaataaaaaaaaatattcgtgttaacatatttttgtaatttt

SEQ ID NO: 96221 - DNA, 565 bp, Cannabis sativa
tacaattcttcacacaatttgcagtctgcacactagcccggacacataccattgtgtcgtcggcgaacatgaggtgggaaataggggtaacacccctggctattgagatgcctttaatatctcctttatcctcggccctaagaagaaggcgggataacacatcatgacacaagaggaaaagaaagggagagatgggatctccttggcgaagccccctcgaaggcctacacttcttaagaggctttccgtttagaagaaccgcataagaaacacttgtgacacatatcataatcctcttgacagactcctccgagaaaccatgggcatttaggaccacccgaagaaagttccactccatacggtcataggctttgtgcatatccatcttaatagccatcaagccccctttgcttttatttctcctcaccgtgccaataacttcctggcccagcagcgaagagtcggctatccaacggcccggaatgaaggccgcttgataaggggatataagcctatccagaatacctttgattctttgagagagaatacgagaaataatcttgta

SEQ ID NO: 96222 - DNA, 631 bp, Cannabis sativa
gtacaaagctcttattgcatccatctgaaaccaacaattgaattatatgagatagttcattagatatattgattgttgtgatcgatcactatatgacaacaaattacaatgtaaaagttagtgggaaaaagttttcaagtaatataattaagaattctgagagagatagagaaagagaccctcaaagaaagttagagtgggctaatatgcatgctacttgaaagagaacccatattatgaagtttaatatacatacacgtgacttttagctttagagtgaaaagtcatcaattcactttgacaatttaataatctaatgaatgtggattgttaatatatatggataatgtagtaattttgattgcataatttagtttctaaaaataacttgtaattttgcacttgttattagttggaatcatcattctatattattaaaaaaaaacataaatacaaattaataaaataaataaatatcttgttgacctactatacaagttattaaattgacacatcatcactttttttaatacctatgaatgggtaatatccaaagaagtactccatatatatatatatgggtgactattcaatagttacatttttattgtaaccatatagttacattttt

SEQ ID NO: 96223 - DNA, 996 bp, Cannabis sativa
ttggggtcgagatcggggtttgggttcgagtccaagtcttggtccgaggtctggattcgggtttaggttagggtccgagttcggggtccaagttcgagttcggggtctggttcggggtaggatgagttcatgtcatggtgtaaaatatttatttttttttagtgaaaaaatctaaaaatagttttaaaaaatctaagccaaacactattaaatttttaaatgacaaaaaactattttccgttctcacttttaaaaacataattctaaaaattaaaaagtgaatatacaaccaaacataaattaagcttgctcattttagtgagggcttgaaagtttaaattcccattataatttttgtttgttttattttgcagatctaaagttatgattgacgtggtcaaggccactagttagaggtacacaatctcttttttattatgtataataacctatatatgtgcacaaaacttttaattatatatacatcaaacattttttaataagtattatctattgatgttactaaaaaaaaataactataaatatcaatatttaagaagctatcaatatttaagagtgtttcttattttatgtattttaagaaattatatctttatatatagtttttgaaatttttttttaaataatttacgatattaaaaataaaattttaaaattcaaaatagtcagttatactgtgattaaataaaatatgcacgaatattaaataagatgtcttgtataactataacgcacactattatacaaaaaaatatttatttataatagcaaaaataataacaagaattttctatatatttattaaatctttataaataatataaataaataatttgtaactactacattcaattctcataaaaaaaaaatgaatgaaaaaacttacttattatatacaagttttcactaatgaatatagtgtatattaaaaatataattaaattattacttaagtatatattgcagtacaattgt

SEQ ID NO: 96224 - DNA, 568 bp, Cannabis sativa
atatatagcactttatgaaatactcttaataattaaatattagtttatgaagatagtttacataataaaaaattaattgttatattaaaaaaaattagattgatagtgtcaaactttaattaatatttaaatttttataaaagaaaaaagccttatttttaaatttgcttaaggctctcaacacctaattaatgggtgtattttaatatgaaatctaaaatattttaatttaataaataatataagaaaaataacctcttaaaatatcaaacaagcaatgctcatacaaatatattgcttgtcttctcaaatattgtatatatattgggtgaagcttattgcaccaccaatcaatctaaaatattgatatattataaatatatagtatatgagtaattagataaaaggtgatcaaaattagaagaaatgaattatattattaatgtcttcgacaaacattaatccgtaatacaacttattaattattattcattgatcgaacagtacatataaaaatataaacaatgaattggttgtatgttgatagttaaaaataataagtgaaatt

SEQ ID NO: 96225 - DNA, 586 bp, Cannabis sativa
  modified_base (240)..(242): a, c, t, g, unknown or other
  modified_base (560)..(561): a, c, t, g, unknown or other
tagtttaaacttgtttatctgagttgaatgaagttggttgtgatgcatgcttgtggtgtttattcaaagttttggattttagctcaaaaactatgatttttgatagagtgtggaaatagttggtgtgattgttaatggtgcttgagtttgttttctgaggttattacatggttttttatggtgaattaaggcaggtttgatgcatgttagttagatttaaccaagcttgagttttgaacnnnaagcttggagctttaatggcatttttcatatctgtggtttctggatggtttttatgctttagaattattctttggggtatttagaacaggtctggaaggtttaatatgatttggggttgattggaatgagttatgaatttttgattgattcctgtgaggaaccagaattccggatgtgtaaccggaattccggatggggttcaggcattccgagaaccgaaattcttgttgcggaaccgatctatcggttggtggatttttaggagccctagttttcttgtttttatgtggtttagggtattgccatactttttatcnntagggaaacttttagtttctagttt

SEQ ID NO: 96226 - DNA, 1320 bp, Cannabis sativa
acacacattttttttaaaaaaatatataaaatatacacaatcttacacaaatacaaattaatacactaatttaatttttttttttaaaaaacaacaaaattatttttgtagataacatttataacatttataagtttatcaaagtgattccacaaaattattttgaaatttaaatgctataattatagtttttaaggataatgtttagagtaatttacgacataaatacttaagtttaattctcaattgtaaataaatatctaaatttaatttttagcggtaataatacctaagttataattctggaacttatgtaggtatctaactgttaagtgttaagtaaaatgccatgtgacaatccctgattggtccaagtaattaaatctttattttaaaaaataatttaaatataccaataagaaaataacacttaacctaatatttaacaatcaggtacctacagagtttcaaaaatataacttaggtattattaccgtcaaaaattaatttaagtatttatttacaatcgaaagttaaactaagtatttataccgcaaattactctaatatttatattcatttgtgtgcggaaagtagattcaaaacgtttgacaaaaaaattagtttaaattagtggcagagccaacatttatgttagtagggtaaacaaatattaattttattggataaaaaattataaaatgaaattaaaaaaatgtaaagacgtgaatgaaaaatataaattttatacacatgaaaaaattgtgaaaataaaaataaaaagcataaattttataaggacaaaaatactaaaaattaattttatggaggtatatttgaaaatattaaaaaaaaaattatatataaaaaggtaatttactaaaacttgagtggggtcatgtgtcctcagaggactccatgtggctttgccactgtttcaaataggagttacaaaatttaaaatattttgacctagaagcaccaagtgacatttttcctggtgttaagggaatgaatctattatcttaaaaatcaccctggtgacgtggtatggaatggtgtgacatgtgtcaagtatcaaagatacttgacagaggtcagacaatcaagaagactgcccaaaagatgttgggcagggtatatgccaaacgaagtcgtccaaaattaaacatattcttgacggggcatgctaaccaacattctaaacaaccaagaaggcacttcccgtatgaatatccgaccaacaacctcacgagagaaatgtccaaattcattctaattgcccaatctctgcataataggttaatcaaaatgcctaaa

SEQ ID NO: 96227 - DNA, 528 bp, Cannabis sativa
ttcgaaacgggatattggggaaagattgttgactaatatgtttgggagaatgtggaaagggattaaggattggaacgttaaggtgtatgaggaggatggggataaccatattgtgggtttttcttttaaatcacaacaggatgcatccatggtgttgtccaagcaaccatggtatttaattttaatggaggtttattgttattggaagcttggccggatactggacagtggaaggattttaaattgaacaaaatctcttgttggattaagatgagaggagtgccactcaagatgttcacacaaaggaatgtccggcgtatattggagagatggcaggggtgatcgaggaattgaaatggcataatgatcggaggatgtttctcaatgggtatgtccgaatgcggattggttttcctctgaacaagagcttgttcgttggtcgttttgttccaagtgatgggaaatgttattggattcaattaaagtttgaaagattatcaatgctatgttacaattgtggacggtggg

SEQ ID NO: 96228 - DNA, 1063 bp, Cannabis sativa
tacaacaactctttctcttattatatttcctctctctttcatcttcatctctttcttctctttgttctctttttttacttctctgtatcaatggctagaaggggaaacaacatcaacatggtatcagagccttggccaccattggtggcgaacatggctaacatcggatcaaccaactcaagttccactcatcctgctgctcctccaggtttctctgctacagatcgaaacagagccaaaaatgatgaacactaacctgttcatttcaatcttactctatcaatcagattgaacgatcacaattttctattgtggaagcagcaagtgttggctgccattcgaggaaacagacttttgaaattcatacaagattcagccccactgcctcagtacctaaatgatggtgatcaagctgctcatgtccagaatcctgagtttgtggaatgggaggttcaagatcaattgcttgtttcttggcttctctcctccatgactgagagtttattgactcgaatggtagggtgcaatactgcaagacaaatatggagttctctggagaaacacttcaccttgtaggtttcatcgaaaatcctagagtttagaactaagcttcaaaacttaaagaaaggctctcaatctctcaatgattatctcctcgaagttaaacatcatgttgatcttcttgcttcagttggggaggttctttcagctcgagatcacatagctgcaatcttcaagggattgccaagtgagtatgatactttcataatctcctcgaatactagagttgagggatattcagttgcagagattgaagccttgcttcttgcctctgagtcaagaattgagaaaactgatcaagaagtagatctaagtgcaaatcttgctgctgccaacatgggaacagatctggaaaatcaattgtcctatgaagcttatcttacacactataatcgcaatttcagaggctcaaatgtctctagaggtcagtttccctctaattcctctcaatatcctgcaaataattttcctagctactactataccagaggaactaatccta

SEQ ID NO: 96229 - DNA, 3543 bp, Cannabis sativa
cgaaactatactcgtatttctaagtaaattttttttattataacacgtctaattgatttttttaaaactaattatattgtatcaaattaaaaaattgtatcaattaaatccaattatatacccaatctaaatgtgacgtttgataaatgattagtagtttattcacattttttgttttgtcttttattgagttattgtgatttatttacttgttttggagatagataggtggaatatttttttttttttaacaaatgcgcgagtgagaaaaggaaaagtgaaaatgaggaaagagtaaaataaaagtggtgtcagtacagtaagtttttaatagaaagtgtgtacagactaaatggtaaaagacaaaaaatttgtgaaaaaagtttaatctatctcccattttttagtataaataatagagcaagattaggcttaaaatggtgtttattaaatattaatcaaagattattaattaattaattgtgtataataattcataaataataaatgaaaatgttttatactaatataattaaatattttagtgagatataatttataaaaaataggccaataataataaatatataagatatataggtacgtgagagagagtcagtgcagcaactgaggacaagcgtctgagtcgcttccgctgtctcgtcttcttcctttcttcaccaagttctagggtttctcttctcccaaatttaggtattttgatttgaaaactttatctatatcacccatgcattctgtctatcttcttcttttagaaatcaataaatatatgtatataaatttatatatacgaagcttttactattatatattatatttattaggttcctacatttttgatttattcttcagatatttcttcttttgagttttgaaagacaactcccatggccaaaactagaccaggcaaaaaggacctggactcctataccatcaaaggaaccaacaaggtcgtcagaggttcagtactcttctctctctctccttctctgtttatgaggataaagtttttatttattatttttctgtctcggcagctggtgattgtgtgttgatgcgcccatctgataccggtaaacccccgtacgtggcgtgcgttgagaagatcgagacggataaccggaacaacgtgaaagttcgggtgaggtggtactatagaccggaggagtcaatcgggggacggaggcagtttcatggagctaaggagctattcttatctgatcactatgatgttcagagtggccacactattgaagggaaatgtactgttcactcttttaaaaactacacaaagctcgaaaatgtaactcctgaggattattactgtcgatttgagtacaaagctgctactggggggttcacacccgatcgagttgctgtgtgagaattgatttgttttatttttaattgccttttgtttacttttcttccgagatttagacagatttttttcaattgttttttgttttgggtgatgatgctgatgggtttctaactctttgtattattttgaatttgaatttgggtattgaagttactgcaaatgtgagatgccatacaaccctgacgacctcatggtgcaatgtgaagggtgcaaggactggtaagttcagtgtttattttctttgaattggaaattgtttaataaattagcattggacaaggaatagattgtaatttattttcggcattaaagatatcattgagtataaatgaatgccaactgagggatccaacagagaaaaacaaaagactaagaaagatgggggattcaaggggtgtagtaggacttttctttcttctatgcttccaactctggcttccaaattccaaaggattttattattttttataagttcctatagtccacttgaaagatcacatagattaaactaacttatctgttttttttttttttttcagtatacacacattatccactgggtatttgcatagtacttttgagatagttaattgtattgctctgagatagttaaatgtattgctccctgtttttcagtgctgtgggttatagtttctgaattttacaagttccaaaaatgattttttcatgtatattttaaatttatgcccactactttaatttatttttaattatagatatagatttttctttggttgttcttataatgaatactggattaagtgaaaaggagaatagaattccttaatattgaagtcagtttctcctttaaattctgtggcatgaaccaagagttcacctattattgtattttaggtaccatcctgcttgtgtggacatgactattgaagaggcaaaaaacttggagcagtttgtgtgttccgaatgctcatccgatgatgatgttaagaagtcgcagaatgcattcacagcatcaccaggagttgatgccaaggtgtgaatatcaactctttaatttagaatacattttagttgcaagtacccatcatattcaatgcacttaaaattaggctgattttgtttgccagataaagtgtgatatttcttacagtttgttctgtaagtgcatcatatctgtaaataggacaatgcagagaatggtagcttcagattttatgctgataacttgtgaattatccaaaaatgagggaatctaatatacccaatcggtcaagacgtgaaaaatgatattatgcttctgaaatgcagtccgagctaaaattcttgatgcgtatataaagtgagggattacaaagtgaattctgtactctgctaggtagattgagaaatggtttcttagctatatttgttaaggtgaatatttctgataagaataacgttcagatccttactaacagttgtggtgtacttgttaaaaaaaaaaatccaaaatcctgacatttaacatgtacaaacaagtgattaccttctgattttaggctactgtttgtttttcttactattgatattggtataaaagaatgtttgtttggcagtttgtacgactgttttgcgatcaaccttgataaactgccataactagagcttaaagccatgataataatgatattgaggatgaatcactgctgcacctaatatatttaggtgtctcaaaaagatacacttttgtgatatgatgggcgaaataggtgattgtgaacagaattcagatataaaatatagttggtaaacagaacatgggatatgttaaatatttggttgtttatatcattattatatgcctttgcagatggttagtgattaaaaggtaaaatctcttttgcaggtggagcccaagagacgaaagagatgactgcctttgaagatagcgtggtttgagtatggtcaaacaaacaaatcatccttaagcttcatcccccttttgattgtcattatgagtgttgtacagctcccggattttatggcaaaatgtggttaatttgactacagggttggaaatgatcaagtttagtttataaagaattccttttagagttaggagatcgttctgtacctttaacagtagaagagtgggtttaacatgtgatctttgtggt

SEQ ID NO: 96230 - DNA, 899 bp, Cannabis sativa
ctgatcccaattcgaacatggcattcgctatacaaggagacaaaggtaacaacagcaagaataatgctcaaggaaacaagcctaatccccctaaaagaaaccgacccttctgcactaattgtaacattcttggacacactgtcgagaagtgttacaaaatccatgggtatcctcctggttttcacaagaatgacaaaggaaaagaggcatcagctaatcaagttcttgctactggcgattctgcaaatggaaatgaaggacaagccatattgccacaactgacagcagctcaagaccagcaattattgaatcttttggctggacagcaatcgaataactctaatgctgaagttggcaacaacacaggtaacccaggtatagtgctctcgagtatgtccaattcccatctaagtggttcttggatactcgattctggggctactcggcatatatgttatgataattttttttttcaaagtatatgctatgttggtccaactagattaatcctacctaataatgaagatcttactgttagtcatagtggcactattgttctttccaataatctagtcttgagtaatgttctttatgtttccaattttagatataacataatatctgtgagctgtcttactaatgacagtaaccttgatataaatttctctcctaaccattttgttatacaggatcttgcaaacaagaagaagattggtagaggtaaatccaacaaagagctatacattttggattctcaacctcatgcatctcctattcttgctgtcaaagccgatatctggcactcaaggcttggacatccctcaaataaatgtttgagactcttagatagtaaaataaactgtaatacttcaaatttgcataaagacactccttgttac

SEQ ID NO: 96231 - DNA, 513 bp, Cannabis sativa
agtcttaacttttttacaagatatatattttgtagtgaatgggatagcttatgttatcacttcgatctatcataatttattttatttaaatacaatgtacgcaatattttgaaagttcagtcaaatttaatctaaaaattaattaataatgagtgaagtacatatacatgatcttatataattgatattgatattatattcttacatactattaatatataagaatctaatattttgtatcaagatggtgataatttttgtttaccaatcttgaacggttcgatcacaagtaatttttttggccttactttttagattgggatagagttctctttagctcttgatatcatgcatgttacaatgcatggtttagaaaataaggtattgatgtgtattttaagaagtgcgaggtttaatctcaaaaccaaattaaatatatcaccctacattctaaaccgtacaatctaaattctttttaaaaataaaaaactcaaaactaaattggtaatcaat

SEQ ID NO: 96232 - DNA, 728 bp, Cannabis sativa
  modified_base (264)..(264): a, c, t, g, unknown or other
tttcaaccaaccttacacattccagttaaatattttgtaaaaatttaaatatgtatatatcattgctcaaataaaaatgcttgccacttcaaaaataaataaataaattctaggtaaatatcattttgtatcttatattttgtaaaagttaataattgaaccatctattttgttaaataataaaataaaccctgcatttcctaaaatggtaaaaataagatcctgagtttaatttttgacaatttttttttaatataaccaacntgaagacaattcctaacacgaatagatacagaaaatataaacagttttgttaaaacacttttagatcggattattaaattttatattgataaaacatcagttcatggtcctatttatactattttagaaaatacaaattcattatgtcatttaataaaataaaagattcaattagtaaattttataaaatacagaatccaaaatagtacttacccataaattttttacttaaaaaaaattatagaaagggaaccttgtctcttgtgtgtgtttacctaggaatcttgatcatgtgtatagatttttgataaaattttgtgtggaattattataaattagaaaaatacttataaaagtttctactcgaagtagataagggcaagtagtgagtagtgttgtaagtgtttgcctaaattcaaataaaaacaaagtaaaaacagttgatatcctttgtttttagataa

SEQ ID NO: 96233 - DNA, 983 bp, Cannabis sativa
taactactattgtttttcaattttgaaaacaaaaaataaaaatttattctgtaaattattagaaatttatatctataaaatgaaacatatataattattgtattaaatacgtaattaatggcaagatttttaagaaaatcaactcaactgtgattacactggtgcctaaggtaaaatgtcttaatattattaaagattttagacctattgcaactttgttgcaatgtcatttataagattgcaactaagcttttgagttctagaatcaaattagttttacctgatattatctctcattcacaaggagacttcatcaaaggcagatttattgggcacaacattatgatctgtcaagatttgatcaagcattatggtaggaaatccaacaaaccagggtgtgtgattaagttggatattcaaaaggcatatgatacaatggagtggcaatgagatgctttatggacttcagtttctaattccatttgtcaaactgatcatgcaatgtatctcaacacctaggttctctctgatgttcaatggaactctccatggtttctttgaatctaagagaggcttaagacaaggggatcctatatctccattactatttgtaataggaatggagtatctatctaaactgctggggaaagttgtggacaaggatgacttttgttttcatgatagatgtttagagctcaagttgaaccaccttgcttttgcagatgatgtaatattattcagcaaaggggatgagagaagtgtcaggtacttgctacaagctctgaaactcttttctgtcacctcaggattacaaccaagtcccacaaaaactgcaatatattgcagtaacatggagcaagctatagttgagaggctgctaaaactttctggtttttgaagacagaatttgccttttacttacttgggaatacctatcaatgcaaagtgaatatcaggaagagaatgtgagatactgatagaga

SEQ ID NO: 96234 - DNA, 1130 bp, Cannabis sativa
  modified_base (27)..(29): a, c, t, g, unknown or other
  modified_base (731)..(731): a, c, t, g, unknown or other
actaatcagattgtaaagagttttatnnngggcataaaacccaacaatgagttctttgaattgttcgttaacggcttacctatagcccatatttacatcttagaaatttggtagtgtaattgagtgggagtattaatcatagatataaaatttatagcttctatgtagtgaagcaatgatttcctttgagctttgctaaaagcgataaatgatagggcgctcatttcagtaagtatattagttttctaaaatattatttacaagtagctaagtattttaaggataaaatgataaatttgtccctactcaatgtaaactatctatagaggatcaaagactatttagattgaaacaatggataattcataacgtatctatatttggtatatagagcattctatataattaagagtgcaatttcaaatctatagtggagttaggatgaattaataagctaagaaatttacttagtaaatttaaattctacttaataggagcttagttatataagcccatggtcctcacattatttaagataatgtcatcttgtagactcaattaattgatttataaaatcaattgaaatttaaaaataaactatgtcttatttgagaattttactaagtttgggccattttgagaaaaaaataaaaataaaattttatttgttaattagtacactttgtgagtctaatatatttaatttgtaattttatttgataattatttanaattattaaattaaaattaatatttaaataattagatgagataattagtaaaattagaatagacacattatttcacttaattgaaataaagtggtaaaaatctaactctatggcccataaggattttagagcccaattgtttttaatttagcccatctcatctaatgataaccttaagagcatctccaatggagagctataaatagtgtatttctattttttggaatattttgctaaaacttaacaccaatggtgatgtaaaatgtgtgccccatgtttggcacaaaagatagcatgggccaaattttagcccacaataaatactaccttttctaattacctcttttgtcacttattaatactattcattgactttgaataagatatatttataagata

SEQ ID NO: 96235 - DNA, 754 bp, Cannabis sativa
aataataataataataaaacacataaaaaaaatagctattaaatagatcaaacaatatttaatatttttttattctctcaattttgtaaatagttactaaagtaaatataaaattgtgataggaaaagatggaagtgtcttttcatattttaataacatatattattaaaataaaaagtaaaaatattaagtaaagtgataatagtatacagactagtaggtagtatgtacaaaaaaaataataatgttagtaagttttccacgtgtcttctttacagctatagatttgtgtgagagaacttatcttattttttttctgacttgcgtgcgtcaggataatccttttcacgcgcctgtttagtcttagtttcactttactttgtaactccaaaatatttttgtaaataaagaactttaaaaatagtactcttgtaaatattagatagtataaatgtttattttcccatataatagtataaatgttagttttgaatgattttagcccaaaatagaaaaaatccctatttagtatccattgtgtttgtggctgcgtggtcgattaaatatgcatctttttgtttgggatgagaaaatatctttttaaataaagacttttattttattttttatcctattgtctccatattttcactgttcacacaaattaataaaccgccccacacgaataaacatctaaaatcaaactgaataaaccgacaaaaaatccaatccaaataactttacgaaaaattca

SEQ ID NO: 96236 - DNA, 525 bp, Cannabis sativa
aataagctatgcaattgcattttgtttatgaagacggacaattgtaatataacaaactgatacaagcatataactaatgggtaaattacattattgttacaagagctgaaaataatattttacatgtaactaacaattaagctagcgactccattctactccaataggattaatttatttaaaaagggcaataaataattaaagcacattacaaacttaaaataaacagtaccggacaattaaagtcttcctctacttagcattaacatactaataatattgccaatagttatcatgaacgattggtttcgctcctttaggagatgggggtggagaacgctttttggcggttctgttggctgttttttgggttgatgacgatgataaggtcttcttcctggccggaggtggcggtgatttgtagtagtaatgataagaattaggtgtatcgttcagtggatcagctgttatttgtttcttggccagagatggaatcgacagtagtggtggactcataatgatcct

SEQ ID NO: 96237 - DNA, 2029 bp, Cannabis sativa
  modified_base (483)..(484): a, c, t, g, unknown or other
tttgagttattagtttttattcatttaaccggttatatttttagttacatatgagacatttactatggtgacttttccagcgacgttcacttttccgttgactttttcagcgacgttgacttttccgttgactttcctgtgacttttttggggaccgtgatttttccggggacttttccggttcccgtgacttttccggtgctgccaacttttccgaaaaaacttattgttgttttacaaatatgggatttctattttttttttacaaaaatatagcataaaaaaaaacccatataaatgtaaaaaaaattaaaaaaaaaacccataaccctataatgttatttatttataccataaaaaagtaaactataccctcaattcccatatttaagaaaattcccgccacgtcagtgctttatatttctcttttatatatatactaggcaatatagccactcttcgcgcggctaatttaattttttnnagtattataataaatagttacttaaaaatataattctaatatatagaaaaatcgtaagtatattatcttatttcatattattattaataattttatttattaaaaattaaatacataattttattaattattacttagaattatttattaagaattttaaaatttattatatgtagtattttaaattactttgttaaaagaaattatttatataaaaataaaaaaatagggtggtgtagaaaaaaattacgatgttatccataatgcattattttcatatctcgatcattcaaaattattgttattatcgtatctcacttgttgtttcattgtatctcacttattttaatcactttatctcacatgttgtcatcactgtatctcatcccttgttattaccgtagttcacttgtagtcgtcactattgtatttctcaaatctatatcttaatcttagatttcatctcaattttataaacatttttttgataattttaagacaatagagaaaatgttctgttattgttaattaatatgttttaaaaaagtaattattttttttttaaatatcttaattaaaaaaagaaaaaatataaaaaggtgatattttagttatgagaaatctaaaaggcaacccttcttggtatcactattagtgtaattaagtagtagatctcatataactaaaaaaaaataagatttatgaaatatcgctaactaatcgtaggacgccacctatgaaaggtgttgggcagcaatgctctttaattataattatgtgatacttgacattaaagttatcattttaaaaaaaatacgtaaagtaggcttttgttaataattaattaatatgttttaagaaaaattttaaacgtagtaaaaagcaattgaaataatgtttcaagcatcacatacaacttattattttattattattattattatatttcttttttttttacaaaaaaaaaaagccaaaacattaaggttgtaaatttgtaatattattactataatttgagttttatggagttatttttgtattttttttatagaactaaaattaaaaaagtcggaaaattaaggagaaaagagaaaaatagttttagaacaattttatatgaattaaaaattaaaaaataaagaaaattaaagagagaaaagaaaaataggtttaaaacaattttagagtactatgttaccactttatgtctctactttatatatatagatatagatttataagaataatatttaaaattaatattatgaccgaatcttatcataatatcattcatagtaaatttactttgtataaaataaatcaaacaataataatataaaaataatatatattatttgaacaaagtttcatttttactctttcttttttatgtatattattttgagcttagtaattgcaagtatctaatttttttttcttcaaagagttgcaacaaattaaatatcaactacaccacataatataattaactatataccatatcacaaaatcttaatcttaaatttcatctcaattaaaaaa

SEQ ID NO: 96238 - DNA, 890 bp, Cannabis sativa
ctaaaaactaatccacggtgttggagctaccactgatagtatcagtttaccagttctctctttttttcgtttattaatttcttcattttggtattttttttgtcttggtaagatatttatgataaaaatcatatggatcttttttctagatatgtaaatcgggtataatagagatttttgtattgatttaagattgattttggatttcaatattattttgtatttttaagttgatttggatttaataaatgcaatgattgtggtggtggttgcagtgatttggttgtgatggtagtgggtagtggtgattgtgcgttggtgattaatggtggtttgagtgtggtggcaatggtactaagaatgaagaagaagatcaagaaatgaaaactagaaataatatatatttacgtggatcaataatatcactgtgtatacatatgtagtctaacatgtcggttagcaaccaaaaatagacagaaatgactaatagttaacagaataccagttcatgtggttttattgccaaaatgtgagatttaggggttaattgctagcaaagttaaacttttgggagttttaccgcaatttactcttattaatattgttggttgtttttagttataatttctcagttataatataatttactattggtcacaagtgtattcttaaataaaagttctattttatttgtaaagtataatataattacaatattagtgcagaagaaaataagcagagcaaaacagagaagaatagatagaagaaaaaggaacaattgttattgatcatcatcgtggaaagtacaagggcaagctatatatagctcaagaatacaattggactagctaattgaattataacagaaaatgagtagccaactaattaat

SEQ ID NO: 96239 - DNA, 937 bp, Cannabis sativa
ccttctgagtaaagacaatttatgaattactgaccgtgagttaattgggcgtgaattcattgagttcttttcaaacatttactcgcggtcagagattaatcaagctacaggatgtagagagttattccagactaagctgtcgctagaggaacaagaggggaccaccttttgtccctctcgagacgaaatcaaacgaacgctgtttgccatgagcaaccataaggctccggggccggacagtatgtccgttctcttttttaaacactactgggactcggttggtgatgacttttgtgaggcagttagcgattttttcgaagaaggtaatatgcattgaggaatcaatacaacgaatgtggtgctcatccccaaagttcagaatctgaagcggcctaaccactacagacctatttctctatgcaacgtcgtttataaggtcatatccaaaatagttgcaaacagacttagacctatccttccttctctgatatgccctactcaagctgctttcgttccgggtaggaatatccaggataacaatgtgatcgtttaggagattatccacaccttcaaaaggaaaaaaggcaaagagggatattttgcaattaaaactgatcttgttaaagcctatgataggctaagctggagcttcattgaccatgttcttgattgctttgatttccctcaaaagtttcggcggtgggtttctcagtgtatctcaaccacttctctcaacgtgtgccttaatggaggtcaggttggcaggattttgccctcctgtggcctccgccagggcgatcctctatctctttatcttttcatctgtgctgcgcaagtgctttcaagactcttggaagagggcctacgaaatgatgagatgaagggtatcaggctcagtaggggagggccggttctatcgcacctattctttgctgat

SEQ ID NO: 96240 - DNA, 511 bp, Cannabis sativa
gtgaatgttaatatatgtgaatgtaaattgtgaatttgtcatagtgtatgaatatgtgaattgaaaactatataaaaaaaaaattagacttaattaatacaagaaatttgggtttttttttttattattttcgtctatagtgataattaaaaaggtgtatttcactttttttaaaaagaaaattatttatagattgtcaaagtcaaaaccaacatagtttttttttcttcttctagttataatagttttttaaaactaggcgagtcaatttaccacaacgccacatgctctctttcatttacatataaatacttttttttgtcttgaaagatatatttgacttgtgttattcttaagccacgtttgctaataatttttcattgttagggccaattcacatacgttttaggaattatttcacaaacacaccaaataaataaaaaaattataaaaatataatttcatgaaattttaaatatttttacaattcttttattttatttataaaaaa

SEQ ID NO: 96241 - DNA, 524 bp, Cannabis sativa
cataaataattaatataaaaaaaaaaagtatatttaagattaaaaaataattaaagtttacatattgaaaaataataaataaatttaataaaacttgtaattaagttttgtcagaaaaatcaccgaaaaaattatagtaccgaaaaagttattgttttcggaaaagtcaccatcgttggaaaagtcactgaaaaaaaattactgaaaatagatgtctcaaatataaccgattctataacataataaataaaaacaaataactcaaaccggttatattaacatataactagttttgtaacataatgaatgaaaacaaataacacaaaataattcaaaccagttataattaaaatagaattggctctataacagtgttacaataataaataatacgaaattataactcaatccggttataactaatatataactggatacataacatacactacaacattcaggagcaatagcggcgggaccctcggccgctattgctccagtttttggccgctaaagggcaatag

SEQ ID NO: 96242 - DNA, 587 bp, Cannabis sativa
  modified_base (158)..(159): a, c, t, g, unknown or other
  modified_base (232)..(234): a, c, t, g, unknown or other
tttagtgacaattttttagtcacaacataaattttttgcgactaaattagtgcgacttttagtcacacaacaaaattatttgtgactaaaacatatcatttagacacaagttgtcattaattagtataagtcacaacaagtattgtgactaaaaatanntttagtcacaacaaattgtaatttttgtgactagctaatatctttagctacgaatcttttagtcacaacatannnataataatttataattagtcataacttttttacttttaataattttttgtagtgtcatgttagaatttaagatataagatatataaggttttatctcaaaactaattaaccatatagatcttccaatattttcacacattaatgactctttaacaatttattaattacaagtatcataaaaattattaattaataaaatatcatatagtgtaaacatttagtataataattttctttttgaaccaacatttagtataatatctgagtatatatcattactataaatatataatatttatattggataaacttaacataataacaatatgttctggcttgaattgaatagcatt

SEQ ID NO: 96243 - DNA, 587 bp, Cannabis sativa
ttgaaaggacaattttgtccttgtcgttttaaccgtgaacattgagttggtgtaggttaaacttggaatttcaccaagcaaaattcctacaaatgggattacctttctagcaaaaaataaaataaaaataataatacctttgttaattacttattattattgagtttcaacaatgcactttattttaagactccaaattttattttgtctccacatattaatatctttaaaaaagaatgccattgttaataactcagttgttacaactatatgaattaactaaagttctaaatattatactgtacgaacgtgtaatatatatgtacacttattaatagctttcttaatttaatatatttttgggataattagagcaattttttgataaaatataatttaatattttggctgggttgcttgcggccgtacaaccaaaagtaacaactgagatgaatgaaatgttgatgcaaagagttctcagatggttgaggtttgtttgaatacactgaatcataagtagagaagccaaaaaatgttgaggagtttagactaattaatttatttaatgttattaataaaattgtatc

SEQ ID NO: 96244 - DNA, 584 bp, Cannabis sativa
attgcaaaccgagttgcatgatcatgattgatctaaggaaggcgtacgacactatagaatgaggattcatagaagagatgatgaaggcacttggcttccctagtaagttcatctctcttatacttgaatgtatttgtacacctatattctctttgctcttgaatggctctatgtgtggcttttttaacactaagagaggactaaggcaaggcgatcccatgtccccattactttttgtattgggaatggagtatctttcgagaatttttacaaaagtgggagagtggcctggatttaaatttcatgataaatgtggccaaatcaagttgaatcacttatgctttgcgaatgacttgctagtattttgcaatggtgacttcatatccataatgcttttgctcaaaggcctaaaattgttctcatctacttcgggactaatgccaaatgaccagaaaatagctatttattgcttgggaatgtctgatttcgaagtgaataggatcctggaggcatcaaattttaaaagaagctcgttgccatttcggtacctgggtgtgccaatttgctcaaggaaaatttctaga

SEQ ID NO: 96245 - DNA, 546 bp, Cannabis sativa
atttctataaaagattatttgtaattcgatatctttttccactatttatataagttggtgtttttataatgtgaaaataataattttacaaggttattcaaattagaagaaactaggtattcgcgggcacgcagggtggatagtatgggtggtgacttattttttcaaatcaaattacatatctgctttttttttttattttcttaaaatgcaattgcactgcatgatcaaaaccacaaaactacattgtaaaaatatggtgtgatgtgttgcggtttgagtgatttatactgttattattatcaaacattacaataaaaaatcaaaaatcaattttatatgttttaacaatacaaaaaaaaaatgtatgtatagaaattttttactccgattacatatatactaatcgttaaatttttatattaaattatccttaaaaaaatatgtaatatattatatatatttgattacaaatatattgttcatacatttgattacatatatttaaaaaaataaaaattaataactttgtaatatatagtgcgg

SEQ ID NO: 96246 - DNA, 502 bp, Cannabis sativa
catttatcaagaaatttaaaagcagttcaaaactgtgtacgaagaagattcattcaataaataggagtacatcaagtttgcggcaaaattattagaagaaaagtaaattttatttaagtgaattattttgtacatgtttaaatttgacaaatgaatctcacttttgggcatgattattaacatctgaaaagattgttaaaacatcatattaaaatcttgcttgtaattttattattctgtcatttttgttaattttatgacttcgttattattctgtattggcagctacttgttcattagctacatgatattgattttcagttctaacatgtttgttatgtatataatatttttaattaattaaataaaaaatttgtaattataaaataccaaatatcattatttataaaatcaaaatatgtggaacttaataaaatgtaccagtatatgtcacatctcttagtacttagcaccttaaggtgcgagagcatttttcctatat

SEQ ID NO: 96247 - DNA, 910 bp, Cannabis sativa
caatagcagtatgacactaaagagggtgctagtcaccactggtactctttagtaattctctaaatataacccaaaaaataccagcccacaattctttaactgccacgtggcgagctccaagctcctctaccagtgtaggtccatagaaacaaacttgtcctctctcactctcccacgcgcaagtacttcttcattctttttctatcagctacctatcctttttaataaaatatttatatttatgattagatatgttttgattggtcaatttttattccctatactatgaggaagaaataagaggtggtacagtagatttctcctatatatttatataacatacaggcctatcttatactacataaacatgttttcctgaaaaagaaaagcaaaaccaaacataatattttgttttccaacaagtggccaaatttcttcattcccattatggctcttcttcttattctaatagctatacccaataattcaattagaatttaaaaaaaaaaaaaaaaaagaaataattcaattaggttggtgacgaaatagatgtttcctgtattttgttcttttaaccttagccacagataatgatttttttttttatatcttttttttggaagatcagataataattgttattattatgataatatatggtattgaaattcctttttacattgcacccgtaaaaatgtagggcaaatggccgtccacagggagaattcattgtaggagaacaatagccaaaccattcaaaaccgatagatatacatttttattttaataaatatgatttgtcttcagaaaaaaaaaaaaacatttgtagcattttataatttttttttcccaaactaaactgttgcacgtatctcctttagttacattatgctaattttttttttttttt

SEQ ID NO: 96248 - DNA, 576 bp, Cannabis sativa
gaaaaactagatgaatggttaaaagagaaccagaattggataagaagaacccagcgcatcaggatatttgtcaacatgggcgctacgtacttcatttccaagctattaggttttcattttgatacttctatggttcttgacttgaggacgagaacttctaccctgttttagaccattccagattcaatggtcgaattagatttggcatttgagtgattgaaacctacacaccaagttgattgtcaacctggacactgggctcagcactaggtcaacctaggcactaggccctgtttctagggcctcaagattgtagttttctctctgagttttcttgaatcatcattatttctgatgacagaaaaaattcccataacatttttttaagaacttggttagaaacagcccaagttgacaatatgtaaaccttggtgctgggttgagtgccaggtgtcaacctaggcactgggtcccagttttggcctccaaaagattcgttcaatccttaaaaatagttgaatcttaatctttgcaaaaaaaaacagagatgctaggaagagttctcaaaaaacatca

SEQ ID NO: 96249 - DNA, 554 bp, Cannabis sativa
aattagttataaaatatatttataaagaataattatttggtggaaggcttagattttgtaatattgaaattataatgaaaactatagaaaaatttgattacaatcttaggacttcggaggcgcgcgaaagatctttcaaaatgttttctttagtatattttataggtagataatataaattatatttatatacttaacactcatctcaatcatgtaatatatctaggctttgtgggatcccacatatgtaattataggacctattggttttataatatagagattaaggataagggttctactaatacgtttatataactagtatatgtatataaatatatatatcctgcttgaagaaaagccaaagaatcttaacaccgggtggttggaaagctggctcaaaattaaagactttccctaattaaggatttttgtcttctttatttttttgaaaaaaaataatttgaatcatggatttttctaagctgttattataattgagaaataattaattaggtgattgctacaatgaatgaaaggtagttgtacaggtg

SEQ ID NO: 96250 - DNA, 670 bp, Cannabis sativa
agaaaatattgtttaaagatgcaagaagtttacgacaatcttctataataacttcaaaagaagaaagcataggtaatgaattctaatagcttgtactactaccaaacaacctcactttagctccactttccgttatggttgagctttaattcaacttagtgctttctttataccaattgcttcagccaaatttggagcatctatactagtaaaattgcccaacttaaccatcactaattccctttgagactctcgagcgaccatgccataaccaaatgcagctcgataatagaaaatacagcatcaacagctaccttgattgtattctcttgcttcaacccaaaattcaactccaccatcaacttcaaaaactaaaaaagaagcctctaaacctctattttggatcgacttccattgcacaagacaactcataaatgagataagaataccatctaccgtaacatacttttagttctaaaccgaatcgtttcgagccttccatagtccccaacataacataagaatctccccacacttgtccttagtgtacctttgaaaaaattgatcaaaccagttgcaaaaatcagcatcaataatcggcctaaccccagccaaaagcctctgccagtattgagcagtgaataaatagaaaatatttgcatgaaaaata

SEQ ID NO: 96251 - DNA, 3418 bp, Cannabis sativa
cacaagtaacattttgttgtgaatgaaagtcatatttagtcacaaaaaattatattgtgattaaaaaattattattaaaagtatcaattttttgtaagaaattttcagtaaattatgtatccgttttaatatttagaaaacttttttagttaattttttttaattgtgtacgtttaaaactattaaggatcacttataaattttttaaaaaatttaaatagttaaaaaaacagtcgtaaatattattttcggtattagaaattattcaaatttttttaaaaatttacaaacaatcctaaataactatcatacaccatgataaaataatagactacaaaattttattgagtatcaaaactgatagaaggtgtccactatatatataccaaaaaaggaaggtttttttggttcaaaattgctagatatccactatatatgtataattgacctttttagctccatcaggtgagaaatgaagtaataaaaaacatgagaacacactatataataagataagaataaaataaaaataattatttaataatatgttatgaaaattattttgataaatgatttgagttaaatttaggggagaagaattgaaaataagcaaaggtgtatgcaaggcataataatcccacaatattttgaaaacttgtggcacttgaaaaagctttatatattttatttttgtttagagtttttttttgacataagtgtacaaacaaacacaaaaaactctttagtggttggtgagacaaaattaataatgaattataaacacattcccacaacttttcctctcaagcaatatatagaaaggttaattgggtcccattttctttttaatttttttttcaaaaaattaaataataaaataaataaataaaataagcttcatctccatgccatcaaagtgacatagacttccactctctcttttctaattaattacttggtcatgagtagtgagagtcacacttcactaatgttggttttatttatataaatatagtcataattagtgtatcaattatagcatacataaaatatattttatcaacacacaaaactaaccaattaaaattaagggtatattccttaatattgattaaataatccaatcaaaatatagctttagttttcatgtaatgcacgctttgatcaataagtttcaaatatgatagatcaattaaaagggtgataataattaagaatttttagtttgtggagtttattattattaaaaaaaatatttatacctacattataatcattttatttaattttatgaaatttttttactattttaatttataattattaaattaaaaaaattaaaagataatacttttattaatggggctattagtattagtggatttgtttcctagcggcaaaatctccttaactcttacaattgttacccatatgactctaataaaaataaaaattgcggcataagtactttattttacgattttattgcggccgtactcttttttagccattaaatatcaacttataaacacgacaatatattattaaaccacgtattaaataagctaaaaaaatatgttaccacgcgtttttgaactggcacgtaacatgcttacactacaacaaatatatgtattagagaggcaacaaaagtcaccattaaaactatagaaattcgcccctaataactattagaggcaacaagtcacccctaaaaagtcattttactaaaacagtttctacacgtttgaatttctctaaacctacaaatttcttaatattaattgcataataattttacttaatactacttatacaattaattaaactcactaaatatattataaaaccctagtggacttttatattgggctttaactaaatgatcacatacgttgtaaaaatgccacaacttaattatctttagaaaattatcataactactctaagcaataatctcaactcattaacaatataaataaataaaaaaaaaattatctacgcgtaatcaatatctcaaaaacaaaacattaaatattgttttaatctagatattacaaacaccattcaaagtataatattattatttgtggaattaagtattgaaactcacataatttaatgtaataatttctatttaataccactaaataccattcacaaaacgtcaccttgtgatgatgctagatatgcctaatagcaatgttcagtttaatactaatctaaagccactttccaagccatagcacaagtattagaccgcttgggtcattacacatggcccaatgtcttttatttttatcacccatctatttatatataatacaataaatgcttttttataatatatttataggtgacgcttagtaatatttttctttttaaaatttttaatcaataaataaaagtagaatttgtgtttacaattttatttttaaaaaataaaaatgtgttttataactacttttatttctcaattttaaaaacaaaaaataaaagtgtgttctatatatttcattttcatttgttgattttatttaaattgggtccggatccgggtctacaatcgggtctgggtcggggctgagtttgggtccgggtccaggttcggatccaaggtttggggccgaatctgggtcgggttcggatacagggctgagtccagttttggggcgaggtcagggtctgggtagggttttgggtcaagagctaaggtttgtccaaagtcggcaccgggttcggggtatggggtttaggtttggggtcaggtcgggatctaggcttggcccggggtcttggtctggggtcggggtctaggtctgaggtccaggtctacgtctgagtccggggttgggatccaagtcagggtcttggtccggggtaggggcctgggcatgggtctaagtccagtccgaggtttgggtcagggcccggggtcggggtaaggtttgaggcctgggtacagggtctgagtttgggtttgggtgtggtccaggattcgagtccagtcaaggtccaagtcgaggtcggggtttgggtccgggttagggtttgggtctagggttcgggtcggggccatggttcgggttggggttcaaatctagggttcgtggtccagggtccgagtttgcatttggggtcctagtctagggtcgaggttcgaggtctaggtccatgtccgtattcgaggttcgggtcatgagtccgggacgggggtgtggggcccgggtttgcttcaggcctagggacggggtctcgggtccatgttcagggtccgagtccagagtctaaaatattgatcaagaaaaataattatttaaaaaaaggctaattaggatttttgccccctaaactttgacatgtgtcaaatcatgctccctaaacttttaaggttattaaaaataccccatgaactatt

SEQ ID NO: 96252 - DNA, 625 bp, Cannabis sativa
tagtatgattagactatagattaataaagacaataatcattaattattgatatttaatgattatacatgagtttatacttactatgggtctcattttcaaaaataggcattagagttataatttttcaatttcagatattttattaaactctaaatgtattatgtatgttatatagaaaatttataatttttatgtttttcgctcagtgacgatagaaaaaacgactgatagccaagttactcatatgggctagcttagaaccttttaatttagcggagtattcataagttgatatttagaatatcgaaattaagtaggattatgattttggactattttatccccaagtcattttaccatttaaacacttaagtcgctggcgacattgtagtcgttttggtttaggagttaggtggttgcttttctagtggatatttggccactatgtgttgtttgagcctaatcctattatttattaatgagattaatcaaattttaaagaaaaagaaagaaaaatcaatgtttatattagtatctatctgtacaacgaaaaaataataaatttaatactcattaacttttactacacatttatttcagtatcttcccaataatagaataaaa

SEQ ID NO: 96253 - DNA, 781 bp, Cannabis sativa
ggatccaggtccgggtttcggttcgggtctaggtctgggttggagttcgggtcctagtccggttacggttccgagtcaatgtccaggtctggttacgtttccaggtccaggtccaggtccaattcttggtttctaaccttgttccgggtcccggtctacttccagtttcagttctaatttcggctcacatggtatgtgttcgggtccaggttgcgatttgggactgggttcaagtctgggtctagtttcgtgtcctggtctaggttcgagatcggggctgggtcccagatccaaacaccgaatacaggttcagtccaagccccaggtccagatcaggatcccaatctcgggtctcggtctggttccatttcgtgtgtcgagtcacgagttgggtcctagaattaagtacgggtttgggttcgggtcttgggtcttggtcctagttccgttcccaagtccgtatctcgattctgggtctaggtcccgatttggatcccattctatgttcgggtttgggtcctagtcgaggttcgggcttaagtctcggtctgggtttctatttgggtttgggctctggtctgtgtcttagtcttggtcctggtcctagtcctagtccaattcaagttccagttgcgattccgagtttgagtttgggttcgagtttgggtcagggttcgagtcctagtttgagtttttgtttgggtccagatctacgtctatgtctgaatcaggctctgggagtgggttagggttcaggttctgggtcaaggttctggtccga

SEQ ID NO: 96254 - DNA, 988 bp, Cannabis sativa
  modified_base (70)..(75): a, c, t, g, unknown or other
ttgctttacggaactagttttttgtcttaaatttttaactagttgataaatataaccggtttctttatannnnnnttgagttattgtgtgttattattagtgtttatttattttattgtagaattggttcttttcatatttatgccttcaatattttttgaaattaatctctatattaaatagatacactacgaacaaaatagtgcagatttaattggataaacactcgggaacataacccaaaggatgtatcttattgtttaaagatatacacaacttaatttgttcataatttttcaattttacaacaactaataagaatcgattcatagtagatcatcacttggtcaacatgctaattaacactatgagactattagtggtagcatttacataacattacaagaaaagagaaaacacaccacctctgaaaatgaaataactgttcaactttgaaatggttgtttatattacaattgtcttttaacaaaagaatgtctaaaacttttttcttttcaccacgtagtatttttgttagatatttagttggcttataatttgatgacaatatatattacatacttaatttatccatttttcttaatacttccattcatacctagcttttaccttttcctattcctagtgtatattataatattttctttatacttgtgagcaatgtcagcacgttataacgttataaataaaagcatcttataatgaggtaaaggttaaagaaaggcacaaatggaacataaaatagaaaatgcatatgggcccatccaccgtccacttcatacggtgatagagacataaaatgatggtggtaccactgtgattgggaacacactagtggtttggctttaatgaaatcttaaccaaaattctacttgctgtatatgatcaaactctctcattcttatttctcatcatcaatactgtaccaatattattcaaatgtgtgtacctatataaatataggaaa

SEQ ID NO: 96255 - DNA, 818 bp, Cannabis sativa
  modified_base (42)..(43): a, c, t, g, unknown or other
  modified_base (552)..(553): a, c, t, g, unknown or other
tgaagaacaatgaaggaggttttgttatagtgagatttctcnnacctagaaactcgagaccagactcttatttggaggaaacgtgtatccacttttccaagaaaagttgagaggtccatgagagattcctcaggcttaaatctcgcctgaactaggatcagtgagataatgcgaatatgaccaaagtctaatcgcattcgtgtgactcgcgttatgtgggaccaaagaacggatttaatttgcatgtatcaggatatgtgcgagtatcctctctattctcctgcgagaatgtagagatcgactctctatgatgcgagctggtcccagtgacccaagagccttgatgaaccaacatagactcgtgtgtctaggttgtattagctcattatacaatgtccgtgaatgcggttatctaaggacgcagacatcttagacttaactaaatattaagtatatcctagagcccgcgagctcataccggaatatgaacagccaactcgaacattagaagtcgcatacgttgctgcatttagtgaatagaaactgttaatnnatttattaatgtttacgttttagtttaattattgtgaatcaatgtaaaaacagattgataatgaatgcaatcctggtgtaactaactggacacttgctttgtatataaaggagtgatccaccatgaaatgactacgaaacgcttgcaaatagtggactaagcagaccgtgatctgactgaaccactataatcctttgtcttcttgttatttccattattttttactaagtacttacgttcccagttcgagtactcgccgttttag

SEQ ID NO: 96256 - DNA, 586 bp, Cannabis sativa
aatatataaaacttggaaagtcatcactagtaatttctacctgagaatcgttggatgtcccttataaggcttagcacgcgtaaagaagtcctctctttgtgcttgacagaagtaatatccctcaaaaagttcctaacacaatcaatgaaattactgagcaaacatagaaataaatctaataaatagcaccaagaccgagcaaaagacaattctcacagaactatatgcataatttaagcaactaatattacatcaatatggggttgtagatggttgtatctatccttttttttctgaggcaaagtggggtgtactttggccctagaagtcatgttttgttattaattgtaaccatggttttctcccaccacaagggaggcttctaatatttatcgggaaggatcctgtcaatgacaaaaggatcctctctctttttcaaaaaaaatatggggtgtacccgaagcttactacccatcaataacaagaaaaacatataacaaaaaatatgttcctagaatataaaaaccaagaccttgagaaaagaaacatgtacatcaaatgttgcaaatctctacctagatcagag

SEQ ID NO: 96257 - DNA, 631 bp, Cannabis sativa
ttaaacttttccgaatttcttaaaattttacaggatgtcttaaataactcatacgtacatgactatgagaaaaaatttgaccaaaaaattatttcggatactaaaacagataaaagtttatcaatatatctattttcaagggatgtattgtaaaattttcctactgtatatatatacacgattttttccattttcaacatatgatacgaaaactttatttttgtattcttgatgtcttttttttttttttcgatcttttcttttaagtgaatcagcattaatttcattactttaataatatattacaagacaaagaacatctttataagaaggcctgatgaaaacaaatacaattccattgaaatgagttttatatatgacataatatccaatacatatatattttttttttttggttttttctaactttttgtcactcacacaatcacatgaaattgatatccaaatattaattttataggtcaatctaattattaatttttttttttcctttttgtcaatgattatactaatatatacaatttgaatttggagttttgtgctctgtgaaattatttttgtacctcaacttatataataggggatattttaattatatacgtaatgttca

SEQ ID NO: 96258 - DNA, 625 bp, Cannabis sativa
taaagtaaattatttatcaatattataatatataaatctttaaaaaaaataaccaaatataaattatcaattcatttattttgtgttattattttatctttaaattaattaaaaaagagttggaactaaaaaatttataataataaattctatgacttttgcctccgaactatgacctatgtattgtgccacctaatttttttagttaaccgttctcaaactattatcaatgttgtgaagtagtacttttgttaaattttgttacacatgacaaacaaaatgcatatgtgaatgtttagaccattaatatcacgtcatttccatgtatttaataaaaaataattaaaaaattatattttaaaaattattactaaaatcaattaataattacaaaaaagaaaaaaaaatagttaaactaaaattacaaacttttaaattaatttttaaaataatttgcgacgctcatgtgataatagagtaaacaactacgttaagattttatgaaccaggtgtgacaaagcttaacaatttacaacacaataaatagtttaggaactatttttaatggactgaaaaaattaggagcacactaatacatagatcaaaatttcagggctaaaaatta

SEQ ID NO: 96259 - DNA, 651 bp, Cannabis sativa
taaaacaaaaccgtataacctgttggagtattcggctctttcttacttggaggattatcaagcggctcaaaggaaaaaaccagcaactacaccagctgcttctcacaacaatttgcaccagaaacaagatgcttcttggctgcatccacctacaggcaggcttaaattgaatacggatgcggctattaaccaggcgactcaaacaacaggctgtggagctatccttcgagattctaatggtgaaattgtagcagcattctctaagccggttattggctcttttcggccagaggtgatggaagctcttgccttaatgtatgcattacaatggctgttagacaatggcctacatgttcattatattgagacggattctcttgttgtggccaaaggtctacaatcactttctacagcggtctcggatttccattgtcttttatcagacattacgaacttagtgtcctatttccctggagtacaaatcggtcatgtatataggtctgccaattcggcggctcatttacttgccaaatatgctctctcggtggactctgtttgttcttggttggaggaaatgcctccccccttaaatgcttttgtattatgattattcatcaaatataaaatgcattttcatctcaaaaaaaaaaa

SEQ ID NO: 96260 - DNA, 641 bp, Cannabis sativa
tacaattattatgtcgattttggacgtgatttgtatgattaatacaaattttattgtttattagtagtatctgattatgttttgtaaatattttttttgaaataaagattacatctttcattaaaacaaatcagctaacaaaataaattccaaaccagaagggacagaccccttacttgaaatatgatcaggacatgaaccagaagaacgagctaaccagttagtcgcttggttcccagatcgtttaacaaactgaactgaaacgtgaaaattagaaaaggaccgtataagattaatacaatccgaaataataagaccaagaggagaaagaatgtggctcttgctattgataacattaaccaacacaagacaatccgactccaaaatcaccgttgtaggacaaaagtcctcaatagtcctgctttctccccagcaggatttaacccaactcaaagcctccttcatggacaacgcctcagcaacatgttttgtaaatattaatatataattttgttaattagtaggcttactcattaataccatataaattagtcataaaaatagttacacaaatttaattatagtaagttgactcattaatatatctattataattaaattaagaatttgtatgaatctat

SEQ ID NO: 96261 - DNA, 706 bp, Cannabis sativa
tttttggtaaaatttttacatttttttaaagattttattttatatttttacaaaaataataaaaaaaaatacataaaataacatctaaacaacatcgaataacaaaaaaaagaataacatacaaataacaaaaaatcaacaacaaattaacaaaaatacaatataaaaatacattaaaaattcgtattttctataaataaaattataaaaatataaaaatatttaaaatttcgtactgtatttttattatttttttattattattcttgtgtattagtaaataatcgctttaatatatttatagggtcaaaataatttttttttatgtattttgattaaatttttatgatttttttaattatatatttttttatgaaacaaatgaaacaacctgaaaaacaaggtaaaaacaataacatgattttgtaaaaatatttaatatttcgtgcatcagtatttttataattttgttttgtcttttttcaggtaattatgaaaacatcttaaaatcatttgttgttattatataaaaataattagtaatgatttatattattaataacaatactacttggcttttgtgtgctggaagtgtattagggaacaataatcaattttctgttcttagaaatatcaacggttttcactattcttttattgacattgattttttaatatagattatagaataaaatattaatgttgt

SEQ ID NO: 96262 - DNA, 743 bp, Cannabis sativa
  modified_base (480)..(481): a, c, t, g, unknown or other
tatattataattgagtaattatacagtactttattagttttttaagctgaagctcttagattgttagtaagattaaaatgggttccaactttattttctgtttttttttttatatagttggtgttagctatgatatacaactctatctatcttaatgagccagttgttcttttttttttaaatattaaaattttattgtctagctttccttaaaatatctatccattaataatagatcaatcgaacaaaatccattacacggaggataacgctcaaagagcaatatcaatcaaggagagtgctaattacaacctcttagttaacctccacgctcaaaatcatatgtcgaaatattttttttcaattttttttaaagtgatatttattatagttacaatatcattcctgtaaatttttgaaaatttttaaataatttacagtaccgaaaaataaagtctattttcggtactgtaaactatnnaaaaaaatttaaaaatttacaagaatgatattgtaactataacgaacactatcatgaaaaaaaaatattctgtcatgaacacaaaaattgactaaaaaattataataaaaaattaatggtaacactcttctctcaaccaatttaagcttaccgaaatcaactaaattttatactttttttttaccaaaggaactaaattaaatctaaattttgtcaaaaaaaaaaaaattaatctaaattagtatgataaataatggattgg

SEQ ID NO: 96263 - DNA, 513 bp, Cannabis sativa
ttaattagtgcttaattgaaaattttgagaatgtgttgtgttgaacaaccataatacacttttataaacttgtaatcggaattagaataaattaataaaaaaataaacgaatttaaaatataaaataattgaaaataaaattttattatatttttttattattaaattgacttaaaaagaaatcaaaataattttattttagtaatcaaaatgttctaatttcactaaattaagaaaatatatttttttaaggaaatatttgttttttatttgtgattaataaaaattacatgattcattcaaataaaaaaaaaattacatgaaaataaaatattattctatatcctttctttcttactttatatgggttccacttattaacaaaggaatagaatcaaatattatacagtcaattcttcgcttttcaggccgactttgaagtttagtgggccatagaaaaaaatatttttaggtccttatttaaaaaatataatatttttcaaaattagtaaa

SEQ ID NO: 96264 - DNA, 941 bp, Cannabis sativa
tgtcaccagtatgtgttgccatgtcatagtgcaaaaaatgggataacatttccccccaagtctgcacgggacttctgaagtcacgcgtagacttcacctaggctgacctctcgtctaaacgggtggcacgtgttcgatgcgcctgttggtgattcgatgtgattttgactaagagacccttcggtttttggctaattagtgctcagattgaatcgttcctcgagaacgccatttattcacatgcttttgacggttacccttctccaagtactcaattgcttttgatttcccaatatttacttttggggtgaaatcagggcgtttgaaattctaattgactgcacctttccactaatatgcttataaatagggcaggaaatcctaataaaccatttttagcatttttctcgttaagtaatttcagagcaaaaaacacttttctctctcagattcttcgtggaattaacagaaagaagagccgatcagcgtcgtccgagggacctcatcaaagaagctttgaacagtgagtaagtttctcatcttttcctctttgaatgcctgaattttcaattttctaggttttcatttaagaaaatttcaataatcttgacttgttttaggaaaattgtagagaatctaggttcagaactatgaaactttgactgtagtagatcatataacttgattgttgtggcactctgactttaacttcccgatattcggttctcactttgcccattcagggtttagtgaagattaacccttaattcaaggttttgaaattctgggttatgaacctaaaccacacgaaattttcatctttttaatcttttgattagacttggtcagtatatttttcttgtttttgttcgatatcccggccaagtactcatcttgtgtcttatcttttgtagatgaacctgttgggttttgtgtcctaa

SEQ ID NO: 96265 - DNA, 588 bp, Cannabis sativa
aggcataatattttgaaattaaggtattttttaatgacgtggcaaggtattattgtaattgagatttgttaagttatttttgtaattattttatattttgcgtatattttttaaaaaaatcccttttatttatgcttattgcatataattaattggctaccttttgtatgatttatgattccaatataaaatttgaaaattgaatattaattatgctataattgattagtcatagatttcaatacaaaatgaaaatatttatgacttgtgtagcattcgaattattgctcattgctgattatatgtgtattataccataatttaagttctttatgtcttaatcaaaatagagaataaattataatctactaccatacaaggtagaagaagaaaactgattgtattagtgaagtaaaaagtaaaagaaattaaaattaatttctctaattttctaaatcactactatttgtttttattaataagttgtttttttttcttctattaattgattaaattctattgtttgtaaaatagaactaaaaattcaattcaattaattagtaattagttacggttcgtgtggaatca

SEQ ID NO: 96266 - DNA, 776 bp, Cannabis sativa
aagactaaatatcgtatatatgctcaacttataacaaaaaaataaaaataaaaaaatcccaaagttaccaatatgtatgataaaatattatatgagaaagttagacaaaatattatttattaatgatgagcacttatatgtgaaaaatgtgttccatacattaaacaatgtgataactatacttatttaggccgaaaagtattgtaaagactaaagaacataaaacgttttctcctaactaattctcttttttagtatatattcacttcttttctaaattttaaaacttttaacaattcaatccaatatggcttatttataaagcattttatgattgtgatattcttccaatgttattttatataaacatgttactatagaaatgatattcttcaaatgtagtattattctaataacttcttttaaagaatatagtggactttaataagagaaattactctatatatcattttattattatttgttttaaatttatgatttgggttgctccagtaattcttatgtgaatttcagttgtgatttaagttactccgttagttgctatgaaggtttctatgtagaatttatactattttgaagtataaaaaattaaaaaaaaaattctttttttattatacccacaattaaaacgatcaagttggcttaattaattaataactataagatttaaggacgtttgtctaatttcattcaattttactatttcagtgatggtttatgtactaaactttaacatgtatcaaatcatgtcccct

SEQ ID NO: 96267 - DNA, 532 bp, Cannabis sativa
tttatctagttatcaaaagatcaaaagtataaagtatacaattatacaattgtgagtgatgagacaatatgtatttatagagttagggaatgaacttagttacataatcctagttggactgggtctgctcatcaaaagcttcagttaactagaaaagctcacacttctgctttaactagactttacacacacagttgttaagcccattaactattgatcattgacaatatgagctaacacatcaaaaagctatccaattaacctaagttttaataaaaccaataaagttaatgtaagcccaaatatacgtctaacattctcccacttgagctacattaattctaatacatatatcttatatatcaaaataattttatttgaaaacgaatcatgggttggacaacacaaaaatatttgtggctactttaaaaatgatagttctttgatagcatctaaacataccagtccaatttaacttttaatattgaactatgacaatcatattactttcaaatcaacaaaagatatttat

SEQ ID NO: 96268 - DNA, 557 bp, Cannabis sativa
  modified_base (52)..(54): a, c, t, g, unknown or other
attagggtttcttaatcatcttgggtagcgtgcctaaatgttagggcgttannngtatggttcaaccctaccaacactagtacattagcggtacttagtccatgtagtatagagtttgtacttcagttaagaacgttcttgatcatctgttaagccttgtggataggtgtatgggcacttaaatacaagtcggtattgtatcatatcctatatgcatttcttaatgagtctgtcgactcacagtttttactgtcatgtaacctatgtctatataactaaagcatattcaactctcatctttcaaatcttgaattgaaatcataaaaaatatacaaatagtgatcaagtatttataagcattaagtatagatcatatagattaaaataaagaggaataaattagtagaacatcataaaaagtaaaatagacattaaagtgactctattaacctttaataagagaattaatacatgaaaattatgttcataatcattgcattcataataataaataataacataaacaaaattaaagaaaaagaagaagaagaagatga

SEQ ID NO: 96269 - DNA, 877 bp, Cannabis sativa
gaggtaattacacaatttggtatatttgtctgaccatgtaattacactgtaaccgtgtaattggaagtaattgaggggctctaattacactctctaattatcacggcccccatgagaattgaatgtaattatactgtgtaattactaaaaactttatatattaaatattaactactaaaaaatattattttctcatgtaattactaactagtttgccaaataagatattaggaatccatatgtaattatcatctcatatctaaacacaccttgtattttaaaatatagtgtaattactaaactatgtaattatcaccctagtaattaccctacctaataattatacagttacttccaaacacatcctaaattctcatggagggccatgagaattggaaagtgtaattgaaacctcttaattatttccaattagacagttacagtgtaattttacagtcagacaaacatgtcaaatcgagtaatttgcgtttggaaagctacattgtaatatgtgtatttggagctaattacacgatttgatatgtttgtttgatcatgtaattacactgtaactgcataggatgtaacggattctaattacactctttaatctttatggcccccatgagaattgagtgtaattactataaactttctattttaaatattaactactaaaaaatattattttcctgtgttattactatttgttttgcaaaacaagatactaagaatttacgttttgtaattttaaaatatatagcgtaattactagactatataattaataccctagtaattttactgttacttttaaacacataaaaattaataaaatttcaagtgtttctacggttctctcccttcatgtttttga

SEQ ID NO: 96270 - DNA, 503 bp, Cannabis sativa
aaataagcatttagcccatccaaaccaggggccttatccccagagagattatacagagctctcctaacttctttagttgaaaaaggtgcatccagaaaagcagaatcagagtcatccaatggaggacccaaacaatcaagaataagattgacagcatcagcatcactaccatgagaaccaaacaaatcagagaaataggaaactaccagattacccatggcattatgatcagaaacaatattctgattatcatctttaagaaacttgatagtgttattctttttacgtttagaggcaaaacgatggaaaaacttagtatttttatcaccagctttcagccaatgagttctagatcgctgcctccaataaatctcttccttataaaggagagcatctagctgagactgaagacattgaagtcggaaacggttatcctgattagaaaaaggaataccctgaattcgagcaatttcgtgctaaaggtcagatatacgagatttgag

SEQ ID NO: 96271 - DNA, 1656 bp, Cannabis sativa
cttccagtatatcataaaacagtgcacctttagttattcatttcaccaaaatgtcttgtcctacattccatccatgggtttcatatatacaaacatcatctattctttatcatcgaattccattttcaattgaaacaacaccaaaataattgagagacttactgtcgaaagaagtttttacaaaagatgaatataacaggtaaattttctttttcttctaggaacactgggtgctgaataataatgttatacgtttagtgtagaggaaaagcatagcaaaagccaacctattctagtttgtttagtgattgacaattccatcctctcacataataaatattacaccacgcattcctcaatataattttatgaaacattgaagaacttctaaggagccaaaagaaatattctctaaatttataaaggagtgatgacaaacaaatatgaatggaaatcaatttcaaattacctgtataatttaagtttttaattttctcatacaactatcgagtccgattataattatgttgtgttatacttaacagaataaatatttaagtgacgagggcaattaaggaacatgaaatgcaatatatttcatattgttgtggttttgtatccaaacataacaatttgtggttttatatttaaacatttacttatttatttattttttaatgaaatatcaactttattaaatttaatattcaaaatatataacatagactcacaaaagctacgattattagcaacaacatgcactaatcaatttgcaaatcgttagcaagagcaagctatcagattaaatcccaacctttgcttttgacccagcaaatgaacaacacggcagatgaatttcgcccaagctgcttgcggtcataagctatgcatgctttgtacttattgtcatacaattagtattttcatttcaacaagccaagcaccaaagtagttcacatgtaaggacccatacaaatgtaataagtacaaagcaggcatagctttggccactttcaacaacctttcacctactacttgatatgatattagacatttttttccttttttttaggataatcccactcaataacaatgtcctatacatatcaatcaatgttaaagtactctctcatgtcctgaaggaaagaaaccacaaatagctaagaataatcaataaagctcactcaagatatgttaaaagataatattttccaatggaatacttaactgaaaggtgaaaagggtatgaaagaaaaaaaaaatatcttgggatgcctttttttctcccttttttctgggagatgttggaacattaattagtactatcaagttacaaagggagatcagcttgagcaaaaatggaccacgtcgcagactcacaatatgtacaagtgaacactctactctgccttgacaaaatgagcagttagaagctttaagactgagaagccattgaacgtgccaacatcatggaaatctttaatttatcattgcatgaaattcttctcgtttcagacagatcctaaagaaaaaaacaagcataaaacacgatatgagataaagagcagtaaaacaaaattagcatgctaattaaactaaaataggtaaaagggttatgtttgcagttccgacctcgaaagacaagacatcaagaaa

SEQ ID NO: 96272 - DNA, 696 bp, Cannabis sativa
cgtatgaaaatattttccatctcacctcttcaaattttataaataataacactcaatttagaaaatatgttatatgttaggagtgctctaataaggtactctgtttgttgtttgttggtctccaagtcaatggtgatatccatttgttctccaaagttgttaagtagagttatctcctcccatatgtaggatcgactcaagggtggggcaataggagctcacgcctaaagtccccactcatgcccaaaaaatcatttagcaaaaggctctaaattcattttttaaaaatactatttttcaagatactacatttaatatttttattgagaaaaaaggctaaattatatttttaaaatactatattttaaaattttaccattgtatatacaaatagacataaaaaaattatataaaaaagtctagtttaattttttggcccaaagctctcaattggctaaagatgagaacagagagaaaaactgagaagcaaagcttatcctatacaagggactttattgatatttatatagcttaaaagagctaaaacaatacaagacaattagttataacagaattggtaaaatgattacaagtgtcttaacaaaaataacagacccaagacacattaactaactaatcttgactttggttatcatcccccctcaaacgaaaaggggtagacaccactttgagttt

SEQ ID NO: 96273 - DNA, 516 bp, Cannabis sativa
tttgttttatttcattaaccgtagatttaattatgtagctgatgatttagctaagaaagtcagacagaatggcgattctgaaggctcctatttaggggagggaattcaccctgtgattcccactttttttctttttctaatgaacttatggttctttcaaaaagaagaacttgattcattgttggatagaactttatatacaattttcgaacagaggaacttgattcattgttggagatatccaaacacagtcttttttttttaatgcaatattggttcttatcaatttatttttggtgagagaatattttggcccataccttacatagtgatgagtcttatgacattattggttgtattagccattcatagtaacttgattaataaagtttgagattattacaaatatatatataattatatttttattacaattaaatcaatcagcactgtacaccggtctcaaatgaatattagcatatttatataatctagtattaaatgattcttatacct

SEQ ID NO: 96274 - DNA, 664 bp, Cannabis sativa
ttatgaaacagaaaactgctgcctgagatgccgtctggaagaggcgcagcgtctgaacactgaattagagcgtgatgcagcctcagctaaggtggtacagggtacgaatgctcaaaatcaacctgaacctggagtgaaaagaccacaatgcaggcctcgtggctcacgaactaggagacaggaaaatgccctagaagaacaacccagggaaaatgagataccccctgaaaatcagaacgaacactcagatgggaggcaaccgaaaactgatgaacgagaaattcctcatgacaatgagaaggatcttgggactcacccgggagaacgtaggtcacctgcgataaatcactagtgttcttccccaacccatagagcaaggactcgtatagaccctaatgggggaaatacgatgaaccgtagtcagggggaaagaacagagcgtgaagaagcaagtgtgacctcaaggcggtcaagaacccgcagttgatcaactcaaagaggagaaagtactcaatgagctaatgattgagaaagtatgggaaccagtaaatccgtgagtcacttaaagacaaagtctatgagtaggacatgatctgtgagtaagacgaggtttgctagcagttactctcaaccatatttgcgagagcacttgaatcggaagaaa

SEQ ID NO: 96275 - DNA, 615 bp, Cannabis sativa
ttacttgtttgtgattgtgtacacttgtgcaattataaatcaatataattttcacaacaacccacatactcgtaggtatgttgaaacactaagggatatcagtaaaagaaaattcacctcaagatattcatgaacggcttgagaggataacatcttgcaaaacacgaccagtcagtcctaacactatgaaagaacgtgaggaccatcttggatataatacttccacaaagaaactaccttcaagataagcacaaaaagcggttgtcagtataccctgcaaggcataaaaattaagtcagcatgaccgttttggataaagacgaaagcaattatttatttattccaggtgttgtaaatatgaaacgtgagaattgtccatatttcataaacgattatgaagataaaattaaaatggaaatagctgtcaccctcaaaaactgataaataggggaaaaaatcccagaattagggatgaccaaatttagaatcctaagagaagatacatgtacattgtaatactctacaaactgaaaaatctcgcgaataagaacttgtggactataaagaattaattttaaaacagcgtaaattttttcttatttattattattatta

SEQ ID NO: 96276 - DNA, 578 bp, Cannabis sativa
attgcagaccagccaacaccaaaataggaacatgaaattattcctactgaagctcctaggcaatctcaccctatgataacacgatcgaaggccggaatatttaaacgaaagtgtatttgggacaggctcaatggaattcataagtgaagaaccaaaaacacttgaagaagctctcaattcacctgtctggaatccagccatgaactcagaaattaccgccctcaaaaacaacaaaacttggacacttgtgcccaggttggacaactacaatgtggttggcaataagtgggttcataggatcaaaaggaatgcagatggttcagtcgaaaggtacaaggcgaggcttgttgccaaaggctttcaccaaagccctagtgttgatttttatcaaactttcagccttgtgataaaagcttcaacaattagaattgttctcaccatagctgtgtcaaagggttggaagatcaaacaattggatgttaacaatgcattcttgaatggacagctacaagaagacgtttacatggtgcaaccaccaggttttgaagatccaaaaaaactaaatcatgtgtgcaagc

SEQ ID NO: 96277 - DNA, 983 bp, Cannabis sativa
aataagctaaaaatacttgagaacaaaactaatttaatggacaaaaagagccaaataactctattttcatagagttatcagcccaaaaacagtcaaccgaatgactgagtttgtggtagtaaacctacagtctgcctacaatgtcattttggggagaccgacattgtacacactgggggcagttacataatcaagcatttggccttaaaatttccaactgctaccgggaatgaaatagtaaaggagatcaactagctgcacgtgagtgttacaatgtggctatgagggggcaaccccaaccaggggcccaaattttggtcgcaaacaatgataataaattggaaagcataaaagcaagagaaatactttaagttgaagggatagaccctcgtgtgggcgatgactgtgttgacatggatcccattaaggaacttgaagaaattgctctcgacctaaacgaaccaaccaaaattgtgaaagttgggaagcacctaaataaggagattaagaaggctattatcaattcctccgtgacaaccaagaagtatttacttgggcacattccgatatggtaggtataagtccaaatgtaatgacccacatgttgaacctaactaaggacgtgcccgccaaacggcaaaagaggaggttacgtgatgaagttatatttgtagccttgagagaagaagtcagtaagcttttggctagcaacttcattcgtttagtacaaatcaattagtacttagccactttattttattttgattttataatatttaagaaactattagtatttttattttcaaagtttgagtaaaaacatttatttattcaaaaaatagttacatttatattgccaaactcaaaaacaagtaaccaaggataatagttaaacttcagttacttgggaggcataagggtatagatataactagggtaaatagcggcataagtacctaaagttttgagtttgtaagcggcat

SEQ ID NO: 96278 - DNA, 1668 bp, Cannabis sativa
  modified_base (1194)..(1201): a, c, t, g, unknown or other
aatgtggattacattagttttgatatgtaatcatttttacaatactcaatgtaataatcattatattgtaatggattacaaaagttaaaagaaaaaagcaaataatataatgcacctattcattaccattacgaacgattaccattacggtgaaccaaacattatctaataaattttatttctcttaaaaagtactacataaaaatatgattgagtgtaaaaatttatatatctttccaactaggcatgtaaatgtatatagatgagtgctaaatagattctcttttgtaatctcttttgcactctttctataatttagtgacaaatgtaatcttttgagattaatttttttgtacttattataactatatcattacaataaaattatcctactaatttttaacttagagttgaatgtaactctcaatacttttattttgctaagaattaatcatcaaaactcaaattttgacggcaaaaactccaaaactcgtgttctgttagcatttacccatttccattcatttttggcaattaactgctaagttggatgtccacgtgtacgtagaatgttgtccacatggacacaaaacatgatattactgactcacgtaaataaatatttaaaataaataaaaataaattaactaaaaattaaaaaaaaaaatcattaaataaaaaacaatgttttttgttttccaccttttttccctttcttcacgcactctctgtctctctctctcaccctcctatctttctctctgtttctttcttcaaaccatcaccaccactgcacaaactcgcaactttagtaggataattttattgtttaggcagttgtgatacactaatatcaaaagataacatttgttactaacttatagagtgagtgtcaaagagaatctcctaaacactcttcgtgtatatagtatgtaatcttttattgttagatcaatctttaacaatggtaacattttgatctacatttattattaatttggtgtaggatttactacttttaatgtaataacttcaatcattcaacaataaatatcacaccaaatatgacactaaggtcttcaccaatgaagcaccatctatagttgcttggataagtctacttaaacaaatctaaatttttaaagaaaaaaaaaagactcaaacgggttcctataaaatttagtttttacaaannnnnnnnttttaatatatttttttatatctaaataattttttaaataataagtaaataagctttaaaattttatttttttaaattttcttaatcattcaaaataattttttttacgatctaaattaattttttaagtttactagaaagaaatattgaatctttctcatttttattttgagatggtacgatttgatagttgtcaaaatttagagggcaaaattactaatttacaaatacacgtcaagcaagaaatggagaattggtgtggtaccgagaagaagatggacttctctatgccaagggtggtagattatttgtaccaaacagaggcactttaagaagggaattgcttaaagaaacccacaatcctaagtgggttggtcacccgggtgtggctagaatgctagctttgctgtcaaagtcttactactggccaaaaatggagcaagatatagaagtgtatgtgaggacat

SEQ ID NO: 96279 - DNA, 537 bp, Cannabis sativa
aaaatatatatatttaatttttgtactaatttattaaaattttatacttataaaataaaataaaatatattttaaatatttagacagaaaaatttgtatttattaaaaaaattatatatgatttaaaaaaatgtgaaaataagatgaataaaattattgatgtaagaggaaataatgtgaaaaagaaattttaaaaaaatattaaaagttatttttaaaagttgtatttaagttaatttttttttttttttaatatgaggtgaacttataactttatagaatgtaaataaaattcccttagtcaatagtaaagacaatttgatagctaataatattagtaatataatatccaatattaattttgtagttaatataagtaatataatttccaatattcatcatttcatatattgatagatacaattatttgataactttttattacattatatttataaatattggaatatgattttgtcagaatacgtttctactttttaaccttaattattcttaaatcaatctcagccgtcagat

SEQ ID NO: 96280 - DNA, 810 bp, Cannabis sativa
  modified_base (749)..(751): a, c, t, g, unknown or other
ttgtactaaaaaaaatctatttatttctgcctaataacatttcaaacaatttaaaataaagaagaaaaatataaaattagtagtagaaaaaaatcccactttattaaaaaaaaaaattattgggtatattatatatatagtgaccctacaaaagttaacacacgaatggaaaaaacttgtgatgagcactcagaatggtgataattaaagtatgaatattttatgcaacttttttttttgaagataatattttatgcaactttaattatatacaaaatatatttaatatattttaaccttgcattaaagttgcacatatattactatatctatagatatatgtatatatacgctctcacaaaaacaaaaaagaaagtataattaaaattaaatttgactagtttcttcttcttttgtcctatatgatattattgaacaatattatcccagatagatcaaatataaaaatattgagtcatatgtataagaacattggctactccactcatcaccaattggttttgagctgggccggctcagaaatttagtggctcatagaaaaaaaaatattttgggcccttatttagaaaaaaaaatgtaatatttttcaaaatcagtaaaaaaaattgtataatttcaaaaggaaaatattttttttgggcccttgggcgaggtggtccctaggcacaggcctagcccgcttatacctagggccaggcctggtttttagatggaaccccatgattctnnncatggtatcagagctatattcctaacgggctttcgatccacacctatcaaagagttagc

SEQ ID NO: 96281 - DNA, 635 bp, Cannabis sativa
gaataagcgagattcaacaaagtattgtcatttccataaagacattaggcataccactgaggaatgccaacaattaaaagatgaaattgaaagtctaatctcgcgaggatattttaggcaatacgtgaaaacatagggaaatgagcctaatcagcccaataacccaaataactcgagattacaacctccccccgtagagggcgaggatatcttagttatttctagagggccacacctcgcaggaaacaacagcagtgcacaaaagaggtacattaatgaactgaaaaatgaattatcaatattcactccagaaccttaaaagagagcaaagttaaataaaccaccaatcatccttttagaagaagattcaaagcatgtacgatatccacttgttgatcctctcgtgatagcaattcaactcgctaataaaagaataaagagggtattcatggataacggaagctctatcaacatcctttataaggaaacgttgaataagatgggattagaagaggcaaaactaagaccttgtatggtaaatttgtgtggcttcacaagcaacagtgtcgcgagcctaggcataatcgagcttcccttaactatggggtaaacaccgttgtttgcgacccaaatgc

SEQ ID NO: 96282 - DNA, 570 bp, Cannabis sativa
cgtggaggccctaccctatctcacattttctttgcggatgatttagttttggtggggagagcctctttggaagaggccaaaggatttcggcactgccttgataaattttattattggtctgaacaacaggttaataagctcaaaacgtcaattttcttcagcaacaatactccaggagaattgaagaagggaattagagatgtgttgtggattgaggccggaaggtaatatagaatacttggggctacctctttttcgttcaagacaaaaagatgcagatttcaaatttattctcaataacctcacctcaaaattgcaagggtgaaaagcgaaagtgctatcgaaagcagtgagagctactttgatcaaatcagtggggcttccgatgcctatgtacgccatgcaaactactaagctctctaactgtcttgtctctaaaattgatagcatggtcagggatttctcgtgagattttgagaaagggaaccatggaatccactgaaaggcctgtgataagctttgcctccccaagtttagggcctgggccttgggtttcagaaaacgaaagaa

SEQ ID NO: 96283 - DNA, 708 bp, Cannabis sativa
ataaaatgcttctttctctaagatttgtatttatattcacaacaaaaacagaaaaatagaaaaagaaagggtatgcatatatatatataaatatatatatatatttattgagtgttgtaatgtaccatattttaatgatccaaagaaaataataacattttttaaacaaatgatctttatgtataaattaggattgaatatatatataaaataataaaagtaaaatttaatgaaatgctaatagtttaatagttttctaaaaatgcatagcaaactaaccatttcaccctttataaaatgcttctttctctaatatttgtattttatattcacagcaaaaacaggaaaagagaaaagaaagggtattcattgagtgggtcatgacaaaaaatcaaaaaaacaaaaaaaattctaaatcgcaatacatccacacattacctaagctaactaattcaacttaaaattccttgagaaattaacaacttttcttgtccttacataataataatatatctgaaataaaaataatttaaacaaacaaaatcaaccctaaaattttctaggctgatgatgggtgaaagaggaggggattaatttctaataatgactataattatacataatagaaagacgaaaagagagagaagaaaaaacaaagcataccacaaacatcagcccaaataatgtgagtcttctgagaagagtaat

SEQ ID NO: 96284 - DNA, 563 bp, Cannabis sativa
  modified_base (50)..(73): a, c, t, g, unknown or other
caagaaacctaggccttcttgctcgaattgtggaaaacccggccacctcnnnnnnnnnnnnnnnnnnnnnnnnggatttcctcctggttatggggacaaaagaaaacaagataaaggcaaagcaaaagccaacattgcagccacaaacaacccgaaggttgacactgatagcagttctgttcaagctgatctatcctctcaatgccaacatctcatttccctgttgagccagcaactcagcagcaacatcactacagatcctgctgcaacaacccctgctgcatcaaacttagcaggtaacaattccctctcaacctcttggattgtggataggggggctacccaccacatgtgttgcaatatcaattgtttttcatcattttctaacataccatttcccaaatatgtctctttaccaaatggacaacacattcctgttctaaatattgggactgtgcaaattaattctaacatcttactgcagaatgtcctttatgtcccacggtttgagcttaaccttttttccatatcagatttcatgcttcactctcctaattcaatct

SEQ ID NO: 96285 - DNA, 1159 bp, Cannabis sativa
taccttcacaaacacgtaataagtatgagtcgacagactcagtataaaaagcataatcataaacataaacatatatccagaccataactaggtgcccatacacctactcaagatttgataaattagtcaggaacgttcgcgacaaagtataactaactgagaatccagtctatacccagtactttagtcatactgatgtggtagcagttaattcaaactatctggatgcctagcatatatatgttggtatctctgtacaactctatgtacacctcgctaatgccatgatatgctaatttgatggccactgatttgcctaacatatatttgttggtacctcggtgcaactctatgtacacctcgtaggtaccctgatatgttattctaacagcaactaacatgcacaataaacatgtatacatagatgcaaatcattggcataggcacaaagttttaatgccaatggcttaggcacctagagaatagtcaacgcctccaggcttggagcaattctctcaaagtcctaatgccaatggcttagacgtaaagtcataatgccaatggcttaggcaaaaagttctactgccaatggcttaggcaccttgagaatagttaacgcctctgggcttggcacaattctctcaaagtcctaattccaatggctttggctcaaagtcctaatgccaaaggcttaggcacaaagtcctaatgctaatggcttaggcacaatgtcctaatgccaatggcttaggcaccttaagaatagtcaatgcctccaggcttggcgcatttctctcaaagtcctaatgccaatggctttggcgtaaagtcctattgccaatggcttaggcacaaagtcctaatgccaattgattaggcacaaaatcctaatgtcaatggcttaggcgcaaagtcttaataccaatggcttaggaaaaaagtcctaatgccaatggcttaggcacaaagtcctaataatatggcttaggcacaaagtcctaataccaatggcttaggcaccaagccctaatgtcaatgacttatgtacaaatcctaatgccaatggcttaggcacaaagtcctaatgccaatggcttaggcacctcaagaaaaagcaacggctccgggcttggcccaattctctccatgtcctaatgct

SEQ ID NO: 96286 - DNA, 642 bp, Cannabis sativa
ccttttggaatcatcttttttcatcgatcccgaggcttctaaatcaagttttccaacagtatcgtgccccagttctctcctaggtttcgagatttgatgtactctggatttattctttaacccaatcattcgcaaatggaatggatctttatgtcttgaatcgagtcgttgacggaggtcaggctttttcaggttcagatgctctcgtagatcactcccgtcatgattgtggctggaccctgcccttcctctcaaggtttgattcacttttttctccctagaaggatttgtgcgagtttcattcttatgagactgaatagtgggttggcaattttcgtctgatgttccacgtatcccaggttgtacccctagtctttcctcagttacctcaggttgcatctcctgagagctctgagcatatccctgggtcatcttctccatcttgagttgtgagccacaaggtttgcctcgtaaatctcttttctcaaggtcatgttgtttttgggtacaatctcgctgcattgcctttacgatagctatttcacgctccaactcgacattacactgtttgcttcttccaatcgacgcctaagatggcgattttctaattccacaatcggtatgtatatggttgggtcgtaa

SEQ ID NO: 96287 - DNA, 563 bp, Cannabis sativa
cagaatatcttcgacaaaagcattattgggctgatagttttgcccttgctggtgattcgtatttagaagtacatttagtttcaaatgtgttgaatggccttgatgcaaagtaccttacaattgtgtgtcaactggaagctcaagcaaagataggacccacatggcaagaaatgcaagagactttgttgagctttgacagtttgcctagacgtctacatgtgcttacttccaatggcaagagtccaaatcctgttggtttttgtggtccatattagaattataaaagcaaaagtaaaattttgataaaataagttttatctaatatgaaccataagcctaagtatctcaacataatgaatatagattacatctaatctgctaaaaggaattcaattaccttttgatgcctatcagggtatccttaattcttttcgtataacaagcgaacatccaacctaagaacttgattgaagaatgcacacattgatcttccaagtcagcatcaacactcaggaataaagtgggctattaaatcttataggatgaacagatttaggtattac

SEQ ID NO: 96288 - DNA, 596 bp, Cannabis sativa
tattcatgtgtggcttctatttgtatagatgttgagcatatatttcttttttatctttctgtatatcatgtgtatttttcttttggttatattttttataataagggtttctgtttcttctcttatgctattttttgatgtataaaaagaaaataaaaagattattatgcttgagaatgtacacatattgtgttttcgaagattccttctatatgaacaattgttgagtttgtttttctggtactgtgtgtgcctttaaaacgtttaagggttttatattttttttctttttttggtaatctttactttcaaggaaaatcaagagtcttttagttgtgggaagcaaggtctataggcttatacttttctttttgttgtttaatataatgatgacttctacggtaacttttgttgaatatctctacagatgggttctaaggaagaatgtgaatctagaagactagaactggcaggcacccctccaaagtattctattacaaacaaagaaggaagtgtacaagttggacgtcgcacacctttgctgcaaatcatttttgttccccttaaagtaccatacacaatattttatcaatata

SEQ ID NO: 96289 - DNA, 867 bp, Cannabis sativa
  modified_base (287)..(291): a, c, t, g, unknown or other
acagtctatatattttactattcatattcagatatgatatcttattattcagatgtgtattcagatttagtggtctggatcttaataaaaacaaatgcacccttagcctacttactccaatatcaaaaagcctaataaatttaggatttaacttccctctctacatatccctttcataggcaatactcggagaaacacaaaatctcctatttagaacttgatattcctacgctttaaatcagcgtagctcttctatgtattcaatgaagcgagcatacaactcgaannnnntctatgattttataagttccttgggtcttttcggtccatcgtattcttttctcaccgtgttactccggtgaacatgtgtctaatatttctctcataccacacttattaaagtacctaaccaatggtaaatttaattatcacttttagagaaacacttcgttaggagaagagattattctaagataatctaaccttcatcaaatacgcccataacatgtttctaatattctattgattctctcaagttacccatctttcaagaataaaacatcatcctattttcgctttaatctccatggttctcaaaaacattctttaattcttaacatcatagccaaaaatatcaaccttagaatttcacaagattggaatattcctttgtatgaactccatatcctcgtttattgtataaatcatctacactgatagacaacatattaactcggtatgtccaatcgttacttctcggtcgaagtcataagatcccacagtacataatttataattatgtttttctattccttctatgggatctcctaagctgatgaacaaatttaacttattaacaagctaaat

SEQ ID NO: 96290 - DNA, 524 bp, Cannabis sativa
ttttatcaaaacggtagtggcaaaccggtgcagagtggccaaacttcaggcaaatttgatagatcaagcgagcttgaggtggtatgtaagcacgaccatttcctttaggagggaatcttgagtaagagtcagaggcatttcctcgagcaggtggcggattgaatcgattgttgttcgatctggaagcaccaaatgcaagatttgcttgcattttaaccgaaagatcagtcatgttgttgtgatgttcaagtcgactttcttgagacataagaagcgcctggacttcctcaagagataaagaatcactacgggatgtgattccagataccacaacatcaaactcgggtccaagaccatttaagagttgaagaacgatgtcttgagtgttcaaagaactaccagcaatggcaatagagtctgcaagacattgaactttgtcaatataatcagaaattgacaagttacctttctgaatatgagagaattggcctttaagttgtagaagccgtgcacgagactggctt

SEQ ID NO: 96291 - DNA, 527 bp, Cannabis sativa
ctttatatgatttatacctataatgagagatcaaatgatcttggatagaatgtatagaatttccattaccgatcttccaaataagccccttcctaagcaactcccttccccaaataagactttgccaagtaggtgagggcatatgcccattattagcatctaagaaattagtatgcctaattttaacaacctagcaagaagataagttggattctgaaatagcctccaagtctgtttaactaacatggcttggttaaaatgcactaagaataagaaccaaaacccccggaagtacttagagttacataaagtagaccaatacttctagtgaatcttagaatcttttcccaaagaatctcaccaaaatttagcaattttagactcaatatccctgcaaacaataacaagaattctaaggtggagaccagaaatcatacgcctgaaccttgtgctccccaagatccctagaatctaagggacgaagaagaaacttcacgagtaaacgtggatatagaagaacaagatga

SEQ ID NO: 96292 - DNA, 584 bp, Cannabis sativa
ttttataagttattaaatatcatagtttgagtatattataacataataaatattgtaattcagttctttcagaaaaaaaataaataataaatattgtaattatatgtaatgaaaagtccctacatgtaaattttcctattttatatactgaatctcatctaataacccttctctctcttatctcatattacaaaccctaacccccaaacttcatcccttcccccgacgcacgcaccaggccagactgccttcttggccggtaaaaattcaagcaaagtcggcgaggtaagctatctctcttctctaatctctacttttcattttcaatttttctttgctagaatggtaaaggttctttctcaatctagtcttttaatttctggaaaaatctcagcaagggtctaggctttttctcaatcttagtctaagacaacggtctcttactaaaagagaaagacagattctcgtctttgtaaatttcaaatgataccagctaccttttttcttatcaaaacatataaaagaaaaggaagtagaagaaaatttgtggattgtcaactcatcttcgccgcccaccccaccta

SEQ ID NO: 96293 - DNA, 870 bp, Cannabis sativa
ttagccatgaagctggctagagcttggcctttaatggaaattctatgttaaaaggtggccttatatcggccgagcctcggtggttcacttcagtggttaagcaggtgattcaggttttggtgatgcatattgcaatggtcggttggcttgcattacattgggagttttagtaggagagtgaagcatgtgtacttctcgtccttctcccttatactttagggcgtaagggaattgttgaatttccctttttggccattatgttggtcagagcaatcgttgttgcacttgcatccaattttcccattgatggagaattggtaaagatcatttgcgctggttggcacgtcgacaacacttggggcaatatgatgccctgtgtctgtccagcattaacttgccctcttatttgggcttgctagacagttttttccaactttatgaagccatcgactgactcaaggaactccttcatgttactagttgagatccttctaatatctttccaaaattcactaaattgcaagatgcctccgagtacggtggtatatcggcctttttttgccattcctttgaccttggtggcctcagccatgaacctttgaatgtagtctctcaaaaatttgtcttgtcttttctttttctcgacaagatcttccagtcgtgaaggtatttgtcttgaggtagaaaactgaacatagaactctcgagagaattctcccccagaattaaatctttctcgggccagcctcaaatacaattgttgggttatttcagccagagtttccaaaaagattcggcatcgcacatctccagttacttgttggagatctgcttggatctcaaagtacttcaggtgtactaggggatctt

SEQ ID NO: 96294 - DNA, 606 bp, Cannabis sativa
ttttttatacatggttttatgttgaaaggtgtctctcgactttgtcatgtgaatgtatgtccggagttagctgaggcaattggagttcgtgaggctctcagctggataaaagataatcaatggccacaggtgactttagagactgattgtttggtggtggtacaagcaatttgtaatccaactcatatgccccttttttttggtgatgtaataaaagagtgtcgaaatttgcttgtgattttaagtggtattaattactatttcttttgtgaaacggtcagcaaatttagtaactcatgcgattgctaaagctactatttcttactctgttgtgttttcaatatgggggatatcccaattgaactgcttccttatttgattgttgaatttgaaggttaataaagttttgattactttcctaaaaaatatatatatttttaaatattattaattagaacaaaaataaatatatatatatatatattttaacaataatacataataaacatatgttagtttattttcgattaatgttgttatattttcagttacttagactttggttaagagaaatagttacagttagtttctgttataacaacccta

SEQ ID NO: 96295 - DNA, 588 bp, Cannabis sativa
ttaagttttggtgcttcagacacaatttttgtcccaccaacagctgttgaacaacctacaccagcccctcttactactacaaataaacatcccatggtaacaagggcaaaggcggggggtgttaaagccaaaagtcctagtagcatccaaggaacaactaaccttagctgctgctctcaaggatcccaagtggcttgctactatgcaaattgaaatcaaagctcttactcaaaagaaaacttgggtgaaggttcacttacttcctggtagaaaagccataggatgtaagtgggtttacaaagagaagcaaaattcagatgagagtgttacacaatacaaagcaaggttagtggccaaagggttcctccaacaatatggttttgacttcacagaaacttatagtccagtggtgaaggctgctacagttaaatttgttctcacaattgccctatcctacaactggtttataagacaactaggtgtgaacaatgcatttttaaatggggatctccaataagaggtgtttatggctcaatcttctgattttattattccagaagctccccatctagtctgcaaactgaccaa

SEQ ID NO: 96296 - DNA, 544 bp, Cannabis sativa
aggcgatgtgggattgcacagcttacctggtatttccctttacgtatcacgcaactactgactgtcacaaaccttctgcgatctttcaatccccttttgttattgttatggtcatcaaaacctgtaccaggagtgaaaagaaagaaaaatactttagagattgtgaagggaatcattccctttcatgaggagattgagaagaatgctcctactaaaggaatacatacatacaacgacttgtattttgagggttataaacctaacactaagtcagtattttctttcttcttttatttgtttttgttttaaattttcactacataatattatgaattattcacatttctataataaatgcatttttttcgattatagaaataagttcatggctgacgctaatgacattgattttcatttggggatcatgcatataaaaaagaagtattggttttaccaacttcagacttgtggtcaatttttgtctgattctgtaagtatattattttatcagttcaagacgatgttacattattatttattttat

SEQ ID NO: 96297 - DNA, 660 bp, Cannabis sativa
ctctccatgttttggatcaacattagaataaataacactccattccaactacaatttctcaagttgcttcctctccagtacaatttgattcggtgcttttgtaatattggtcacattttctaacttcttaatggaaagctctccatgtagactatgaagttctgccaattcttctattttagcaccactatccatccccaccacaaaagtagtcaaaatttggaaatttgtcaatttacttatttgacttggcatctcgactagactatctccactgataataagatgatgcatatctttgggtagaatttgaagatgatcacaatcctctaacttcaatgtctgcaaattgtacaatttagttacgaattcgggcagcatcacaatttgagtcttggaaagatctaaatagcgaagatgtttaagttcaccaattgagtcagagaactcagccatacgaagaccacgaaaagatagaactctcaaacgtttcaacattgataacaaattctgcactacttccttagaagaactgatttcagaatatcttgaacttaatgttaaaaaggttcgcaaatgtgtaccttcaaaatcatagctagataccttcttatcagtagaatgttccattacacatccgaggtgacgtgtcttcttctc

SEQ ID NO: 96298 - DNA, 738 bp, Cannabis sativa
aaccaatcttttcttttctggttttcaattcataccatgcttattttatgcattattttactttgtaaagcaataaattcagatagaaaaaagaagaacaggaagagcttaatcatacagaatttcctatcatttagctaaattaaaattaattcgaaattaaaccttaagcccgaaaattacaaataacatatgcaaccaaaaattacaaaaactcaccgttgattcagtagaggagtagttatgatttctcttgagcggacgagaatatgaatttgaacacatcaaattaatttatttacctactctatggagagagtgaacgaagttatggcaaagaactttgggaaaagaagggaaaatgacaaggttgtaaaatacgtaggataatcgggaaagaatgaagaccgatggtagaaattatggaaaaggactatggtacagagaagacttgacccacgggaatagggaaagagtgaagaccacatgtaaaaataatgagaaatggactatggtgcataagacttaacacacgggaataagtgcagaatacttgacacacgggaataagtgtagttgagcaagaggcaagagcaataagtgctcatttttgctggaataagggcttctccaatgggacattataacctcaaaaatagtggagttcagacataaaattattccaatggaactctaaatgccatcttatatatatgggagtctatagtgtcacactaa

SEQ ID NO: 96299 - DNA, 687 bp, Cannabis sativa
tttattaaaattagaaaaaagtccttaaatttaacaatctcaatagttcgagggaaatttttaacggtcaaaaaaatttaggggaacgatttagtacatgtcacaattcacgaggaaaaattactatttgtccttataaaaaatcaataactattataattgtaaaatgccacgtacctcatggtacacatgcatataactttattgggttgacttgtgttgtatcttagtacacatgtctgatgtctctagctaagtgtgtttttaatgaaactttgtaacgcggttaacttgaaacactttaatttatttattttcctatcaaaactagtttcaatttttctaaaagttatgctaaatgttcgatgcatgattccgtttttattattattataattgtcagtttgcatattgattttgatagaaatatttgttgtgtgtctattcattttcaataaataaatatatatagaaaatatgttagatttttatttaaatttaattagttttattaattcaacttgattgaatggttctttgctgtattattccatattattaaggaaaattatagtaaatgaccacaatttataggattatgttagtatatgtcctcattttcaaaattatagcaaatgaccctaaatcataggactatattagtaaatgtcctcatttcaaaatcat

SEQ ID NO: 96300 - DNA, 1064 bp, Cannabis sativa
attcaaatagtgaactgaaacaaatttttaagaaaattaagggcgggtttgaaaacctaaaaaaatttgaaagtgaacgtaactaaaggtaattacacaattttatgtttttatttgaccatattattatactgtaataacgtaatttaaaataattgaaaggtctcaattatactctttaattctcataccacataagaattggatgtaattacttaaaaattttcattttaaatatgaagtacaaattttttattttaaatattaagtactaaattattattttattgtgtaattattaactatttttacaaaaaagacataaaattaataaataattaccacgtcatattcaaacacacattatattttattataaagtgtaattactatatattacgaagtgaactattcatagagttaggtcattattatctaattcaatcaaatataacaattcaatctttaggtagatattggatattttttccaaccaatttttttatagtttggacaaaaaaaagtgataggtttccaatttgatcaatgttcactctcatttactctcgattatgatagaaatttgattatttgagtctctctttttgtttttttaggtcaaaatttattttcaataaatataataactatctaagtcagagctaaagtttataataattttagagtaatttacggcataaatacttcaatttaatttttagttgtaaataaatacttaatttttggcgacaataatacctaaaagttataattttaaaatttttctaggtacctgattaagtaaattgtcacatgacaatccttgattggtcaaagtcattaaatttttattatttaaaaaaaaatagttcaaatataccaataaaaaaatgacacgtgaatttaatagcttaatatttagcggttcggtacctacaaagttccagaaatataacttaagtattattatcgccaaaaattcaactgaaagttaaatttgtattaatgccgcaaattacttttttaaaaaataatttatctttgattaaaaaaaaaaaaaaaaa

SEQ ID NO: 96301 - DNA, 1074 bp, Cannabis sativa
  modified_base (33)..(57): a, c, t, g, unknown or other
  modified_base (797)..(808): a, c, t, g, unknown or other
ttactaaaattaaacaaaagtctttaaatctannnnnnnnnnnnnnnnnnnnnnnnnttttaacggccaaaaaagttaaggaggcatgatttagtacatgtcaaagttcaagggaaaaaatggctaattagcctttttttttaaaaaaaaaaaaaagaaaaaaagaaaaaaggataactcttaatattctttctcccataatgcctcacaatatcttgacaaactagaatattatgagcaatgtatctcccatgaacaaatccaccctggttttcagctatgatctcaggatgtattcttctcaatcttgagcaaataacctttgtagcaaccttataaatcacattgcagaatgaaattggtctgtaatccttcacactatctaggcatttgcctttaggaattaatgtaatcgttgttgcattaatttctttaagcattttcctagtgctgaggaagctaatcactgcatcttcaacttctgttcccactaaatcccagttgtcctgatagaatgcactaccatatccatctgggccaggagccttcatactagggatagcaaagatcgcatctttgacctcaagtgtaacggccgtatttgaaatttactaaactcaaaaactaattattttatattgtaattaattaaccatataggtcgagatcccgagttataaaacatagttaaaaactacatttgctattacaaaatcctttaactttttttttacaaacgacaggcaataacaaaaagcaactcaaaatattgaaagaccgaaaccctccaggttgcnnnnnnnnnnnntgtacaatcactgccgagctctatctcactgttcctccagcttagcctttcctttacctacacaaggtagcaaactgatgagtcaacagactcagtaagatatgcaatacatatatatatatataagcaatgctaggctggctttatgcttaagcttccctgagctcaacaaccgagctcaccaaatggttaagaacgttcttaaggaaagtagaccactgtaccaaatgcactaaagtaccgaccctgtactcgtgttggtagag

SEQ ID NO: 96302 - DNA, 1159 bp, Cannabis sativa
cagacatctttcttatgcaggaagggtgcaattgattcactcggtgctccttaggcttcgaaataactggatgagcatttttgtattgcctcgaagtgtcactaaggaagtagagaagatatgtagaggtttttttggggctggaatggcaatagaagtaagattcatttggcttcttgggagaaagtttgcctcctaaaagcttacggaggtcttgggttcaaagatgggacaagttggaatcatgctattttagctaagtatatttgggctattacttctaaaagagatttgctttgggtcaagtggtctaattgtatctatttgaagaatagtaacttttgggagtatgatctcaaacatgattccagttggtattggcgtaagctttgccatttgagagataagttctcaagaggagatatccaaaaggcaggggttggtaataagtttaagactaattggctttacaacagccggttagtccagcaacagtttccctacaacaaagctgtctggagctccctaaatttatccaaacacaggttcatcctctggcaagtggttaattctcatcttctaacgcgagataaactagctcactttaatattgttccagattctttggagtgcccagtgtgtgagatggaagtcgagaatcacagccatttattttttgactgtgttctgtcgaatagagtgttgcagggaatttttgcttggctgcggtatcgggcttggccgactgctactaccggttgggaaagttggcttcaggttaggatcactaactctagacacagaattcttgtcgatgtgttggctgcaacaatgtatagtcttttgaacaataggaacaattgtattttcaataggcattcttattttgtcaactccattgttaatgatgtaaaaagaatcatatattatagattgcaagtggttaaaaatagatgtttgagggggtatgagagaaaatttgtagagagtttattttgattggggggttgccccttgcttgtatttgtacagatttgttcagttgttgattaatgaagctttccttcttgataaaaaaaaatatctacatcgtaaatatttaaaatatttcacaaagactcaagaaatttaaataaatttataatacaaaaagtagagt

SEQ ID NO: 96303 - DNA, 737 bp, Cannabis sativa
ttcgggttttattgggctgagcccgaatgtttcatttctaggctcaaataaaatttaattgataaaaatatcatttttttttatttttaacatttttttggatcttttttccttttataattaacatatatatgggcctaaatagtgaatttggttcttcttttgcggacccaatttcaattttaagtaactacattttcctggttttctctttcttatatattgactcactcactctcaaactcaagcattctacagtctacacttcttctactttaataattccagtagctatatatagtataacactataattattatataaaaattaattaaataatcaataatgtatacataaaatataaattataaaatcatataacattaataaagagtcaagaatggagaaacatatctcagcagttagtgagcattgagcagcagacacaagcgggctccaacaatgggggcacgggcggacacacgcggacagatttcgaaaaacggaagagggtagaggaggctttggatgttagggaatcccgtcggagaagaagcagctgctaccgctgggagtttcttgagttcttctaggattttttggtcgaatgaatagtgattagcaatggtgtactgtatagtgaatttgaaagtgagtattattattttttaatttttaagttttaattttaataattaatattattattttttaatgtaataaaaaaattattttt

SEQ ID NO: 96304 - DNA, 584 bp, Cannabis sativa
taccctttgggagcccttgcccaaatctgcaagaagaaaaacacttcaatcttaggtatgtccatgatccttgtaaactataacttgtcctggtgctttcaaaaaatataaaatttgttctagtgccgcccaatcatgaagtgttggagaagatataaattgactaatcacactaactaggaatgcaatatctaaacgagtcacagttagataattcaactttctaaccaatttgcgatatttctcaagatcttcaaatggttccccgtcacgtgtaagatacacagttggatttattggagcattacaaggttttgctcccaattttcctgtctcaattaaaaaaacaagtacatactttttttgagacaaaaaaacaccttatttactcctagtaacttcaatacccaagaaataattgaattctcctaaatccttcgtgtgaaattgggtatgaatgaaagatttaagggacgagataccttcagtatcattttcagtaataacgatgtcgtcaacatacactactaacaaaatgataccaacagttgatcttttatagaacacagaatgatctgacttac

SEQ ID NO: 96305 - DNA, 2399 bp, Cannabis sativa
aaaacgacgtgtcgtttgggctttgtcagccaaacgacatttcgtttcgacttatctggaaggctttttttgagcagcaaaacgatgggtcatttttaccctgcgacacgtcgtcctccacaaacgacatgttgtttttgaaaaacgacatgtcgttcctgcaattaaaaaaaaatatgtatgtgattgtttaacaatgatggcatcataaaacaaagaaccaattctaaaatattttaaggtgtttaatctctccaaagaatataatctgaaaaaatatgtgaacaaattttcggttcaggatttttttcttcccctttttattttttaaattgagataacgttttaataaaaggaacaaatatcagtttttgttattcaaggaataaaaaaaagaaacaaagaaaaggaaaggttttcatcattaaattcggaaaattaactcgggacttcttcactgaactattaataatcatatctttaagaagtcatacaaatctttctaaaaacagagtaagttgattagggactgaattataaacctatcaaaagttgaaattgaacaaaaaaactgtatacaccaatacttttaacaacatcaaacttaaatagccaacaatacaaatactaaacttcaaacgatttggctgcaagtctatacttccaaattgagaaaacacaaattttcaaacaaaaacattatcgtgtatttacaatctttcaatttaatttcttgtaaaaaaaaatagaaacaaaaattggattggaaaaacaaccaaaaatacaattcctctttcaagtaaaatcattgtaatacttttcaatggaaatgaagatttcagaacacatgcaaaagaagaggaaagaaaaagcaaaataggagacacacacacagatatatacagagagagaatgagaaaaacagtgaaagaaacccattcgaaacacagcgtaccttctctaggtttccagcgaactggtgttttggtgaagttgcaatattggaagatgaagaagaagaagaggaagaagaaagacgaatcttatgatcgggagagctatcacagaaggaggcagatgcagaggtttggccatttcgtgaagcaagctcctgcttcgacggcaatggaatcgtctttccaaataacttaatattaacagccgagtccttaaactgtgacattctcaaacaacgcccaaatatttctgctttctttatctttctctgtgaattgtgtacttctttctatgtctctacatggaaggaaggataaaaaattgaaattggtgcttgttggacttgagttggagttgtaaggtaatggagttttttatgaaggagaaggcagtggtgtgatggtagtaataagaaggaagaataggtaaaaagcgtggagtttttatttaataataaatgaggtgggagtacgacgtcatcgaggaagggaaatgttgtgaggcacaagtttttattttggtggggaaatagatcttgtgaggagttggattcccttacattcgttaaaaagatttggacccatttttttcttccatgtcacctaaaaagtacaattcacattcccactcctttatttttatattttcttcattttccattctttcatattttaaatttttcctcttagttatcatctactaggaaaaaacttagtaatgatagagacactaacttttattttttgtttattatttttttttctttcatgaatcagtgattttgtattgcactaaaccaatttgtacaacttataggcacctcaatagaggcccaaaaatgattgctaattacatcttttgacaaactttggaaccatattctatcctctctctttgttttcttaggcatgaacatagtaactcttagtttgatacattgctttatgccctcaacaattttatttactgtactcttctcctttctccaaataatcaagttccttgttgtccataaattgtagaccaaagcagcacatgctgctgccagcagcagttttttaaacctgcttgtttttgccctgccaatcaattgaatgagctgggatagattgttactcacagcagtccagccgaggcacccctttaatttcctgcaagccttctcaagaaaattggcattggaaaaacaagtgatcacttgtttctttccctttgttacagaaatagcaagcctccttaagttgtaacccaaatttgaggagcctatcctttgttttcaacctattgtgcattgccaaccacagaatataacaatgtttaggagtgtttagtcgagcccatacctcattattctaattagttttgatgccatccgaggtgcacaacttgtaaccattagctatagaatactgctggcaggtgaattgttggatgttagtgag

SEQ ID NO: 96306 - DNA, 806 bp, Cannabis sativa
aaaaaaagataaatatgtggggaattatttcatatactattttttaactatttttttaaaatttacggtttgggttgctccggtagtttctatgtgggttgttataccgattttggttacttcgttagttgctataagagtttctgtgtggtattccgtaaaaatacaaacaaacaaaaactgtattaaggtgtaaaaataaaaaaacccttaaatatgccttacaattttttttttttaaaatgacaatataattaaattaaaaaaatttgtattataaaagttattgaacctaatccatacttgttatgattgttttttatttaattaagggaatcgagtatatattttcagctaatttgagactctaacatatccctttatgtgaataaattgatattggagtcacctaacattacaaaattggatctactgtgatactatattaagaaatttattgagataagccactaatgctagcttagtggtgattgagtgatgggaaaagggagaggttacaggttcgaactcaagacgtttaaaatacaatctattaattgattgtaaaaatactattatgctacactcaaaaaaaacaaaaaagaaatttgagactaataagtggattgaatatatgtttctagtcaatttgagactaatattttgatttcatttcctatataaacaaaataataaaataattctattttttttagtgagtttaccaaacaacataataaaataataatattttaaactcatttatttcttacattaatttatttcgacttaataaacatacaaga

SEQ ID NO: 96307 - DNA, 569 bp, Cannabis sativa
aggtactttgctttcaaaattctgtaggaaagagtctggctcctagttaacagattccacccccattttgccaaaaaagctaagtttatttccttagtttttcgaaaactcagtccaccacgggattttttggtggataggtttacttatacgagcattgtattagcattgtaaccctgttatgaagtggtactctattaataattagtcgtttactataatcattattaaaataaaacaaatatgatttgatatattatattattagtgatatgacatctcataaaaattctaggcactatgagtattctttagagcactcacatcacataaaaaatattacacacaatgtattataaaaatttgaggtagaatagaaaaagtaaatttttttgtaatgtattgtaaagcatggagtataaaaaatgatgggagtgcctcttagcatttgtcaaactgaaacgtgtggggctaaaactgaaactgattggagtgtctcttaccatttctaaaagtttgtggtattaaccctcggaatcctttggcatttcttaggttttatatatata

SEQ ID NO: 96308 - DNA, 629 bp, Cannabis sativa
ctacttgctcggccatctacccctgtagagggaaagggaaaagccgtcctagaggagcgggaagattcttcggatgatgatgctccatctgtacttgttcgggtagatggtctttcctgtgcacagagtacttcatcttgcacttatttttcttaaattttatgccttcatatattttatgccttcttctgactgtattgtttttcccgtgcagaaatgtctcagaagatgattgaggctctaaagaaaagagtaggggggagctcgggcttttcccctccgaccaagaagtctaagggcggtgagactccgtccaaagagaaggcaccagctgaagaggtcattgatctttccgaggagcaacctactgtggaccctcctgccttgaaggtcgccaagtccaaaggttcccgaggatggagttcagatggacctgagtaggctaaggctggatccgagctgatcagaagtggatatgaacaagttagggatcctgctccacctttggtattgtgcacaaagaccaagagaggtagaggcatgctcaaccattatgtgagtcggtcgatccgagaggtgaacgaacagttgctttagcggataatgacttgtctttagagctagttttg

SEQ ID NO: 96309 - DNA, 743 bp, Cannabis sativa
agcaaactcagtattggtattgctaagaagctataccagacaagaaacaaagtaaacaacgttcagggattaaaacacaaaaccaaactcaatacaaacataccatgtcaaaagacaagacaagactatatttttgaaaaattttatagcacgaataaaataatttttaaaaagaatagtacatgtagagaagcatttgaaaataatagagatgttttcaattagagaagaaatttacaccatacgttgaaatgtgtatttgctccattgttcttttaaattttgaggtatctttattttgaaagagctattgggagtgcttcatgacaatttagacaacatgcataccaaatatcgaaaaactcttaattcattttaatgaagaagccaataagtagagctattcaatattcatgcttagtttagccacaatttcatttgaacagtaacattagttgtgtatgattgttaatatactagttgcttctggttgattttggtttacttttaccttggcataaagtattatagtgaagaaaagctgatcccataatggagcactttttagttcattctaataaatgaaagttatgtatgtgtacagacagataggtagataggttgtaattgtaaactataatgaaataaagactagttttgaagttgttatgcttgctttgtgcaaattttgaactagtgtcggcagttcccacatgtagatggatgggtcaaaatattatctg

SEQ ID NO: 96310 - DNA, 580 bp, Cannabis sativa
aatgaagccccacatgccggccaggccctagaaataaggctggccggccaacgtgtataagcaaccttaaagaaaggctgaacgaattgtagggtctacaaccaccttctagatgattctcaagctaatctacatttgcgagacagattcaacaagccatgaaaatagggatatttcctcaagatattagtcttatgttttacgggtttagttattcttttctatatttcaaataaaagatgttaatatccctattttaaagggatatctctccttatttgaattagaatatcttgcaacccctacactatataaaaggtattagaccacatgaaaagagaccttcaatctaagttcgagatgcctaaagctttctcactctctgaatgtcacacgccacttatgtttcctagacactaagtctatctccttcacaacatctcacaagttcttcaatttgtaacactttattctcactattgtactattggagagagccataactagaaattacaaggtctaagcttgtaatttgcatgatattatctcaagaataactacaactaaaaggggagtatgt

SEQ ID NO: 96311 - DNA, 742 bp, Cannabis sativa
  modified_base (107)..(111): a, c, t, g, unknown or other
ttctcaaagatgttaggcatgttccagacattcgccttaacttgatatctactggaagacttgatgatgaggggttcataaactggtttggtgaaagtaaatggaannnnnccaatggttctcttgtagtggcgaaaggaaagaaagtgaatactttttatgtcatggaagctaagctacacaaatgagagattaatgcagttcaaaaagatccaaacatcaaactttggcaccagaggctcaatcatatcagtgagaaaggacttcaaactcttgctagaaagcaattcttaccaaaatcgcaaggtatacctcttaaaacttgtgatcattgcttagctggaaaacacatacagttcttttcatacgcatgcatccaccatctaaaagatctaatgttattgatctggttcacactgatgtctgtactatgcaaactagaactcttagatgtgcactttattttgttacttttattgatgaccattctagaaaagtttgggtttatgccttgaaatctaaagaccaggtgctcgatgctttcaaagaacctcatgccaaaattgaaagagaaactggaagaaagttgaagtgtgttcgaacagataatggtggtgagtacaaggatccatttgaatactattgtattctccatggaatcaagcttgagaagtcagttccaaaaactcctcaacataatggtgtggcagaaagaatgaacaaaacaattgaagaaaggatt

SEQ ID NO: 96312 - DNA, 2637 bp, Cannabis sativa
  modified_base (2269)..(2270): a, c, t, g, unknown or other
taaacctagggcataacttggcctttttctcgaaatgtttaattccttcatcggagatactcgtatgaatacatgatctcatacctaaaattctacgtttgtgcactttgaatttgcatagctctttttcctactctgaaaggaaagtattctagccttgatcttttctatagccttattggttcgttgcactgattctggacctaaatattttctttctccagtttcatcccagtgagttagagatctacacttcccgccatacaacatctaatatggagccatccctatggtactctgatagttgttgttgtatgaaaattctatcaatggtagctacttcttccaggagccttcaaaatctattacgtaggccggcaacatatcttcaagcatatgcattgtcctctcagactgtccatcagtctgagggtgaaaatctttactaaatttttaatttggtacctatggctcgctcgggactttgccaaaattttgaaattttgaggtaaattttggatctctatccgatataatggaattcagagccccatgtaacctcactagtcttttacatataactctacatactgatctactgtaaatgttgttttcaccgtagaaaatgtgcagacttagtaaataaatccactaaaacccaaatataattgtacatccccgtggatctaggtaattcaaccccgagatcttcccacttccactaaggaagagttagagaatgcaacaatccttcaggtctctgatgttcagccttaatctactgacaagtcaagcaacgagatacaaattctaccacatttttcttcatttcgcaccactagtagaatggtttttaaatcctgatatattttggtagtgctaggattcagttaataaggagtggtatgagcttctttgagaatttcatttttaagttccatactacttggaacacaaactcttgttctacacaacaacaccccattacccgacactataaaatcttcaactttactagctaaaacttattgtcggatcttcaccaattctggatcagttaactttggagctttaattctgtctaatatatccaattgtaatgtcaaattattatgtttgcctactacaaactcaatacccgatctaaccatatcatttgctaggtaaggtgaaatcttaatcagactagttacttgtctgggcccctttttgctcagggaatctaccaccacattatcttttccgagatggtaaaagattttacaattatgattcttaaccaactcgaaccaacgtctctgtctcacattcaaatcattctgagtaaagaaatatttgaggctcttgtggtctgtataaatctcacacttttctccgaagagatatgtcgcaaaattttcaaagcaacaactactgtgacaatttctagatcgttcgttggctattgttgctcatgttcctttaactgatgggaggcataagcaatggcccgattggcttgtataaaaacacaccccaaaccctgtttggatgcatcacagtacaccacgaacttctctttattagattgtagggctaatactggagctacgatcaatctttgctttgtttaagttcctgaaatgaaagctaagctttgctttcttcacacttgtctgtccacagaaattgctgattctttttggtgagttcagttaaaggtgttgagattttagaaattccctcaacaaactgatgataataaccaggcaaacccaaaaaacttctgaattctgtaactgtctttggtctcggtcaatccctgacggattcaatcttccctcaatcgactttgatctcgtctttactgacaatgtgtccaagaaaagacacctgagataaccaaaactcacattttttaaacttggcatacaatttatgttctcgtaatcgttgcagaaccatccggaagtgtttctcatgctccgcttctaattgagagtacacaaggatgtcgtcgatatatactataacacatatatcaaagaaatccttgaataccctattcatcaaatccataaaaattgatggagcgttggtttgtccaaaagacataaagaaaaactcatattgcccatacctagtgcgaaaagtagtctttaaaatgtcctcgtcttggattctcaactgatgatagcccaattagagatcaatcttagaaaagactgccttcccctaaacgtgatcgaacaggtcatcgatcattggtaaaggatacttattcttgatnncaatttatttaattcttggtagtcaatgcacatgcatagggattcatctttcttcttaacaaatgacacgggagctccccaaggtgacacactaggtcgtaaaaaccctaggtcaagcaaccctgaagctgaatctttaactctttaagttgtgccaaattcattctataagctaccttagaaactagttctgctccaggtgctaaatcgataacaaaatctatttttcactacgacgataaacccagaagatcatcaagaaatacatctaaaaattcttgaactactctgatgtcttctagccgaatttactcaggccatgtggtattcaataccattgcagaaaacctgtaacaccctaactatc

SEQ ID NO: 96313 - DNA, 515 bp, Cannabis sativa
gcatataaaccaccactcctctctcttctttagagcattacaattagatactataattgctactatggtagatttattgtattaaataacaaataatactttatttagataaaatattgtattgtattaattattatgattataaattttaatagaatatgaattatattatttattacacaacaaataatctgtattaatttatattataataattacaataggttcagggttgggaccctgaacctagacttagacctcgaacccaaacttgaagccgcacctgaacctcagacccgaacttaaactcagtcttagacctgggcccggggttagagtcgagtttatggtaaaaataatataattttacacaagttatcgataaaaattaatgccaaatttagtattatattaaataatattgctgcaatctaatataattaaacacaatacaataattaacaacgtactaaacgagttttaagtaagtggtagtactttatgagtttgtaggt

SEQ ID NO: 96314 - DNA, 766 bp, Cannabis sativa
cattggtcaaatttggtggattggacatattctttgactgtttttgggttttgtttaatgagggtttttattgatcgtgtaaaaaggctttgggatttggaaaaagcttcatatggatttattaaaggaaggtcagataggatgacttttccacatcatcaaaaagatacgaaaacttcgtacagagcatcaagtttgcttgcagaagatcatcgtaatgttgggctagctgtaagagacattgatactggggtagtatgagtggagatttggctggaagactcaataatatcagagggtgtaagtgggctttctctataggtatcaatcaaggagaacgttacctgatttgatatgagtgaaaagcagtagaaagagatataacgctaatccatatagtcagaatcaaactcaagctttccctagcgctggcttttcttcttagcctttgtaggttatgcttttgagattgacacctactatatagactttggttttatatatcttctgggtggtagtgttggagctactgataatattcttatgatctatcctagtagagaaatatctcaaagaggagatttagaaagacatatttggaaagatagataagatttttaatattcaaaaacttgattttcttgtttctttttgcttttaagttggttttcttcatctaggattctttttagacgaagatttggtctcccatttttgggggagatgctaacggttgagctgattttggtaatgttgagaacatcca

SEQ ID NO: 96315 - DNA, 2976 bp, Cannabis sativa
ggtaaaagtgacatttcttgtatatagatgttctttgtaattggattggattgccactaagaccccaaaaggaagaccctggcgtagaccccccaacagcgtcacattgtttttccctaaccagtcgaccaatattaattagaagagacatcacacataaaaaaatatatataaatattgtagtactttgattttcgaaaccctaaatatagcacaaattaattattataagtttcattgtacatttccaaaaataaatatactacatgtataatttttttttttttgataaaaatataattggagatgatggaactattggagagattggcttcggcttggcttatgttggtgaagatttcatccaacacaagttttttccttatctttgtctaaattcagggcttttgacaaagcaaccgtcaaatgtaatggaagggatgcagttaccaactttgaacatagtacttattagggtgagagcaatggcaaaacatgttcaggagtgtatccaggcttcttaccaaaacatgaggtactttcttttgcatcatcagaaacttgccaaagtcttgagcttattttgtaacatgacctgaattgaatcaaaccttgcctcatctatttatttttattttttttattattaatacttaaagctaattatctgaagcactttttgggagatacaagagatgagagcaatggtagatgttcatcaaaagagtatcgaatccgccaaatcttcgtaggatcttttgaactgggcatggaaaattcatggcaatggtagcaacattactactacatctagttgtgttacagccatgcctgtcttctccattgcagcatcatcaggattctcatcttccacatctttggctgctctctcaactaccaataatataagtccccaagaaaattttgtgcaaaaattttcacagctccaaattcagaggctaaattcacagagaaatacttgattgaaccaatgtttaggaagcgatggtcgaccgctaaaagcaacaagatgcagcctatcttgtttggagcttccaaatcttcatatgcaaatgcgcaactacaacaacctgcacagccgaaagatgagaaagatgatgagaagaatattcctgcagcttccaactcttcaaatgcaaatgcaaaaccacaacagcctccaaaactgaaagatgagaaagatgataagaaggatgagaagaatgagcattattcgaaagaatgggaaaccaaactgaagacaatattcaatgtggacgacccattccctgatcttggcaaatgtatgatttttttttttatataaatgtactctaacttgaaaatgtatgaatattttttataaaaaatattattatttctattatattcttttattattggatattgaatatctaaattataaaaatccaaggaaagaattggattaacatttgcaatttctctcttatctcatattgtccgtcggtttataaccgtcagtttaagtagtatattttgttagttatagtgtgactgaagcttttctcaatatttataaattgtcatttaaagtgacttgttccaacagttataaactgtcatttaaagagacgttttccgtcagttactactcgatgggagtctttcccaacagttataaaccgtcatttaaagtgacttttcccaacagtttttaaccgtcatttaaagtaactttttccaacagttataagccgtcatttaatgttctgtatttttatacccacatagccaacggttttaggaaccgttgggaaatagtataaatgaaagttctaaactgatgggaaaagctaattttgtagtagtgccatccaacaacaagtctggtttttaagattttgactggcagtgacaacaacaatgcatagagaatatcggtggtggttgctatgtcagctcgaaataaaattaagtttgtcaatggaaagctgcaacaactagatgaagatcatgatatttggaatcgatgcaatgatctggtaatttcttggctcttacactctatttctggtgatgttgttgatagttttatgtacaaagaacatgtaatagaaatttgggaaaatctgcaagaaagatatgctccaagaattttgaagccaaaaggtcgatacagatgcttaaccaatgatctcttgatgttactgcttattttactcgaagaaaggctttatgggatctgatacaacaatatcatccactacctgtttgtaattgtggagctatgagaatcatccaagagtatcaggaggaggacaaagttatggagtttctaatttgattgaatgaatcctgtggacatgtacgatctcagatcttatgcaagatccattaccacctgttaacaaatcttatgcatcgattattcaaaaggagagacagagaaccattactgtcattccaaatactaccacagaaactggtaaaactacacatgatcctactggatctacttcaggttagtttgctggcaatgctagcttcaatcgacctagagttacttgtcatcattgtggtatgcctagacacattatggttaagtgctataagctccatggatatccaactaggtcacaaattctatggaaaaattccaaataagagcagcaataattagcctagaaaaccttctgctaattttctttcttttttttttttttgaataattctgctaatttttctagtttacaagaaggacaaccttcaagacaagctggtcaaagtggacaatgcaatgtgccagatcaacatcttattcaaagcatcacaaatcagtatcaacaattgatgaatcttttgtctcaaaagagtcaagaacccccaaaactcctcctaatcctgttcagcccatggtatctcagttttctagtaagaactttcctattttgcataacagatggatgattaatacaggtgctacacatcatgtgt

SEQ ID NO: 96316 - DNA, 934 bp, Cannabis sativa
attagaactatccaaataaaaaagaaatttatcaatttataaatccagttttttttttttttttttgaagaaaaaaaaagtgtaaaaatattaaaatcttcttaaatcttatctagcaaataatattaaataaatattatttttggcaaaaaagtctcctaattagatccattaatttcttgtattaaaacgtgttttgagtggtatctttcttaattaggataatgagatttaattaataatgtcataaatataccaattatcataatattcaaaagtatagagtacacatttagcataacagttatacaattatacatatatttaaaatgaatatacagtacttttatttttttcttaaaaaatgtattattgatcaaaataaatctgacattaaaaacaaattaattaaaatggcatctcataaaaaagtcaatgaacttttcatcatttagctttattagtataaatgatcttaagtgtaaaaccatctttagaattttagataatatcatattttataaaaattatatgaattttatttataaaatacaaattagtacgaattttgttattaaaaatacaaattttatatatatattttttttttgcaacgtatacaaattttatgtttgttatcaactatattagataaatatttaagtttaatttttgaccgttaagtatcaaaacaatagtcacgtaacagttatttattagtctagatattcaaatttttattttttatttaaaaattaatttaaatatatcaataagaaaacgacacgtgaataatgacttgacacttaacttaacggtcggatacctacgaaaattctaacaatataacttaagtattattaatgtcaaaaaataaatttaagcatttatctggatataagagttaatgtaacgtccccgcttcaagcctcca

SEQ ID NO: 96317 - DNA, 548 bp, Cannabis sativa
tcctctgaatcccagcttccttggtgcataattggtgacattaataacattagcaatcaaaatgagaaaagaggaggccatctgtacccgaattccctgatcgaaggcttccaaaatgtcctgagcaattgtagtttgatcaatatggaccttcgtggccatccttacacctgggaacgtggcaaaggagcaagtaactgggttgagatacgcctcgataaagctcttgtctcctctctctggcttcactctttcccgtctgcaactctctcaaatggtgaagtttcttcgtccaatcacctgcctatttttcttaagccttctcctgcgattgtcactggttcggtgcatcaattcaggttcgaaaatgcatggaccagggagcctctttgtgcagaaattgtcaaatcctgctgggaacataatgctcatctgagctttcaaggtaaaatatctctctgcagcaagcatttatctgaatggggaaagaacttaacctgcaatttcaaaaaaagaattcgccgcagtaaagcaaaacttgcttctct

SEQ ID NO: 96318 - DNA, 855 bp, Cannabis sativa
aaatatatttggaacggtttttttttttttttcgtttatgcaaaaagcagctatgttgttatggaggcaaattttgtttttatcttgtttaattaattaaagtttagtgtactgtaaatttgatttgattatattaatcgtgactattaatgattaaaatcaatcttatatttgtattattatttgactatgttcatatatatatatattgactttaattttagtggtgtcaattgaacttctatttttttttttttttgaacataagtcaattgtactttattatacacttcttttgtaattttctaataatgttatcttaatgtaatatagttaatgtcaaaaatagtcaatttacatgaaaacaatatgctttcaataattagtcatctcaacccttaccaaaataataataataataataataaataaataaaataattaatcatctcaaacaattaattttttttttaaaaaaaagtcttaaccatcaaacaccaagagcaacaagtattctattaaagtggagcaaaatatttattcaatgatagcatcagctatcaacaaattttgaatataactgggattacttggccaccaaacaatactactacgtgccgaaaaagcaagtttggctagggtataagcagcgccattacaagatctattacaatggacaaaactaatacttaaagcctattacaaagaacaatgatatcatctaaaataagacctaaaaaagtgatgaccgaatcgctgtttttaattttaagcacaacattcaaacaatcagactcaaagatgatgttgtcataccaaaaagagaggcattgaatcaaagcatctcgaattgcg

SEQ ID NO: 96319 - DNA, 731 bp, Cannabis sativa
tgaccccgacccagcctcggtgaccaacttcgctaggaacgaaaattggacccaaacctagctctagcccaaaccccaactcccgaatcctaatttggacccaaaccttggcccgtacatggactccaaccccagagtcagactcagaccccagcttgaatctctagtctgtgacccaaaacttagactccgacctattttctctcacataatttaaaatataaaataaaaaaaaaattaggtaacacatttttattttttattactaaattaaaaaaataaaaacacttatcaaacatgtttttgtattttaagagcactacaaagcaaaaaaaaattaaaattctacttttattttcgtaatttaaaaaattaataaataaaaccttccacattgcaccctaaaaacgaaagaagtagaccatccacattaaccctttgtaataggatttttttttttttcatttttatgcttcaaaacaattttttttcttcgtatttttatggaattccacaaaaatctctattgcaattaattaatagagcaaccgaaatcacaacctaaatccgtatatcaacccacataaaaatcccctgaaaaactaccttaaaaactcaaattgtaaatttttgaaaaaaaaaaatttaaaaataatatatgaagtaatttccttctaatattaagatataattccaattttttttttaatgaagtatgctttattaaaaag

SEQ ID NO: 96320 - DNA, 588 bp, Cannabis sativa
ctggtgtcaaaactttctccagtatttggatgctcagcagaagagaattgctcttcgtgatcagtgtgatcaggatccttctgaagtcgtgagatgttcttaaggctggtatcaggttttcacggatgcaacaattgatgatgagaagaaggtttataatctaagtgttgtggtgaagaatgattcaaatcaggtggttgcagggttggttaagccagtttccggtttagttgcccctgtagtagctgaagccaaggctatttctcttgcggtcacatggactaaactgattaagttgcatgtccaatcctttcatactgattgtaagagtattgtagataagcttaataattgtaattggaacagtagtgtttgtgatgatttgcttgtagatgttaaaaactctttgtcctttagtcctaaccctagagttgtgtttgttaatagggatttgaatactcatgctcacaatttagcaaagttaggcttaggattagataaagagttgttgtggaatggttctttactttctttgtaacagcttgtttgctttgtttcttcttggttaaatgaagcttcaagttcaaa

SEQ ID NO: 96321 - DNA, 665 bp, Cannabis sativa
cagagaaaatattatatttaattttataaacaatttactaggcacatagcacagaaatgaaacaacaatatgtaatcaaaagagagcattacttgggtgttgtttttgacactcatcatcagaacagaaagtggtccagtattaaattcctcatcctcagtcttgacaacctgcaccgatcgacttccattagcattaacatttaagcattacaaactattaaagatacttttaaaacatacttaataagcaacacagtagatatgaacttacatcttcttccattggccgactggagaagcaaaaccacaaacccaatccaaggaaagacacattagtatctacagaaacagtggaagataatgaaaaagtaaatgtgcaagtaactaaaaacaaagaaatacctcattgtgaaatcttaaagctgtctctaagatccaaaactttgctttgatctgaaaaccacacacaaacaaagaaaagatatcgtgttaaaagacttccaacattgtaagatatacatatttttaaagaaaaagtggaacactttctgaaacaaaagggaatatcgaacagtcacaaacataatttcataatgttgcctcttcagttcaggtctccaatagttttccgcatggaatatctcagaagaacgaaagttatta

SEQ ID NO: 96322 - DNA, 922 bp, Cannabis sativa
tgcagaagcaaagtctccagtaagttcaaaaaggacaagatctcaggtaataaggtttgttccaatctgtcatttttgtggtattaaggggcatactcgacctaaatgtttcaccatgcagaatttttcaaaacaaattattttggtaatttgaaaatttttctgataaaagtgttacttctcaaatgtggtactttgatagtggttgttctagacatatgacaggtgacaagggttttttagtgaatatcagaccaatgcaatgtggtgaggtcacgtttggcaatggtttaacagaaaatgtcattggtgtgggaactctcaattttgaagggttaccaaggttgaaaaatgttatgcttattgagggactaaaagctaattcacttagcattaatcagatttgtgatcaagggtataccgtcaattttgacaatgatcattgctttgttcttaacagtaataaacaatgcattttacaagggtttagatctgtttataattgctacactctcacacctgttcttacttgtcattctacatgtgaaaataccagtgctgcatatatttctaaaaatcttgttcaacattctcgtacaaaacacattgatataaggcatcattttattagggaacttgttgacaaccaaaaattgcagttggattatattgatactgaaaagcaattgactgatatttttactagagccctagattcaagtcagtctgactccctcaaaaattctttgggggtttgcactatttaattctttttatttggttctccattttgtacaaaattttaagtagttcttatcttgcatctatccttctttcattcttagttgtcaaatcttgtttatgttttttggtgataattagcttagtgttttgtactcctcatacttttgaggttgtgtta

SEQ ID NO: 96323 - DNA, 685 bp, Cannabis sativa
tgcaatcctgggaatggattggttgactaagtacaatactaccatagatggtaagaggaagatggtgacttttgaaccaaagggtgagaccccgtttgtttttatgggaagggattccaatgatatcggcacttaggaccaatgagttattgcaagaaggatgtatggggtacctggctagtgtgttggataccacaaaagatatacttaagggatcggaaaaggtttgagtagtatgtgaatttctagatgtatttgcgaaggaattactggaattaccaccaaagagagagagagattgactttgagattgaattagtaccaggggttgagccagtttctaaggccccttatagaatggcatcgacagaattgaaggaattgaacgtccaattaaagaacctacttgatctacgtttcacaaggtcgagtacctctccttggggtgcaccagttttgtttgtcaagaagaaggacgagtcgttacgtatgttcaattattatcgagaattgaacaagtatagaataaagaacaaatatcctttgccaaggatagatcatttgtttgatcagttacagggaaaaaccatattctccaagattgaccttcgatttggctatcaccatttgaggattcgagaagaggatattcccaaaactacttttcatactcaatatgggcact

SEQ ID NO: 96324 - DNA, 706 bp, Cannabis sativa
attatttaaatgaatataatttggcagtaaattcatattctataattttatactttattttaattttttttttttttgaaaattaaaagacattattgaaattgaagatttaattttagaacacatactttatctttttatttaattattttttaattttgttaagaatttttaacatttgacatgaatattaaagagttattttattctattatatattttaatttagaccaaaactaacaaaaaaaaaatattcaaaataaatttgttaactcaaagtgtatgaagcaaatagactaaaaatgactattattttaattaaactttaattgcataataatatttcaattaaaactcaaactaactttttactaaaaaaacttgccaattataatatgaatatattattgttaattatctccaaagaaactcttcatattataaaaaaaaagttatataactaataaagaagagaattaaaaagtttctattagtataataaaaattagaatctagaattattattattgattttttattttaaaaagatgatgttaagaaaattaggaaatattagaaattattttatcaagatctagatttactactatatatgttgtttaaacctgaatttctaaaacaatggaatttaaacacatataaagtttaagaaactttacattggttgcagcgaaattaaatgact

SEQ ID NO: 96325 - DNA, 1071 bp, Cannabis sativa
  modified_base (623)..(623): a, c, t, g, unknown or other
aataggttttataaaacttgttttgacaatcaaacaatataaaacacatacacctacaacaagttggatagttggatatatggtttatttactattaacattaatttaatttaatttaataatttcgaaaaataaataaataaataaataaaataatttttttttcggaatatatgaataaataaataaattaaagaaaaataaaattaaacctataaatttgaaaaattaggtttcaactaacctaaaaatctttttcaaaaaacattgctaacaacttttcaaatttcatgttatttttaaaaattaaatgttcaataaaataaaatgataatttaatatcatttttctgattttataatttaatttaaataaaaaataacacaatttaaaagttagcaaaatatcctatttctatttacaattttatgattaaaataatcttactttaaatttcaaataaggttaattaataaaaaaaaattaaaaatatttaatatctgaccttaaatttaaaaataagataaactaatcaaattttcaaaaaaagataattaattaagcaaaaatataatttttacctattttcaaattcaactttcactaatatcttaaattaattntaaaaaaaaaattaatttaattctgataattagatttaaaatttgaaaaataaaaatcaaaatacaaaactacacaaaaaattcgaaattaattccatgaaaaaatgaaaaaaaaatggaaaaaattgcatttggtgcgaatggtatgcgcgcgtacgtaagtggtgttctgggcgaggattgccgcacacagaggctgcatgcagcctgttcgcacgcgtggggggaaatttcagacatctccgcctgtcctgaccgagacaactcggacaaggcttgtccgaatgctcgtgaaccccttaaatcaaggggttccgcacgcccacgtggggtgacaccacccatgatttttccaatttttcaaaaattcataactaattcaaattaaatcgaaatcaagttttgtaaaaaatgaattgcttaattttttccaaactatctaacaaaa

SEQ ID NO: 96326 - DNA, 1264 bp, Cannabis sativa
tcactgggatgaaactggagaaaaaaaatacctaagtctggaatcagttcagcggaccaatgaggcgatagcgaaaatcaagaccaggatgcttgcttctcaaagtaggtagaaaagttatgcagattcaaaataccaaaatatagaatttcatgtaggagatcatgtttagggcacaatttagtacatggacaatcgttgcgttagtaaaattaaacaaaattagacaaaaatccttgaatctaacattgtcaatagttttgaagaaagttttaaagacctaaaaaagttcgagggacaaaaatcctaattagttttgtatatataattgaaaattcttaaaagaggtgaagtgacatgctaatttttttttgaggcaaaggacaaaaactttattcgaacaattactgaacaatacatattgcgaagcaacatccaaacaactcattttttttttatcaaatctgttgtatccttctatcttctagaaagctttagaaaaggaaaaaaaaattgaactctagcttttaacatcagcttgattgatttgccctataaacattgcagaatcacaagccctttcaaagatgtatctattttgattgcaccaaataaaatgcaccatagtagccaccaaagtcgtagatactcatgcaaccaatctgtttatcaatagcaacagtaactttttgaggtaaaatgaagatactcatgtaatttcgaatacccaacagaacagaatgaatcagctaagctcgactggcgaaaaaaagttgtcggcaaaagaaaggtgaagtgacatgctaatttccttttattactatattattctgttttctaatattttgtatttttttagtttattttaagaattttgggtgatggcttcttagttactttctatggaaaattttatatctatctacatatttatacaattgagaaggtataaagtataaataaaacaattttttatactacttattatatttgtgtcaattttttttttatgactgatttattcaatttttattttttaaaaaataaaatatgttattttgactttctattatacaatgccatcatattcaaatataaataaaatatcagaaaatgttattatataatagtaattttttaatcactgtcaaaaaattaaattaatttgaatatttatataatttatttgtataattatctatcaatttatatacagtagaatttctatcttaaaaaaaaaccaaaagccaaaacataatttgaa

SEQ ID NO: 96327 - DNA, 774 bp, Cannabis sativa
ttcccacaaatattgatcctgaagaggaattacaatactgtccattatttctaaaaaccaccaatctaccccgacacacacatatatatatatatatatatatatatgcaattttatttggagataatttcaatacaatacatattcaagattcgattaatcataaggtaacttaagcaattatctaaagcataacagaatttaaggactacatttttaagggtaatgtactactaaatgtcaacatttcttttcaattaatatcaattaatacttaaatgaatttttttaacgaaattttttatgtataactcactatttacgtcataatatttctttataattatatttattttagtgtgatcattataatgattgatggtttatttttgtacgaaagattcttataaatgaattgaagtttatttatgaagggataaacaataaacagtgtgatattattagtaaaatatgtgaaaaataatataaaaataaaaaaatcttaataataagaatttaattatgggaaagataagttggagtatgaagtcattgcagaggccttggttttgtttgaaaagcaaaataaggcgagaggtgtggagtctcaagcccttattttagaaaataggggagaagtcaaaacaaagaaggccaaaatagaaatgacaagttcataggcagatcaaaatccataagcaaaattgatggctgctttcactgtggcaagccaggccacattaagaaaatttgtaggattttaaagcgagaaat

SEQ ID NO: 96328 - DNA, 513 bp, Cannabis sativa
aatatatttgggctatcacctctaaatcggattaccattgggtaaagttggtcaataccatttacttaaagggacgaaacttctagagcttcaatgctaagcagaattgcatttggtatttcaaaaagcttctcaagcttagaaatactattgaagtattgatcttcaagatttggttgtgtggaataggctttgtattccaaaatatccgttcttaacaagatatcatctcagcaaagtggtaatgcctctgtctccttactgccatgtgtgtgaggcagagatcgaaacaaattaacatctttttttattgcattatggagattcaaagttggtttagtctattcatttggccagttaattttgtaacttaaattgattggtgttcttctctttgtaatggggtctaattgagcagcttgttaatgccacaaatagctgcaaccatgtattttgtgtagtgtaatcgaaatagatgtatctttgatctcatatgtgtatgaattgctaatg

SEQ ID NO: 96329 - DNA, 694 bp, Cannabis sativa
gaacaaaattattaaaagcttctcgtcagtctcaaggcctcaagcaaatggacaagtagaagctgttaataaaaccttgaaggatactatcaaaaaaagttggacgatgcaaaaggtagatgggtagatgaacttccacaattactttgggctcacagaacgactgagaaaatagcaatagggcatactccgttctcgctagcatttagctcagaggcaatactgctggtagaagttaatattgtaacccacagacgagatttctataatcaagaagaaaatcaagaactcttgaaattgtccttggatctacttgaagaaaaacgtactgagtcgcaaattactaatgcagcataccagcaccaagttacgagatatttcaataaaaaagtgaagaaaagactttttaatgtcggtgatttagtgctaagccgagtatttacaaatacgaaaaatgcatctacatgagtatttaacttgggagggtccttatgtagctaaatagcgttgttatgaaaaattgataacttttgtactcattgtaataggatttctcataaatttttaagttgtaactcttttagcataggatttgtttttggttgcccatgatttagtgagcttatgatatatagtgatggcgatgtctattttttttcttttattatgaactttatttttttaaaaaaataaa

SEQ ID NO: 96330 - DNA, 758 bp, Cannabis sativa
gaggagaagagagccgatagctcgagagtaacgccattaacatcctcggtagccatgattgtttctctccactactatgcgtcttcaatttcgctctcaaagcttgggtattaagttactaaatactaacaaagacttcagagtccattggccttcagataataccatttatgacgtcataatccacgtcatattgtctttttcttcatctaagctggatacacgtgtaataacttatttgttttatgtgggaaacggtggaattttatttgtcttgttcaatgaaaagtgtacacgtcatcagctaaatgaacggaaaatagtagaacgtgttattcgattcgtgaggtgtcgttttgtaattaattaaagatatttttttataaaaattattatattaaattatataaaaattgatatttaattatatttaaagaagtattcttatttttcttatattaaaggcaaagtatcatattgttataatattgattacacattttaaaacactaataatgcttaacattatcttacattatcgtaaaataagattaaaataattttatagtaaatttataccaaattttagttttgtattctaatatataattgtaatattttgatgtaaaatttaatatttaattaatgttttattagaaaaaaataaaatctagtaactttataattaattttattattattttaatatgtaagataataaaaaaataatataaatatttcataatttaatgtgatag

SEQ ID NO: 96331 - DNA, 1025 bp, Cannabis sativa
aaaccctaattcaaacaaattaagggataattatttatttctttcatatatattttcatatcaatggcaccaagaaaaaacaacaattacaccaaacaaggtcacaagccttcatcggttgaatatgttggccttgtctacaccaaagaagtgccctcaaagcaatataattcttattcatcatcaagaggaagagacatgaagaactcaactcaactccacagagcaacaaagtccatctacaaaaacgacaatggaaaggcctcaacgacattcaaaaacactttgtcttgtgatgagtttgttgatagaaggagtggtcgtttagggtttaaggaagaggttacttatagtcgtaaggataaatatgataataaaaatgatgggtatgttcatgagtatgaaactcaagtcaagttcaaacatgttgcttaccctaaagaaccttattatgccactaatatgatcacctatcatcatggtaatggtggttatgatcatgatcgatgatgatcgtgatgattgatatcattagctctagggtttcttctatttatgttttaagcatgagatcttgatctctttgttgatgtagtgatctttgttttgtttagaagttataattattaatgttaatcatatgtgtgtttcaatagtttgattttgtgttttgtggtaattttttttcatttttttggaagcaatgaatataataaaataaagttctacacctaattaaccaataaattaaggggcttttggaatatatgaaagtgttttaaataatttgattaggaaatattaggatgaaaaatataaatataaatataattatattctcattaaatcttattgagtactggttaaattttcaaaacaaacaagtaatatttcacattttataccattcttactattaactcattttaaacggtccctaattattccaaaataattttggaaatcctaccaaacaagttcttcgtataaaacaattttgaaaatcctaccaaacaagttcttcg

SEQ ID NO: 96332 - DNA, 1979 bp, Cannabis sativa
gtggttcagtttcaaggttttaaaatgagggcagcagcgtcccaatacttcgataaaagtttctgataatgagcatagtgtcagatcaagctcctccagtagtggaagcttttcaatagcttcaatcaatccctcatcagaaatatcatagcaacaagcaaatcgaaggcgtttgatcagtttggaactgtttcaaaggttgcaaagaaaataaaagttagcagcaacaatgtagacaaggaaactgagaaaatttcggattaacagaaacttgtgcaacattcaaagttagagatggaagcttcaatggagcaacaaatgtttctagaatctgcaggtcactatgattaaacaatttatatccaaacatatgaaaaaataataaaaggaataataacagaaaaagaacagttagtgaccaatttaactacaaccaacacaatgttaggccgcaagttagtagaatatagaataagagattaaatgaaaagggtatataatacactttgcatcataggggcctaagggctcccatagtttgtaaccttatttctctgtttcaatatccgttgcctatattttctactgttttattggttttcctgagcttcgagtactaagttcttatcacatatggaaaagaataaaaggaatcataacagaaaaagaaaagttgtgaccaatataactacaaccatcacaacatgacagaactttttcattgaactaatcaagctaaggtaaggatcatcaaattggtctcaaaatttcattctattcaaagtaatatatgatttttctgtccattatgaattaagaaagtcatagcaaattcgacagttgaaattagaagaacaaacattctctttaaggccgaaaagaaaaaaaaatccacaacaaaaacccaaataattgaattgaaacacagtagccaacaacttcaattagagacaagtttaatcattgaattaatcaagtgaaagggtcatcaaattggtctcaatttctttctattataagtaatgaacggatttactctctccaatatgaattactaaactcatagcaaattcaacagttgaaattcaataatatttatcataattaaataatcatgaagaacaaacattccaaattatcaaattgaaacacaattagagctagtttaatcatttcatttctaataatcccctaattataccaaaagatgagatatagaagattaagagaaatacctagtaacggcatggagaagcagtccatcggttccaaagtactcaatgttgagatcaacgagttggccgcagcttcggtcgatgacattactgcacatctttataaagtccaacccatagccaggatcgccgagattcctcatatcaatggttcgccacatgagaggatccttacagatatcaagccacatcttacaaaccatctgagcactcgtcattatctcaatcgctccaagacgagaaagaatggacgccgtcacatctcgcggcaagtccagccagttccgtatttctccaggcggagttggcttagtcgatgacgaagaagccgccatttcccgacgattacttcgtttgctacgacctaggttcagagaaattaacgaaagagtaacataatttttcagtttccatacgaaaaattgacaagaaaataccaaaaaaaaaacaatccgagataatcacctccattgttgagtccattgttgaagcagtttccgcggccaccgtaccttcctccgccataaccgctacttctctcgaacaaatctctagccatgcgaccacttacataaccgccgcgaaatcctcctcctcctcctcctctaccaccatagcatctctggaaccaatctaaggccatacaatcaacatcaccgcaatgaatacaaccgccactactgccttcgccataatcgcctcgatatcctcctcctcttcctctaccgccttggccataacggc

SEQ ID NO: 96333 - DNA, 616 bp, Cannabis sativa
  modified_base (574)..(578): a, c, t, g, unknown or other
tctctatcagtatctcacattctcttcctgatattcactttgcattgataggtattcccaagtaagtaaaaggcaaattctgtcttcaaaaaccagaaagtttcagcagcctttcaactacagcttgttccatgttactgcaatatattgcagtttttgtgggacttggttgtaatcttgaggtgacaaaaaagagtttcagagcttgtagcaagtacctgactcttccctcatcccctttgctaaataatattacatcatctgcaaaagcaaggtggttcaacttgagctctaaacatctatcatgaaaacaaaagtcatccttgtccccaactttccccatcagtctagatagatactccattcttactacaaatagtaatggagatatagaatcgccttgtcttaagcctctcttagattcaaagaaacaatggagagttccattgagcatcagagagaacctaggtgttgagatacattgcatgatcaatttgacaaagggagttggaaactgaagtccatgaagcatctcctctataaattgccactccactgtatcatatgccttttnnnnntccaacttaatcacacatcctggtttgttggatttcct

SEQ ID NO: 96334 - DNA, 578 bp, Cannabis sativa
tgaagtgctcttgactttggctatgccatgggcaggcatccattcgcctttgataatggaagctcacgccttgcaaaatgctcttacttgttgtcagaatcattccattcaaccagattatattgaatcagattgtaaaatacttgttgactatatttataacaatgtttctcataatctacacctgaataagtttgtcatggagattcaaagcttactatcatccctatctcaagctactgttggctacattcctcgaggggcaaatgaagtcgctcatcgtctaactaactatgctttaggtttagattagaaagctttgtaaaaaagaaataaattttctctgtaaaattgtatcctcaattctagtattgttttttaatggatacacctttcttcataaaaagaaaaaactgaaatttttttatatatataaaaaaggaaacaataaataaatatttcaggttaataaaaagacatagttttttttttttttttttgcaatgattcaaaaataaatagttaagtaggggcagttgccaaacaaatttgttcataccaacggtcacgattaatcg

SEQ ID NO: 96335 - DNA, 503 bp, Cannabis sativa
tcatacttaattaatctacaaaattatacaaatctactaattaattaatagccaaaagttgtaaatttgccttatttttttttctttataaaaataaaaataaaacaatataataatactcacgggcctcctcggactagtctcattatgtctatagtaagtggaatatccataatcaaattgtacctaaagcaagcaagcaagcaatattatttaacaaaaattatttattataatttttatacattttttttatgtatatttttacagtattttatataaatacacaaaaaaatgataaaaaaatcacatgcaattaataaaaaaaaatatacaaataacaaaaaatcaacatcaaaataacaaaattataacataaaaactgtaaaaatatttgtaatttttttgtgtatttttttttttttgaaataatccctattatttatatatgtaattaaataattaataatgaaaaaagcttatttattccaaaaaaaaaaaat

SEQ ID NO: 96336 - DNA, 977 bp, Cannabis sativa
ataagtaaatagttgggttgagtgtagctcatatcacttatttcataagtgaatagttgggttaagcgtagctcctattaattacttttataagtgaatagtttagtgacaagcaccaagttgctagtcgtcggaggatcaaacgttgtaatgccaacccccaagttgctagttgctgggaggctgattgtaggcaggccaattgtaggaaggctgaccgtaggcagaccagttgtaggaaggctaactgcaggtaggccaattttaggagggctgaccgcaggcaaaggcaggcgcaggccagttgtaggaaggctgaccgtaggcaggccagttgtagggagactgaccgtaggtaggtcggaggccacattgttggtcattagaactccacagtttgtcccatctgtttgcacatcagtatgttcagattgttgaggttgataacctcctacgacaaaatgacttcctaacgttggagtcgatgtccctccgagtgtttgttgaacagaggtttgggtctctattcttataggagttgagtctagcgatgacattggtgtaattggaactcgaaactgactttgagcaacactaggagttgtcatggtagccttcagtgactccatttgtgaatttattgcggcatttggactcctaaatgttgtgttctcctccttaaaggttgcattttctcactccagaactctagttcgcttagccatctcccgcatctgggccattattgtggcaagttgttcattgacattgggttgttcctgggcaacaaactctccttcttctgccatctgaagtgtggtaatgatagatcgccttgctcacagtcagtttgtcagggccccacggtgggcgccaaattatagtcgctaaaatgtaaaatgatcggaatgagcgtttgtgggcaccgacaacctacggaacaaagacaaagaatgaccgtgaaaccttgggacact

SEQ ID NO: 96337 - DNA, 774 bp, Cannabis sativa
aaaaaaaaaaaaaaaaacatgaagaagaagatgaacatgtgaggaagatgaataacttaagatgatgaaatgtgggataacctgtaattataaaacaaatataatatataattttttttatttatcactttttttaaaaaaatatgagctgtcatgatttgaccatgaatatcacatcaacaagttttttaaaaaattaattaataaaaaaaaatagagaaaggcatgcaaagtgacaagtggcagtatggaagtataaaagatagtataaatgtacagtatttttgtaatttctaccgtatagcagtataaaagtaataaaatgcaaaaatacactataccatgtaaaaatccctaaattttctctctttctttgttttctactcacatccacttagctataagtaagacaggctggcccaactacatacattgggcccaatttcttttgacaaaaatagcatattatataagactttagaaaaataccacttttctgtacacaaaagtaaataggtatatttctcaaaagtagaagtaggctgttcagaattcacatcatcttaactttaattttacaatgtccaacaaatatcttatcattcatttcattccactaatccaatccagccaaagtacaattcccaactctttttccctttataatttattcccttgttatctaacttttcttttcttatcattgttttcacctaactcatgtctatgcaattgtctcttatatatcatagtatgttcatacacatatgtata

SEQ ID NO: 96338 - DNA, 1323 bp, Cannabis sativa
aaaccggagataccctcccattaacttaagacaaaaaatgaatgaaaaacacggtgatctacgagatcacctagacaaaaagaaacatgcaccatcggtcttcgcgggaacactaaatgaaggaatcctggctgagctggcaacgctgcgcaaagacatagctcgggtctcccgaaggcaaaaaggggatgactcagattccaattgcgaggaccgaaagccttgcacccgacacatactagaggcagaactccccaacaactttaagatgcctaaaatggcggcatataccggagactaggaccctagtgattatttatcccgtttcaatcgggtgatgacagtcatgtgggtcagcaatgatgccaagtgtctttgcttttcgctaacattaagtggttccactgaggaatggttcaaaaggttggaaccaggattagtggactgttggaacaagttgcaagtcaacttccggagacaatttgtcgcagcgagaaagattaatctcgaagtcagtgctctgactaacataaaacaattgcccgcagaaaccttgaagaactttataaaaaggttcaaagaggaagcttcaaaaactaagaaggtggatgacggacaacagcttgcacttctctaagctgggatttgaaaggggaccccattctggaacgaactacaacaggagggagcagccaatctacaagatttccaaaagagggtgcaaaagtacatcaatttggaagaagcccaaataatggcttacggggcatactatccaaccagaatatcaggatatgtactcggagctcagctctcgagagctatgcccagaccactcctcaaatgagcggcatacaattctccgctacaccaggatataataagagcctagccttggctcctgcatcatcacattttggggaccccacaagcaacccctcggggatgagtggtcaagctctgtctcactccgctcctaccgcaagcctgacaggaccttctcagagctcccggagcaagaggtcctcaaagggcagtaatcggacggaagataaacggcaacgaaggtgatgcacccctcagtatactcaatacacggagctcacggacacacgggagcgggtatattttgccacaagaaaaaatacacattaccggaagcctccactgtacattacctcgaaaacttggtataagttttgctaatgtttgattttatttattaagtctttttctccactgttccttcataatatttttattagaagaatagtcttactcttgaagacaatatctttcttatgaaggacttgtattgatttt

SEQ ID NO: 96339 - DNA, 597 bp, Cannabis sativa
atatcttcctaaaaaatagtcgcatctacattaatcttaattgtattcatcacaagttttgtccaacgctctgccccatcacaagctagtaacaaattatgggaagggatattccctacaacttgagcaccaatcgattcatcaagatttcatgaagaaaacgataccacgtctttcactctccatcattttttattccatgctatctaattacaagattttaaatggccgaacaaagcatcacaactcttcccagcttatcctcgtctaccccactcacgttgcaccaagtcaggtaaaaaaagaatgaaactcgcggcttaccaaatctaacctcgcctcgacccaacaactccaagaaaatccacaagatactaaaggacaaacaatgtcaatgagaattttcttaccacgaagattcatcttagtaggcaaacattcattgttttttgttcaacgatatattcattgttttcaaaaaaaaaaaaaaagaaaaagaaaaaatgtccataaccattttgccacatttttaaccatttaaccatttagggatcaagacatttttagaattaaaattgggattatttcacaaataca

SEQ ID NO: 96340 - DNA, 650 bp, Cannabis sativa
aaataaatatattagaattaaaatgattttttaatagaaaaaatatgaaaatatgtaaaattaaaaaaaattgtaattttacaaagataaaaatgaaaatatatgatggtaaaaataaaaaaatttattttgtggaggaaaatatgaatatataaaaaaaattatacaaaaaattaatttattaaaagttgagtgaggttatgtgcccctcatccgaccatgtgagcatgagaggaagacatattcatgttgcacttttttttttctcatagtttaggtttcgtcccactgagtttttctaacaagatttgtaacgagacaacttaaaaataatgatgaatatgaaatatatgtatacatacttcactcttttttttttcttaactcaggttttgtcccactaagtgttcctagcaaggattttaacgaggcaacttgtaaaataattatagatatatgtatgaagagaaggcatgtacatattgtattattttttccttagctcaggttttgtcctactacaaggattttcttgacaaagtttttaatgatgtaactttaaattatgttgagatacttgtaattcatgagcaagtagagaatgtgtgcgattgagattattggttgagtatgttggaagttattttacc

SEQ ID NO: 96341 - DNA, 2215 bp, Cannabis sativa
tacgaaatgtattctgtgatgtacaaccgccgttaaaatgagggagttatttactgagattgatatagaggtaattaggattaaaaaatagtaacgtaccctgagacccatctaatgtacttacggaatgtattccgtatcacggacaaaatcgtgtttttattacataaatataaaaatcatttatatattattcccattaaaaaaaacaaaacaaaacctaactctttctctttctctctcaattcttgtagccgcccatctccagcaacctccgcagaagagtcgacggaaactcccccactcgcaaacgacgacggcgcaacttctcccccagctcctctctcgcaaacggcaacaacgtaggttgattttctttctcttagttttcatttctcatagatttatcatccttcattttctttttctccatttgggatatggatctatttcttcagtttatttaacttttaattgtttatcttcttcatttttacgaatatttgggtcgatgtaatcataactgtaaatatatagctttagttgagcatatgaatgatattttatttgttgtccatttgatttacaattgtatttgaatacttagctatagattgaactgtgttttttagtaatttgtgctaatataatctattatcggaatttttggttggtggtcttcacaaatgatgcatttttgaaatgagatttattgtttgttactgacgagttggtcttcgtaaatttttgttctgtgaaatgggaggaccttttattacataaatgatcatgatggagtgcaaaagactaataatgccttgtgtgtgatttgttttaaaaatttattatttgaattcctccattgtgtttgtaatataatatatattgtcaatttttttgtgctgtaaatgatttctcattttatatagtgaacatcaaataatttctcattgtgttgatttgtttagtgtttttcattttaacagaatttactatgtggatgattactttgtgttctgttcttgaatcaatcattataccaaacacaaattaaattaccaaattctatctgtacatgatggtcttccttgtaagttgtaatccaactatacattcaaatctatgattgatcgttttaagtaaatatttataaatttagttgaattttatcatatgggtgtgcgtgcatgtagatgtatcttttcttatttgatattcttgaaaaaattactcaacttctattttttttataatgttatccagtagaacatatgagaccacattttgcttgatgggtgttgttttttcttaaaattgaatgcgtaaaattgtctacactttcacagttattatctttctttaaatctcaatccaaataaagtgaattcaaatgggtttaaaaagttttcttctgaaattcgagctttgacttagatattgatttggctgttgggtatttaggtattgaattgatcctctaatggtttgagaaaatgacaattattgagccaacaacagctcagaccaagagaaaatcctctactgttgcttctactaccactgctaggattcagagttcagctccttcaacatttaagagatggggtgtaaagcaccccttttttagatacggtcttccaatgatctctctcacagtgttcggagctgttggtcttgctcatcttatacaaggcaggtcagtgtctctactcttgagtttactcataagattttggcagatgttacttttctctattgatattgtagggtttaaccgaatgattcatcatctgaaggttaaaagaatttgttaatagttgtcattacataattctagcgaactgtgaggacatcattgcatccaataaaaggtctgaccttcgggtcagggtgccaaactaattttgagttatctgggtacatctgcatttacattgttgtaatattcgaaccattaaaggaatttgttatatttatatgttcggattatcatactctgttgtcattgtgtccgttcgttaataaagtggtgggattttgtagctcagcaaggatattgcgaaggtaaaagatgatcaggaatgggatattattgagaccaaaaaacaactgtccagaacaggacctgcctataagccaaaacatatttctttggaagaggagcttaaggtacatatgtctcttctcttgcttgtacattttcgatttcaaatga

SEQ ID NO: 96342 - DNA, 573 bp, Cannabis sativa
gaccaaaaaacaaacttaaaagagaaatgtcagtaagtgttaccccaaccgttaattgaagtaataatgtatggcttctcaaaggtattattggttcttaacactatttttggtgtcacactgttattggtgtaattaaatatcggatcctatataaataaaaaaaaataacttttagaaaatatcgataaccaatcttagggtactacgtatagaaaatactggacactactggtgctgacgcaatactcgtccttataaggagaaacgataaggcacaccttaagttatcaagcatcacaaaagattggtatactgttattgatgctataccacctacaatatattacatcgatagtgttggataatgcttaataataatactttcagtgggttcaaataatttgatttggagcaagcaacaatacgttgctcgcactgcattttctctaagtattaatttttattggatatttttgctttcaattatgctttgttataatctcgagaatgattgaattgaaagtatgtagttcatatattgtgattattgtctttcaagtttaattgctt

SEQ ID NO: 96343 - DNA, 554 bp, Cannabis sativa
ggcggtcggttgtaattggatcggtcggttctcattggattggatcgatttatgcacacctctaagtgagagtacgtaattagttcccatatagaagaattagttgattattttaaacccagaaacaaacacattataatttccaataatggatgtctcatatatttttttcccttgtaataataatgttaagaaactatatgcaaacaatttcatggttgatttaaatcaacacaatattaacatggttgcatgtacaaaaagggataaaatattatgtatatgtacatatttccaaataaatgtactacaagtaaataaatatatagtaaatagtagttgaaaatgttgagtaacgagtactaaagaaagttttgaagaaaaagagatatagaagtaataataataataatttgtagaaagtaagcctagaatcgttttgttccccaaatgtgttacagctcaggccaaactaggaaaaattaggcaacttttttgaacagtacaactttactctgataggaactaaaaatggctagctaccactactacta

SEQ ID NO: 96344 - DNA, 661 bp, Cannabis sativa
aaaccttattttcttcttattctcttaagaaaaaactattaaatattaatattacaattaatattaagttatagtatcataaagtgtttataatgatatcgcgtgttaaatgtacattttgatttgtgtcatgcatatgatatatttttattaaacgtgtgatcgtcagggtcagtcttaaagtatacgtggtttaaagaaaaatcaaattttaaggcttttatatatagtttaattattattaaataatagttctagtttaatgtaatggtaaaatttttaaaaattcttaagagttcaattcttcatatagctacaccctcttagcttaaagtaagactctttattactacaccaaattatatttttttcttatttaatattttatctatatactaatattttttttacaatttcgagaccctaagcattcggggcccccaggttcacagctagttatcgtattatgtctagttgtgtaacttgttaagaaatattatcatcatatttgtatttagatcttaacacgatcgttaattaattatatgttgtgttcatatgttcaccataaacgtattaacaataacacaacatgattacacaaattatcagtcttattgtatgcataacacaaatttatgagatatatggcaaattaatt

SEQ ID NO: 96345 - DNA, 599 bp, Cannabis sativa
catgagtatattgcatcgctggatgaatgggccctagaagttgtggtggctcttcctcctcttcttctacacttggctccctttgccgccttcagccttgctattgcgcatcagggggtggttgtccataaggatgaggttccttgagcctgttaaccatgctgacatccatttttctttgcgtaccaatttattgtcatattgcaattcgagcacgtcataggtcccgcaaagctcagtaatcactccagccaacccaaggccaccgcctgtggctccctgaacaatctgctcaatgctaccccggataacttgaccaatgttaatattgtaccccttcaaaatggcgtacacatatttcagtctatccatctggacatcagaaagatgtttgctcggtaccaaccgagcactcacaaagtacaaccaggttttagccaccaggttgatttcacaccggtacagtatattgagcgacccttcctgcccatcattttcatggaaccgtaaccctggaaatcccacagtcttggtaacatttaccatatcaaattgctcttcttcctcaataattcgcaggcgttgatcttctctagagt

SEQ ID NO: 96346 - DNA, 799 bp, Cannabis sativa
ataatatttgcaatgaaatcttttctttttttttttttttttacaaaaaatagacttctacttcttttaaaattaatttgttaggcggtaaataactatttggtattctatgttttttcaaaatacaaacttagtaccttatgtttctaatagtgatcacttggtaccctttatttacaaatcctatacccatttggtacatctctttgaatttagtagacctaaatttttagtttgactagattacccctcattcaaataattcatatgattttaaatatttttaaatattatatgatttaataaataaaaaaccaaataaaatcctatttgattcaacttccacttttattcatctaaaaaaaactttcatttatatcttctttgttcctcccaattcaaatatacaatagtcatgccaatactaatatattttatataaataaaaacaagacttggaatctgtaaagtctttttttggcaatttagatactaaaatattttttatttatggtgcgatttgttggcttttataaaactgattttctcaccttatttaaatatttttattgctattttctatcataggaaagattttctttcaggtggctttttgtttgtttggaaacttcttgtaagaaaagaaattctcttatagaaagtttacttttaatgaaaactttgactattcttattttctttattgagttcgattgtgtcttgataagattagatcaaacacactatttttggcaggtatcaagaccaaatacatgatcggacatgtttttggcaagtt

SEQ ID NO: 96347 - DNA, 701 bp, Cannabis sativa
tttaattttatttttttttaatgaagaaattgaatacaaatgtgttaattataatagtgtcaaactagtcgatccctgatacgaaataattgaaggaaatctagccaagttatgaacttgtatttttggtagcgcaaaatctattccaaatacactcatatataccaaactttgtgtaagttgtccctcgaccaaattttcaaacaaagttgagaaaatgttgaattttctacttaacttagccagtatccattttggtttcaataatatttttatcctcaacaatctttatgtaaagaaatgttccacacataccttctcaaagcacccatatttcattgatcaatgtatatatatattttttttttatgaataagctgatttcattactccaaaacaacaaatgtacactcaaagagcaccctcaaataaaaagagaggatctcaatcaatactatttacaaagaatcaaaccaaattttatcactattggacaccttctttggccatatacaagatattctactctttgttacactttggagttgctgaaaaatcacattacaagtgcccactttgccttcccacaatttcccattacggcagcaccacacttgataaatcaaggcagcaagagcagcagcaaaaactgctcttttgaacttgctaccctttgctttaccaagccaaatcacaattct

SEQ ID NO: 96348 - DNA, 641 bp, Cannabis sativa
  modified_base (554)..(568): a, c, t, g, unknown or other
ttatcaactggagtaggaataagattgctattattatcatctcttgaaaatgacacaagaataaaaattcccttagatgactctctcgtttcaagagatatagaagaaatattttcagcaacatcaaatttaagaaatttaacaatttgagattcaacaattcatgtacgacgagtaagacagtaaaagtgatacccctttgagtgcatttgataatcaatgaaaaccattaaattgttctcagatctaatttttcaaattaggatcataaatccttacttcagcatgacaactccatatacgaagatgatccaaactaaactttctcccaatctacaattcaaaagaagttttggaatttatttcatatataaaaaaaaatatcaaaatagttacctttacctaaaaaaatctttcaaactaattttatctcatacatatttgattatttagtttgattagttaaccctaaaattatgattttttttttttaaaaaaattaggttatattatattattttgttgttctttaagacactacaagaaatgtcacnnnnnnnnnnnnnnntcgctactgcgctggtaaaagttatttttaccagcgcatttcgcaaactgcactagcaaagaggtcaaagttt

SEQ ID NO: 96349 - DNA, 755 bp, Cannabis sativa
ttttttttttttttttttgagtactcaataatcgatctctctctctcttttttatatttttacaattataaaagagaaatgcaagtaaatggtcatatttctaactttactgatagttaatgtcccttttttaaaataataaagtaaatatctttttttactttttaatgcctaaaataccataaaaaaaaaaaaactgaacatcttttctctctctcctggtgcatgcagcttctcctagctggtgccatggcaaacactcgatcgagagggcagggaaaggtgaagatttctgcgaagaagaagaagaaaggggtgaaacctgatgcgaacgacgaggaggagattgaagaattaggtatcgatcccctagagttcactgacgatgaagaagggctgaatttaggtgagacgtctggtgcgaagcaagggcttcattctcatggtgcgagtcaggagtgcctttcgccaaaatcatcactggagctgatcaagaagcaggaaagtatcaaggctgatttcaattttttcttagctgcaaatcaagtttagtcagattcattgtcaaagggattgcaagtttctcctcccattctccggtctggtaatgtggtaaggaaccttcaaacctcttttgataagtctaagaatgttgataatgtcaaaattacacttgaagatatagaagaagaaatttctttttggaattctgctctagtttgctatgttttgggagcaaaccctcctctgaatgt

SEQ ID NO: 96350 - DNA, 845 bp, Cannabis sativa
tcatggtactcacccgtaacaaatttggtcttcacttcattgatcttaaaccaagataggagatgcataagatcataatgaggtaactacccatcaaaagaattaagttggcaaagatacaaatctaaacgctcctgcatttggagatggtgactcagaaaaaaacagttctaatgatgctgacgacgatcctcaagagacctcaaaagatgatccttagtacacactgaaagattatcatcaggataacttgctaaaggtggtgctagagaaaaggacactcccgacaagtcagatcctgtggtcgccatggccattaaattcccattaaataaaagtaaacaattgatcaaccaagaattctgttacatagctatattttatatatatatagtatagatattacaaattaaataagcacaaattaaaaaaaaattatatttttaatatattttttaaaaaaatataacttatttaaagtaataaattacagatatatggataataatttgtaacaattttataatctctaaccattttcggtttagtttgtgaatatcatttataaatgtgtaacatgtgattaaaaattgtataaaaacttcacctattacaaaaaaaattgtataatcttcggttacaaaaatattgtattgttacaatttataaaatcgtgatataaaaaaaagtaagctttgtaattatgatataccctagtgtattttataattataatttttaaattttcaaatatttttctaaaaatcatatgcatttataaagatgaagagtgtgttttcctctctctaatagggtttttcttcttttctgtaacaccctaacta

SEQ ID NO: 96351 - DNA, 774 bp, Cannabis sativa
tgttcttcatcatagttcttttcttctccttaaactcttactatttattatgattatcattataatgtctagttctgagtagtttccttttagttaactgttatttcaaaacctggcacataaattcttaatttcattattgagtgttaatttatagttttcattatatcaaattacttctattcttctatgttcaatgtcatgataattattttaatcttttttagatggccacgcaattagattttactttaatctaccgtcatcttaggattactattcacctaatagtctaggattctaaatgtttgtgacaaattacaatttttaatattatcaaaggtatttttaattttgatgaagaatagaacctaggttaattgaattatatgtttcattaatttgttgcgtatattagtctatctccataaatcttaaacctttatctaagttaaataaatggcatgctttgtggatttcctgcttaggtaaaagagttaattattgagcgctttgccttgattacataatagggtgattgggataattgatttcctcagctttatctgcgggattaatagtttgattgtaaaatttatattacacattaaaagaaaataggaatgattgttgagggtggcgaataacctttaactagtttctcataccgtagtctcacttttaatttatttttacttttatttatgctatttcactcaaaatctcaaaacccccttttcttacttttgtcattaatttttgagtaattaaata

SEQ ID NO: 96352 - DNA, 656 bp, Cannabis sativa
taaattttgtaacaatattttctcccgatacatgctgagaaatgtagtggaacgtttgtaattactgacatcgatggtggtggtgcacgtccccttctcatgtacattttggcaggcttactctgctgtacggtgaggacacggtgcctcatggctggaaaaggttttccttttaaaccttgctagggtttgtgttatattcttaccccttttgtcctatcgtattaccctatctagctctctttgcgagttatccattcaaactagtaaaagagtcatcctcaaggaatcacactgccttgcttgctgttatagctctatttaaagtgggtattgccctgtttcctgtggcttcttataccgacattcgagttcttgtaatgtggattttgctttaaacaatgatgctccagaaatggtcctagaagaggtggttaatcttgtggaaaatgttaatgtcatgatttctctctagacctcactcctgatgatgatgacgttaagaaccttatccagagattggtggtggctaaactattcgtgaaaataaaggtttgtaacggacgtctacagtctattctatccggtatgtggaacgtaaatcttgggtggcatcttcaagagatcgaccggaagatgtataattttaggttcac

SEQ ID NO: 96353 - DNA, 814 bp, Cannabis sativa
atttttattttcaaagtaatgattaataatttttatcttttgttttacagttcaagtcagacgctccttatagtaacgaggagatcaatgcagtaaaagataaatgggtcgaatttgtaaagcctttgattattgattgagtacaaagttaccactttttattatgatacatgaggtataagttttagtattgctattaattcttttacattatgtaattagtttagagtttgttcttatgatacatggaatataagttttaagattgtttttattaataattttagtattatgtaattagttaatatatagttagttttatagttatcgaccatagaattgttttctaattataaaaaaatttattataagttttataattattattttaacttttttttgtattatgtatttactgttatataaaacgattctaaaatttcaaaatataggtaggaaaattgcataaaaatttgtaatttcccttacctacacttatgcttcattttataaccaacgtaacaggtaaaaaaaagtattttcagcaagttatgcgtcatttaagaactgacgatataagttttttgtgtcatttttgaaatgccacaaccctttccgtgtcactttcaaaccgacgccaaatgttataaagatcattttatatttcgcgtcggtttcaaaatgaagtaaattattttttgcgtctcttttgaaatgacgcaaataaaaaactatttgcgtctgcggcttatacgtcggttttgtagaccgacgcaaaatctttatatgtcatttagaaaccgacgaaaatacc

SEQ ID NO: 96354 - DNA, 775 bp, Cannabis sativa
atataaaatatatatataaatacattatttattataaacggtccggtccgatttaaccgttaattatttattacgaaccgcaaccgaaccattacattgtaaacagtccggattgaccaaaccacaaaaacggtttctccgattacggtttacagtggttcggattgtcgtggtccggatttaaaccgcagttttctggtttatatgaacaaccctactcttcctatatgtattggtaacacttaattttctttttctacccaataaagtgatgttgacaaaaaaaataataataataacttttaccattgaagttagcctaaggtgtcccttggtaattttttattgttattttaaatatttttttttatgagtaacataaaggttagactaaagaaagaagagattttgtcaatttaaaaaaaatcgttatctatcctaaaagcatattaaaccaatctataaactgtaacattataattaacacttatataagagaaggatatattttccaaaaactaaacaataaaactttaatattaggttatgttgtttactttctaagatattagcatatgttgttcccacttcctacccacacaaaatgattcttatagataaacaaagatccccatccattcattttttaataatggctttttcttcttctttttggtaattagacaaaataataaataataataataataataataataatagggtccacacaacctctaaaggtatataagtctagcttgaccaaagatataat

SEQ ID NO: 96355 - DNA, 592 bp, Cannabis sativa
taagtatagataaaatagtaataaaagagaaaaataaaatgacaaaataattttctactctctctaaaatccgatgcctttttacaatgctaagagtactattaatagtaattcagtgaagatttgctcccacaaattaaaattttagtgcctcatttagtggagaaagtggctctgaaagctaagagaagtaaagaaatgccactgatttgcaacatacgaggaacatgtggcagacacgtggcccattagtgttgtgtgcttggacgtggcttctatttgttgaaagatccaagagcgaccataggaggctagcttagtgtcaattaattggagagtgagacttccatttaattagccaacccaaccatatgtggcataagttacaacttggaaattgtgcttaggccaaccctacttagattttgatcttcactttggcccatttgatgagagtacattgcattgttgagaaaaacacctgcagcttagacaatagtttcaaaacttggagtgatcaaattgggattttgggctattgctcatttttacaaaaataccaactattgagttgggtttccaagctccaaac

SEQ ID NO: 96356 - DNA, 530 bp, Cannabis sativa
aaatctagaaatagaatttttagctattggtaaccttctattataggtaaaaaaaaatgtaaccatatgattacaataaaaatgtaaccattgaatagtcacccacatatatataagtgatgacattgtcatcattaatgttttatataattaaacaaaaaatttgtcagtggcaacactttatcagtactgatagtggcgtcaataatacatactattcttgtagtgaatagtgcttgtcaaaagcgtggccaagtgagatgagatggaggagaaagaagaacagttatgtgatggtttacccgaaaagtgaccctacaatgtggcaagtataggaagacatttacagagttgatcttgagtcatagcagttgacctaagggtccctagctctacgccaaggttgacttcaggaaccctagaattggtgtttggatcctcgaaagttatttctaactccccatccttcagtattttgaattaaaaaggcaagaagaatccaagtgtaagccctaaaaactaaaaagaga

SEQ ID NO: 96357 - DNA, 682 bp, Cannabis sativa
aaatagtagttttgtaaaaatttccacgtgatagtaaaattataaatttttactcaaaatcaatccatctccacatatataatccaatatctaaagaggaaattatactctataccctttttatattgtccccttttatttttaccctctgtcggtatgtttcaattaaatataaaattagaggtaaatttgatcaattgattaataaaaatagtatttttcaacttaccccatatctaaatgtatataatccaatatctaatatcttactttggaaaagtatttcaatagcccaagtaaagaaacaaaaataaaataaaaaaaaaatccctgccaaatacatacataaattttcaatgaaaaaaaattattgtaattaatttatttttttccttcccttcaaaattttgagtaagaatgtaagcgaagcaaagatggaatgggaattttcatctggtatttttggaaaaaaaaatatctcaaagagaatttaaaaaatacaatcataaaaactcattaaaacaataattattattataattaataaaaaacttaaagcgtgaaattattataccgaaactgagtcctaattttgagattccataacaattggtgttaaattttcttatttatcaaagtatgcttttcaaacgtgtttaagcttttaaatgttaaaataata

SEQ ID NO: 96358 - DNA, 756 bp, Cannabis sativa
tctctctctctctctcaccctcttagaacccaactagggttgatgttttgctgcttaattttgaggatttacaacaagttttagtgatctcaactcaaggtaaggctcctaggcacttctctttttggtttcttgagttttaagttaaggaattatgcatgttttgtgagttttgctactgtagttgttgttgatgtttgaattgtgtttctgaagttaaataatggttagatatgttgatttaagctagttttgagggttactatgttggctgagcaagctttgagttttataactcaagcttggctctttaatggtggatttgtttctgtgcatgttgtagtgttttgttgccttgaatatgttctttgggatatatagaacaggtttggaaggttttgtttgatgtggggctgattttagtgagatatgaattgttgaaattctcctgcactgaaccagtcggccggttcagtgggacctgtaggaactggaatttcggttgctccctaggaaaccccactgttgcccttaattttgtccaaagtacgtggaccaatgcaactacgacaagtggatttgaggaatatggttttgagataatttgactaagtcttcttaagtcaagaggatcagcaagaaacatacctccaggagaaagcgtgaggggtccacgcactcccggagggcaaagctatagcaaagcacctccgggaggtatcaaaccccatctaaacagtcacctcgcatttaatg

SEQ ID NO: 96359 - DNA, 646 bp, Cannabis sativa
ttgtttgtataatttaataattgttatatgaaaaatcatcaaccagtgttagcaactgtttatccaaattttaagaatgaagaggtgtcaagagtagcaatacaagacacacaaataatagaattaaattaatgaaaaatatgtaaagtcatgactgttgggatgaccgtcaactatgaaaggtagttataacaattagagtagaagtcagacggtcactcttacccctagcttgagtagacgtctccaagaagggaaaacgatgggctaacaccttcgtaagcggaataaacaatgaccatccacacctacgggagtcaaactagtctaaggagtatatgctactaccccaacctcaattgcaacgatctatatggggtttagtctaggggtacccctagagggttagtctagaggtatacccctaccccctacaccctcatggtacaagtcatgtattttaccatatacacaatgacattttcaaaggtaaacggggacatccacattacatcacaactactcacaacgaacgagggtcgcccaacggtgacggttgtcaccccccctcaagttgggttccggagggtcacccaacggtgacggttgtcacccccctcaagttgggttccggagggtcacccaa

SEQ ID NO: 96360 - DNA, 787 bp, Cannabis sativa
ctttcttgaaagtagctgccatacagtagccactcttgacagtgtattctccatcacgtgtataatgccaaagaattttatcatcgagatcccatcccatgcatggaagtttaagtatgatttatgcatcctcctcattgaaaataactctaatgaaagtctcatcccaaactccctcagcatttttcagatcaataacatacaaccccctagggatgctcgacttgtcatatattttgaaatatagaggtcttggcatccatggatcctttaaaatgcgcaccccattgccgttaccaatacgccaccaatagcatcccaaaataattttcctcctccaatggagacttctccaaacaaatgatgcattagatccacatttagcttccagcacacctccatttgggaaatagctagcctacaaaacttaactacattatgacaatggaaaatggatacatctccatatttgtttagcgagaagcgcttgattaaaaagctccaaatcacggaaccctgaccccccttgctcttttggtttgcgtagaataggccatttacaccaatgtatgcgttgatttgtacctgaggatcctcactaaaactgtgcagccattctgtgaatattattaatagtgctttttgtcaatcaaaaacagctcattgtgtaagtcgggatggcctgaacaatggctttaatgagcacctccttcccagtcatagagaactatgaccctttctagccacgcagcttgttccagaccctatttttgatcacatcaaataa

SEQ ID NO: 96361 - DNA, 1909 bp, Cannabis sativa
ttttaaacttcgaaatatttttttaaggaattgtccatagaaacttttattgcaactaacggagcaacctaattacaactaaaattcgtataggaaccaaaattagtaaataatcgctatggattgcgtttaataaagctgatgaatgattttaaaaaaatttactaaaattatatatatatatatattttagtaaataaggattgtctttaataaagctgacgaaggatttcaaaaaaaaaaaaattattttcccaaaaagtaattatttaaatatgtatacttgttgttgttgtatatgatttaaattaatatatatttttttattaatttatttatgtataagtaataaattttagcgattttttcatttttaaacttcgaaatattttttttttttgtttttagggaattgtccatagaaacctctattgcaactaattaatggagcgacctaattgcaatcaaaattcgtataggaatccatatggaaagcactagagaaactacatgagaaactcaataaaaattaaaaaatagtatataggctaattcccctaaattttaatttatttatatattttctttatcatgtatcaagggagtattttggattctcatcccaaaggcaaatttatggtgattagttcactctatattttatattgtaaattgagtaatatatgtgtgttatgttctcaaccaaagggaagattgtgatgagcagttaactctatttcctcataatcttgtgtaacttgaatcatatgtgtgttatattattactcatggggatgtatgtaataatgaccaccttgactcgatttctatattttctcacacattggtcaatgcttatattttaatcaagttggttaattttggattttgtctccttttctatgaactataatatttgcttggttttgaaaggaagttttagtcacccatagccttttgatgtaattagtctttcaccgagcacatcatgaaaaattacttaatctttgaaaagctcaaaatatgatagagtattttttgaattctaattttctatcttgattcgtttgatgaaaatattctattctttggtgatcatgtggtgatgtattggttgcttggcgatgtggtttgactatatactttgtttttaaacgatatcatatattatgaccactagattctcatttcaatgtttttttaataatcaattcatgcaccttatggtgattattgaaatatgaattttaattttgtgcaagagaaatattttttgtgcttatttatggggtctcccatgaaatgtatggattggaattaattttgtttacaattgtgagatataattttttgtattgattatttctaatttaactatgccaacaaaaaaacttggagttgaaattttgtaaataagaatattatttttagtttgaattctacttcctatcgaacttattaataatatattttttttgttttgtttttctttttagaataatttagttttgctgacaattattcattaggtaaccctaaactctttgatgagaatgattgttggaaaacgttactatgaagattgcattgtgtcatcaaaagattcagaagaggctgagatgtttagaggaatgataacggagtctttaaggtcggcctcatacgtgctagttagtgattttgtccctatattgaagatgtttggttttgaaaagaaacttcacaagaaaatgattgagttgcggaataatagagataggtttatgcaaattcttataaaccaacataaaacaaccccaaaaaccgattgctctagtaactctaatgagagcaagaacaatgtaaagagtatgattgaagtattaatggccttacaagagtcagaacccgagtactacaaagatgagat

SEQ ID NO: 96362 - DNA, 537 bp, Cannabis sativa
  modified_base (44)..(52): a, c, t, g, unknown or other
ttgattagcaacgagctgcacatcatgtttaaaaatcacgtaannnnnnnnngttagttagggtgttacaatttgtcccctatgctgccctgaccgaggctgcgtcacgttctaactcaacgttttgattctgcgcctcttccaaacagagtctcaggcggcggttttgactgcgctcttcatccttcgtctcggggttttgaccactcccatgctgaatttttctcgagcgtgttgtacgcgtactaagaccaacgtccggttgggttcttcgggaacgtgtggtccgtgcactggaggcaccctcagtttgagtcctcttggaacgagtggtccgtctgaactgcgggttagtagacctcctggagcctatgggctctttcctaggacgatgattagtttcctcatgtggggtgttaacagcttttggattttcatccacgaaggagatggtttttcttcaaaagaagggagggtttttctgagctttttcacagagactctcaatgaaagcaccaaactgttaacgtagatttt

SEQ ID NO: 96363 - DNA, 1162 bp, Cannabis sativa
gaagtgtttagctatggaggttaatatttttttaaaaaaaaaaactgaaaaaaaatgaaaaaaaaaggaaaaaaaagaaggaaatgatgtatagaaagattgatgtaatacatgaatcactcacgtgtcaacaaagcatgtattgtgtgtgcatgtggtacaaatttaaaaaattaaagaaaaactgtataaatgttcgggtaaccgtgtagtggtattttggtaataaaattaacattttgtatttttgatgtaaaaatttctatatattatataattttcatattatttatagaaaaaaaaatatttcttgcttacaaaaaagaaagttgaagaaacattttaattcaaatttcatttataattaaataaaaatataatttaatttgttatataattaatcaaaaaacataatttaaataaagttatacataattaataaacaaatatacaatttaaaaaaatttactaatatgtatagagctatttcttaatctattctatataaaatgtggcaatgttcttggtttaaagatatttttttagtttccacgttaactttaacaacatatcctattacttaacataatattttttattaactttataatattattatataaatatttacaaataaaaattatgtagatattttataattttttctttaattatatctttaaaaataagaattatatctatatataatcacatttatctatataaaaaatatatttaaatcttaatttcatgctaattttttgttttaaaaatgattaacgatatatatatgcttctaattatttctacactttattataactgtattcttccaactacaaattaagaatattgtatctattacaatcattatttttttaaaatatatgtttagacataatatataaaatatattttgaaagtatgattatttaatcaaactcaaattttattaaaatattttcaaatataatccttgtatatataaaaattaatataaaatataaaatacatatgacaatgaaatttattattttagtgtatatataaaacacgtatatatataatcacatctaaaagcacacaccaatatagccgtaatagttaaaaaaaaaaaagttaaaaatcaaaattcaaactttatgtcaaaattaaaaaataa

SEQ ID NO: 96364 - DNA, 566 bp, Cannabis sativa
  modified_base (228)..(233): a, c, t, g, unknown or other
acttttgatgtgggacatattttgggtccatggtgtcttatttacttcttttttatataaaaacctagagatcctctaaagaaaatttgatcagctaggggggagggggtctccaataatgcaatgtgtgggatttaattaattaatgaggtttttacaccacatattaaaatttctattttttttttctttctcactatggggcgaattttttttttcaaaaatacnnnnnnagttttatactgtgtattgtgttaagttttgacagattttttttaattgttccactgttgttttaatttttctgtattttttacgattattttataaaaagataatatttttgtaaaaatttcgtgtgacagtaaaattgtaaacttttacccaaaatttagtatttttataaaaattccttaattaattgaattttatttattactataaaataatggaataattacataagacacaactttttgcaaaaaaaaaattacatttttacatttaaataattttttatttttttacatttttacggttttccataaaaacaacaagaaaactac

SEQ ID NO: 96365 - DNA, 848 bp, Cannabis sativa
tgagtcaatatcaaagattctgctatccatcttcccagaatatataaaggccgactaaaccagattaattaaggtctccaagcaaggacacaatctatttgataagatcttagcaataatcttatagatgaaattgcacaagcttattggtctaaatagatccatccttgttggattctccactttcggtataagaaaaataaagctataattaaacttgggattcagagtacctgattgaaagaattccacaatggctgagctaactccttccccaacaatttcccaatttcttcaacccatcaggtctgagggctttaagacggtggagactaaacacagcgcttttaatttcgcccaaagacggtgttgccacaagcatactgttagtgctggtatctatcttcttgtcgaacaaactaccaagatcatttgttataaaagggttttctgaatgaaaaagatcctgaaaatactcattgacaatccctattaagtgcttatcaccctcccatctcttcctgttcttgtctagaattgatgagattatattccttcctcttcgaacaattgaaataaaaagttttgcacactaacatagtaatatgaataaaaatctgaagtcctatctactaaaaaatgatctttcttgacaagtaggacctgttcagttctaaaattatagcacacagagagttgtgtgttcatattgaatatggaggtctatctcgggaggctaggccctttaacagtgagcaatctctatgctagcctaacaatgctacaaaaatagaagcctaaatggagaacatgaatgtcaaccgaaaatgtcccaagtatagataatt

SEQ ID NO: 96366 - DNA, 573 bp, Cannabis sativa
aatgcaaaaatgcaaaaattaaattaagacattattcatatagatatatagatttcatgcatcgaaaacacgtaaaataaagacattaagttcacacaaaaattttgggtccgaacggtgtttccagaaattttttgatatttctttgttttccaaaattttttttcatgcttactaatactatatgaatgtagtgatgcatataggaattgaaacaaataccgaaaacgaaaaaataaaatcggaacaaacacggaccgaaaaactaaaaatttcacgtgtttatatatataatgtatatattgcataaaatattataaatatatgaaatggagtattataattattatgcaataaaacgtatatataatgtataatatatatataaacatatatacactgaataatatatatagtaacgtatataatatatatatatataaatgattaaatgaaatatatatatatgtataagaattcataagaacagaatatatgaacatatatatatacgtaatgaaatgaaaaatatatatataaatataaattatatatagagccgaatatatatat

SEQ ID NO: 96367 - DNA, 1746 bp, Cannabis sativa
ttaatgactgatttgattactctgatgctcatttctcgtgcttctgaagattgtcgggtagtataaagtttaatgctttacagttagtttttctttaacttgggtttttgggtattcaatgaatgaaaaataacattaattggattatacacaatattaattatggcacatttttgatgcacaacacaagttagtatacctgaattttaccatattaataaattgtgggctccatagttgaatttcttctgcaccagaggtgcccttagttttaaaaaaaataataataaaaaaatataattattgaagtcatgttttgaaatgaaggagagaattcattagctataaaaagttttgactttgttcatccttctttactataaaaacatttattgtttgctttgcttgctactgattattttgggagtctgtattcttttaattgagttcagtgatctactagtcctatagaaaggggccatttctgattgttgtgataaatatttataagtcagcattatatgattgcttagctgggggtgccttctatggagaaaaatgtcagtgttattagtataagaatttgaatgtcgttttggtttggaacagttattattggcttgatgatttatcaatgttggcaggttcatctactctttcatgggagtggggattcttttgtgctgtatcacttgcataggttgcattgcagctgaagcaattaatggctgctgcctatgttttgtatccttatcgcttatgtcggttgttggctaaaattacagctctatctggggcttaaaacactgtttttatcatatactctttttgtttttttccttttaatgtgaacattccttgacaatgtcaaataaaatgagtaggaaaagataaaaaaaaattcattgcatgaaaatattcttcactaagaattaatgtttagtgcaagttctagaaattgattttttccaagtaatttactgaattttaccagattgttcaaaattgtttcttaactgttaaaaactaaattagtacacttctcttaaacttgtgtttattctactagaagctgctttggtggcatttattgcaattgatcgacgttgggaaaaggttttctttttcttcatcatttacttgtgatttattaactttacatctttttgtatattcttgaagtaaagtttataatggtacctgtcaggatcttccatatgacccaactggtgaacttcaaagtcttcgagctttcgttgaacagaatagtgacatttgcaagtggattggcattgttgtgattacagtacaggtatgttaccgtccattttcttatctattttaggaaaaacatgaccttgatttggcatttcgcttacatgtttctgctgaattatgttcaggcactgtcgttgctactagcaataattctaagggctatggtttctactcgaaaagctgacgatgatttagaagatgattatgatgttaggggtagaactcgggagccactgttaaattcacagtctggccaagcatctggatcgtccaaggttgatggaagagggagtcattcagacacatggagcttgcgtatgagagataaggtatttgcctaaaagggtcattataatttcaaagttttacgatcgatttctatgaaccactagccaatctagtctaaacttttgatgttgataataccggactactggtaatattaggtatcatccaattacaaaaaaa

SEQ ID NO: 96368 - DNA, 1141 bp, Cannabis sativa
gttagattttttttttacttatttttaaatagtttgataaaattaaggttattttatcttattttaacataaacgtcatagtgttcctcagatccggtcctaagctttggcgggctaggaccgtgcaaaatgtgggcccaaaataaaaaatgtgttgtaatttgtctttaagtgaggttgtttttggctccaaccgattacaattgttttaactaactgtccgttatgacagtccaaagaaccaaaggctatttatagtcattccttctcatttcttgggacaagttaagagagatcctgagatgagttagtgagctagtttagagagaaaagaggagagaaaagaaagttgtgatggcctttgattcttagtgccacaagtgagatttatgtaaattgaagctaggcttcattgagtgattgtgtttgagaacacattagtgaaacaattacttgtaatcgattctttctagctcaataaagatcaaagccactgggctattttggccgagtagacagctgacactaaaatcacactgttcgaacctcgttacttctttgtgttgcatctggtttttaagtttcttgtctactgttctaagttctatttttcagttctttgtgtgtgtgtcaactaattgatcttgatcacttgtcttactatttttgtttgtcttgattatgcatgagtttcatgatcgagctatcgatcacaacaaaaggaaaggtcttattagacttttatttaagtaaatttaagtgtattgcaatcaacaaatattcatagcttggttggttggggtgtgtgacacattacataatggtgtggctacaagtcccatgacaatctattttcaacatttttttatatgtatttttgaaagtgagggctccgaaatttaaatggcataggtccatatatcttagggtcgatcctggtgctcatgagttcacacctcattattaaaaaaacactaaaaaagctaaaatatatacacactaactattatgaaagtgtagggccagccttaggcataggcgggctaggcccttgcataggacccacacttttcaagggtcaaaataaaaaataaaaagtcttattaggcttttattgaagtaaaattaattaagtgtgttg

SEQ ID NO: 96369 - DNA, 802 bp, Cannabis sativa
agaaaattattattagtgcttgggtcatatggacggagagaaataaagttactcatggtcaacaattaggacaaccacaacagattgttaattggattgacagttattatgaaattgttgtatctgcttgtgatggagccaaggttagtagccttactcatcaaagaaatagaaataattcagaatttctacctagagatcctcaagaagaacagagacatacaatacttatggttgatgcagcagtattgaataatacaagttcagtaggcttaggggctattatcttttcagaagataaaagagtgagggcagcagtttgcaagcctctcaaaggttagacagttctttaactttaaggaattttttttcaatttgtataagcctttaaattttatagcataatgttttgaatagatttcgacacgataaacatggggcggttttatgtttgaacagtattaggtctggttttacatgtttcagatgacatagggactattaaattttatttctaaaagggtgaggtctgacgtaacaagttttaaaatatgctctagctaagtgattgagtagtacttggtggtgtttatatattgtggatagacatttttagatagattagttagccattggtagtttagtttttgagcgcatttgtatcaggctagaatgtagcaagtttaatatgttttggccgttttgagaaaatatttgtattgtgttttatggagttctttcactagccaaagggataaccctttggctagttttttcatttttttcatttatcttttctttg

SEQ ID NO: 96370 - DNA, 639 bp, Cannabis sativa
aagaagaaggaattatgctgatgggtcacgatggctaaaatctgggttagcaatcaagagtaatacagagaagccgccagaagcaaccagctccaatggtggtggccggagtcatcaaatccctccattcagggacaatcaaagggggagaattaccatgaatcaagtatcttcattaattcaccaagatttacgctccaggaatgaatcaccaagcattaagatagttgaccagagtaatgaagcacaaatcactatggaaaaatccctaattttaaggaaagataatcctactgggatgatggcgccaactcaaccggatttgaatttagggctggtctttattgacaacaaaaggagaagaatgggccatacaaatgaagttgggcttaatgaaatacaagaaattgaaatgggccgtgggggaacaaataatgatcaagatggcaataatatggatatttctcaaccagaaactaatgttgatacagtccaaaatgatacttcaaaaaacttgctcgaggcggttgctggttcccaggcccgccaagaattatgaatgttttgagctggaattgccgggggcttgggaaccaaccgactattcaattccttaaagaaattgtttttcaaaagaga

SEQ ID NO: 96371 - DNA, 834 bp, Cannabis sativa
aaaatgaaatcaggggatgattgtatatcaattggtgatcagtctttccatattttgatcgttaacatattttgcggccctggtcatggcataaggtcagcaacttttaattattttaaattatgtttaatttaattatatatcttcttaattaactaatatgtgttaattatacatatatattatagtattggaagtttgggaagggatggtgaagaagtgaaagtggagaacatacaagttcatcgtgctaatttctttggcacaactaatggtgtccgcatcaaaacatatcaggtaatgtatacattaaaatttattaatattaatttggttaattaatatttctggttggaatttattaatatgtctgtccattttttttttttttgttaattatgaatttggtcaggttggaaaaggaattgttcagcatgttggatttaaaaatctaacgtttcacaacgtggaaaatccaatcataattgaccaacactactgttttgatccaaatggctgcccagacttggtaattttttattattttttttaattttatttccttaggaatacacgagggacgtgaaatttgcgtaaagtgctctcctattctcattctcattaagaattttaatctctattcctatttatttttcattaaaggcggtcagaaaatctcttaatgaggtagaaaatcataaaaataaaatttattttaaaaatttaaatatataaaattattaaattatataaaagttacaatattatacataggataatttcacaaatgcacaaaaacaacaaaaaaactaacaaaaatacggtttcacggaa

SEQ ID NO: 96372 - DNA, 645 bp, Cannabis sativa
atttatcaaatctaattagtgatgaatggagtaacccatacttttataaatggtattgcgctctcatacacaatcaataatgtaatactctcagattttttcaaaatggtagttattttttctcactaatcttgaatggttttattactacaaatgattctttttggttcactattctcgagtcactaaagtggcctttagttcgaaaaaatgaaaatataagtatatgaatgagaatgaggatgtgaacagaaatggaataaataaaatttaaaatgcacaaaaaaaatgatgaaaaaattattaatttttttcaaatcttgtattggagttatctttccctctattttaaaatggaatcattattttataaatcttaaaatgcaaccaaacaaaaaaatgaaataaaaattatttcattttcattctattctatttcattatcttattaaatgatacctgatagtttttctaactctccttttttgaactatttttaatttggattgggtactcattaaaatttgccatgttacaatgtggacatgtgtttatttgaaaagtaaaacagagtatatggtaaaaaaaatatgaggttctcgttcagtaagaacttctaagactgtaacataacaagtttgccca

SEQ ID NO: 96373 - DNA, 631 bp, Cannabis sativa
agtgcctgctccagaaattccagtagcacctgcccctgctgtccaggccaaaccagtggtcgcagtgaataggatggaacctctgtatgaaaggtttcgcaagcaagcacctccaatttttctgggaggcgtggatgtcatgaaagtcgagcaatggctaacagtaattactagaatcctgaactttatgggcgtcaccggtaacgatagggtggtctgtgccacttttcaatttcaagaagaggcactggtgtggtgggacatggtgtccatgattcacgatgttacgacaatgaactgggaaaagttccaggaacttttcaatgtaaagtattataatgaagcagttagaagtgctaagagaaaagaattcacccatttgactcagaaggaaaatatgagtgttactgaatacacaacacaatttgaccgtttggtgagattgccctcggggattgtgccaattgacttcagtaagaaagaaaaatacctggatgggttaaatgcgaagatcagacatgacttgatgataactactgaccacagaaccttttatgctgaaatggttgataaggcactccgagcttagggcgcagtgggatgcatgttagagtctggtgggactccggtt

SEQ ID NO: 96374 - DNA, 1127 bp, Cannabis sativa
gaagtcagccaagctttgcttgaccttggcgcgagtgtgaatctcatgtcttactctgtgtattcgcaacttggtcttggagaaatgaagccaacatctgttgtgctatagcttgctgaccactccatcaaaaagcctcagggtattgttgaggatgttcttgttcaaattgagaaattctattaccctgtggactttcttattcttgatacccaatctgtggtaaacatggaatcaaaaattcctatcatccttggaagaccattccttgccactgcaaatactttgatcaattgtcggaatgctctaatgaaattattatttggaaatatgacacttgaggtcaacatcttccacattgggaagcaactccaagaggatgatgaatgtcatcaaacattcatgattgacaatcttgtttcggaggaaattcaattgcaaagaagttatgataatcttgatgaactcctctctcactttgaaaatgaaatcctagttttgttaagctgctctagctatttttgatcacttagacacacaaaacagagggaagaaattttggaaaccccactttgaagcgctacctcgtgagagggaaacgctaaaatcttctgctgaagaaactcctaatgttcaattaaaccaacttctagagggtttgaaacatgtttttctgggagatgacgaaacctttccagttatcatctcgttcaaccttcaaccttctcaagaattgtagttactcgagttactgcgaaaatacaaacttacaataggttggaggcttatcgatatcaaaggaattagccctcgagtttgcacccatcaaattaatctggaagatgaggctatcccacgaagagacccttaaagaagactgaacccatcaatgaaagaagtggtgaaaaatgaagtactaaaacttcttgatgcggctatcatttatccaggggccgacagtaaataggtcaaactagttcaagtagtgccaaagaaatcgggtgttaccattgtccaaaattaaaaaaagggcccttgttcccacaagaactgtgacgggttggcgcatgtgcattgattatcgaaaattgaatgccgcctcccgtaaagatcattttccgctccca

SEQ ID NO: 96375 - DNA, 608 bp, Cannabis sativa
  modified_base (480)..(483): a, c, t, g, unknown or other
acttggtgaaaaagtttggtattagaaaagccaaacatgctaatactcctaagatcacaatcttgaaattatctaaagatgaacaaggggtaaaggtagatcctactttttatcgaagtatgattggtagtttactttatcgtactgctaatcatcgtgatatttgttctagtgtttgtatttgtgctcgctatcaagggaatcccatagaatctcatatttattctgtgaaaagaatcatttgatatgtaaatagtactgttgattttgggatttttttaagaacactaattctaatctagtttgtttcagtggtgttgattggacaagtaatgtagatgagagattatgcactagtggcggatgtttctatcttggaaacaatattgtatcatggcacaacaagaagtaaaactcaatctctctatccactgcagaggctgagtacattgtaatgggtagttgttgtacccaattgtnnnngatgaaacaagtgatggcagattatggatttgatttgaaaattttaactacttctgtgataatactagtgctataaatacttcaaaaaattttgttcaacactctcgcacaaagcacatagacat

SEQ ID NO: 96376 - DNA, 679 bp, Cannabis sativa
actacaacaatcaatcactgtaatgccaatcaacccctcaaactcaaaacataatcaattccagtcatggatgttcaatctgaaaatcctaagctaaatcctaatatggcaactcttctcatttcatcaacaaattgcaaattgcaacattggtgattatagtaatacatttcattatattgtaaactcacttagctcataatttttttacagagaaaaatacctttttatatatataagcctactccaaattctgttcatggaagcaaaaagaaacccaaaaatactctgcattgaatccaatgaataatgtcccaaattaggcaaatttccaccattcacacccaaacaaagaacaaagaagccatggaaaattgaaagactcagaccccactaagctcattgtaatctaaaacccaataacaataataatccaataaaaattaagagggcaattcatagattaatactaaggtaatttatgagtaaaataactaaaagagctaaaagactagttttttagggcacagatgaagaagaagaatacctggttatcagagtttagctttgagaaaaatatgaaatttgaggcagagaagaatcgtagaggttaaagatggaaaactatgaatgcatatatacaacatatatatattatatatataggataatttgaata

SEQ ID NO: 96377 - DNA, 532 bp, Cannabis sativa
gttagattaatcttttaaataaataatatgtcatataaatataatttttttaaaataaattacacaattttattaataacaatcaactaaaattataatttacaattcaatcaggacatctcttttataagagacacaactaggattagaattaaaaaaacgagcaaaataatccgtcgcttaattctcagatcatttgacaaaaaaaaaataaataaataaaatttgattaaaaagattacatcattacaattaaccttaaaaatacttatattcagtttcttccactactcagaagacataatagtaaaaactgttgcatcaagttcattcaatcttgtagcttaaacactcaattattgtgtagggtacgtaactgcactactaacaatctctttaatctctgagaaccatgttattcacaaatactaacagcgatttgatgtcgaaccatcacagaacaaagaagaatcaacaacgaaataaaataaaacaaaatcatgtcacatagacaagactaaaacaatcaaaa

SEQ ID NO: 96378 - DNA, 550 bp, Cannabis sativa
agcttttagctgtagcttctccaaaaattcttcaaaaagttattttttaactgtttaccaaacacatttctatcacagcttttttaaaaaacagtctttagcttttttaaaagctatgccaaacggaccctaaatatcgattgggctttgagagctattttactgtagaagcccatggtaagaaaggtggcttagcatttttttggaaagtctcagatgaagctcatgtgttagggtattctttcaaccatattgatattgaagtccatcttcttggtgccttgcgatgggggtcactggtttttatgggaaatacaaccgtaatttctattacgtaagtatggtatttatgtgccctataaagttttgggtggtttggacaggttccggtagtgtttcgatgagtgtgtaaacttagaaaattacactttttgcccctcaccaaccacttatttggttctcgtagaagtcgtttggtaattcgagaatcatatttttgctgtaacttttcacttggtgtctattttggacgttctatataccgtttcga

SEQ ID NO: 96379 - DNA, 1484 bp, Cannabis sativa
accaaaggattgcaaatatgaacaactcgtacagattctactctcttcattggaatgtgacccaacaacaacaaccatgcaaatccagtaccaagtaaaagaaggaatacttccgataaaaatattgaacgatttgagcctatttgtttacttgcaactgaagatcaaaaaattgatttcaccacatattcattatgtgtcaacactcagaataacaacacaacaaccgctgtaatacctatgatcacataaaaaacaacacaaaaacaagaaaatatcgaaatgcttcagtgcaacgcaccaacaacaaaatcaaacacactagaacaaccaaccggggaagaataagaaatagaaacagaaaaagcagacaacaaccaattcgacatagttgactatgcaaatcttgttgcttaagaaatggtaagaaaactagaaaacaactgtaaaaaaaaatagatccagagattgacatcaacaacgcaaagctcataacagataaattccacccaaaagttgaaaaaggacagtcatgcaaagataaagaaacactccagaggttccttgactactacgcaatcaaaaacaatttccatttgaaggtatggaagtcatgctctcaagaatatagcctgaagtgtgtttatcaaaactgtaattggtcactaagagcatcaaagaataggccaacgaatacattcataatcaggaggttctcaaacatccccacttgcccaataaatattagacatgaagaccaaaggcaagcaactacaaaattcataggagaatgcatcaaaccaaaatttctgaacatcaagacaaaatcaacaccacaagatataaaaggagaatttaaatacaggtacggtatcaagatgaactacatgaaagcttggaggagtaaaaattatgctataaatgacttaagaggaaaggctaaggaatcatacagcttaataccaagttttttgcacatggtgagaaaaaacaaccctggatcaattgtggatttgataacagcagaagacaacaacttgctatttgtttttatggctttggatgctttgataaaagggtgaaaaacatgcaggccgataatagtcgacggtacattcttaaaaacagtttacagaggaacattgttgttaacaagcagacaagatgcagcaggacacatatttccacttgcattttgtgttgctgattcagaaaatgacaaatcttagaaatagtttttcaaaaaattaaaaagaagcataaggggtcaaagaacatcagtgtctaatttcagacagagacgagagcctgatcaaagcagcaagagaaatatacgcagaaattgcacacacatactgtggatcaaacctttaaaacacatgctgccaagtagaaactgccattctttggagcagtgaaagcatacacagagaaacagtttgaataccacatggtagaactagacgggttggacaaacgcataa

SEQ ID NO: 96380 - DNA, 575 bp, Cannabis sativa
caatgtgaagaaaactttgagcaaagaatttgtgatgaaggaccttggctcagcaaagagaatttcgggcatagaaatttgtaggaatagaaaacaaagggtgttgaagttgtcccagggaagctacaccactaaaattcttaagaagtttaggttttatgatgtaaaaccaatctctacaccttcatctcaacaaattaaactttcttgctcacaatctccatcaactgaagaagaatctagtttcatggagaagattccttacactagcatagttagaagcatcatgtatcttatggtttgtacaaaaccagacctatgctatagtgtaagtagagtaagcaaattcatgggaaaacatggtctagaacattggaatgctacaaaatggatacttaggtatctcagaggtactatagatgttggtctaatctataacaaaggtaaagaacacaccaatgtggttggatttgtagactcggattatgctggtgatatggacataaggaggtctcaaatagggtatgtatttcagctaaatcaacacacaatcagttggaaatcaaatctccaag

SEQ ID NO: 96381 - DNA, 678 bp, Cannabis sativa
  modified_base (32)..(59): a, c, t, g, unknown or other
  modified_base (444)..(444): a, c, t, g, unknown or other
tttagaaagttcttatttaggatgttaataannnnnnnnnnnnnnnnnnnnnnnnnnnnggtaaaataaattccaacagctctatcataataaaccttctagacttgatgttttgggactagctcgtttaggtggtcattctttctagaatactcgaccacaaagtcagctaaagcttgccccttgattgaaacttggggctgatactgcttgtcaaactggctaagtttcatggtccatttaagtagtctgtcggacgacttcaacttttgcaacacctagcagaggggataattggttaataccttgatgacattatcttgaaagtgttagtttttatggtccatatcaaagttataaaggcagaagcaacatttgataaaaatagtttttatcgagtataaaccataagcttaaggatcttaacctaatatatatatatanatatatatatatatagatttaatctaaattactgatgaaaaattatacctcttgaagcctatcagagtatccctatatctttttgtgtaattatcgatcatccaatccaagaattttgttgaggaatctattggttttgtgtcttaaataaaacccatttcaatataattagatttagtaattaataaaaggtcagaaataattttatgttgcatggttcacgtgatttatttc

SEQ ID NO: 96382 - DNA, 586 bp, Cannabis sativa
taaaatatagtgtaattactacactgtgtaattactaccctaataattactctacttagtaattacacagttacttccaaacgcactctaaatacatttttcgtatttattcataaaaaaatattaaaaattgagctcatagtactaagttgtactatttttaaaaaatataaaatttaatttactattttacaaaacagatatttcaatatataattttttttcaaaatgtaaaatttaaaatagtgttaaccatttattttatccactaacattttaaataaaagaaagaatactcttaagtcacttccacaaaaaatagtaaaataaatcaatagataattaagtaccttatatgactttttttttcctttaaatgtacacaaaaaatggtgttgtatttattgaaatgaacacaaaatgaaacttcacttgaacaagaatctagtacatcattttcttctccctctcttttatttatttttcttaaaaatgccaattggctagtaaaataaaatacttgacaatagtaccttattggaggaaacctttatttatatacataaagaaaagaaacattctttaa

SEQ ID NO: 96383 - DNA, 879 bp, Cannabis sativa
ttgctgaaataatttacattaatgatttgtagtacaatattttcttttttattatatacagtaatagttatatttgagatattaattttattttttatttcaatagtgtgtctaatttttagttaatagtttttattctattaaagagtttaattgtgttttaaatacttttacctctatttttttaagaagaatatttctatttatgaatatggtgatggtatgttattatatttattttgttacattatgtgatgttgcggcataagttttgtttggtgacaatgtatagatggagaatctttataccacatcttgaattatttgtagcagataagtttttttcttttaaattttgggatttttacacctgatgcccttttccaccattttgttacatttttatatatttttggttatttaaacttttatacatttttcatttttcaattttactttttcaaaagttcaataattacaaatatacatttaccatgcatatgtcatgttttatgcattctagcaccccacctcctccaaagctgccctattcttcttttttttaaaaaaaaaatttattctctatttctttttcctttgttcttcaacctccataacccacgatccgtcgaagccctaacccacgtttttctcaacctcccttctatgccactatcctcatttttctcgataatatctgtaagttcttcctcccccattgtgttctctttttctataaatagccaccactagaagtggttcgaagtccccatctctagctaaaaaattttttaaaaaattctaagaaacctcctaaaaattcatctaaagtcgatcctaagatgggtttgaagtgcattgctaagaaagtaatgggtg

SEQ ID NO: 96384 - DNA, 800 bp, Cannabis sativa
  modified_base (644)..(644): a, c, t, g, unknown or other
atgtaactatatgtgtattgtgaactactgttttttatttattcattttataaggttgagtgagtacggtggtgattcctttggaactttagtctttattctagtttcgattatataatggcaatgaattacttattcattataatttttattttattaatatatttcaacttttattcaccatataaataataaaatattggtggttactgaaaatataaatatcacaaaagtgtcctaatactaatagaagtaggttgtttaattttaaatataattcaactattactactagaagtagaactagaactatacttagtggatcgagaagctatttcgtttataaatatattgatggtaccctttattcacgatataaataataaaatcttgataggttattgactgagtccattaagttaaaatattttcaatcaaatgtttaattttatatataacactaactttgagaaaataatcatttatatatatagcttacgatacaacacttataatactttttaaatcattcatgtgggatgtttacttaagaactcattagtgagtaaaaattaccaaattttaaaaaacaaataaaaaaaaaatagaatgccacctcacctcattttatatatatatatatntatatatatatatattaattgtacattttatttagaatataaataataaaatgttgttggaaatataaatcacaaccaacaaactttcctattactaaaagaagtaggaagttgaccgagtactataattgcctattagtaatagaagtaggatta

SEQ ID NO: 96385 - DNA, 1385 bp, Cannabis sativa
ttttttttttttttgtgaatcagagtaagtatatatattccacaaacaacatattacaattcacagcacctaaggttagcctgaatatttacaacttctcaaaccaatccctgtctatctttgaaattttattaggcaatattcctctaatcctatactttacatcccttttaatctttttgaccattgcttatattgtgtacacttttagattccagagaacctcatttctgcatggccaaatctaatataatgttgcagcaactagccgcatatacttgtcgttagaatttgctttcttctttggttagccttttcattagcctatccaccgttgtattttttgctccccattccaaccactatttgattgcttttaaacatccatcactcacatggcaatcaaaaaacacatggtctttactttctctgtgtgagccacacatgacacaattttcatcctggaccatcttgaatctaaatagtctttctttagcctcaatctatcaatgacagtaagccacaaaatgtacctgtgtttcgaaattgaaagcttgttccaaacacctccttgctaaggttgtatctgaatagttgggcataatacctcataaacttctttgatccgatagctctgcttggagtaatcaatagtggggattgccttgagtttctctttcactttcaccacttgtttccaatactagctacttgttgtaggtgcttcgtaatccttccacttcttttgttccaagtaaactgcatgtacccatttgacccataaggaatcttgttttgtttcaattgcccagacatatttccctatcgcagcttcattccactcttgaactctcctgaaacccaaacccctagctttttttggtctgcaaatttcatctcatgccactagtcctggaccattagcctcggctaaacctttccaaagaaagcttctatagattgtattgactctctgaagaactttctttggaataatcatcaattgagcccaatacgaatggatggacataagcattgagttaactagcactgctcgacatgcatacgatagatttcgagagctccaaactcttattctctgcacgatcttttcaataatgatctcacatttcgaagatggaattcgccttgcacataccggaatccccagatatttgaaagtcaaactactcttgctgaaaccagaaaccgcaaccactctattaacttcatgttcattcatttggcaacaataaattgatgacttggtttcactcggctataaacctgaagtattaaagaataattttaggccttgaagcattctataaatcgatacataatctccatggcaaaaaaaaaatcacatcatcagcaaagcataa

SEQ ID NO: 96386 - DNA, 599 bp, Cannabis sativa
gacaagaaagtgcataatgattttgtcttttagggacaagctagttttatgagatgcctcattgaatggactgataaagtggtactttaacaccaaggtgtcttgagtaaggctgagatttatggtgttgtttttgtgtccacgtaccccttttaatgggtttttcatgtttggtgagctttttaagaactttggggtcctttgtccaacaccttccatcatagtagtggtgaaatgggtatttctttgtatgacttgaaggttattggtggtttgcttattttaggagttccttatgaagagttcatccctcttaatgaataattggtgagcggtgattcatattattctactattggagcttttaagaatccatactcacatttgtgattacttaaagagcagaggtgcatatgaccgttctaagggtatggatgtctcttggaagcaatggttgaattttttttatagggggctattgtctttgaaggagtaaaaatgaacctgactgctaagactcaaaaaaaagttagctagcagaatactaatgaaggttatgatctgcgttctattctcttgaatgtaacaaaggagggtgg

SEQ ID NO: 96387 - DNA, 574 bp, Cannabis sativa
aaattctgttgaagcatttctatcttatgatgtccatatattcattgattcccttctcaaacaatgaaacatacagagaagaaccagctccaaactaaataagttagtattttttatgtatatatataaattcctcatcctgacctacctggtaatatgctagttttaagattggaggaaaacctttttctgatctttctttttgttctttcttggggttggattggagattgttataggaattatccatttttctgctcaggaaacctgggattttgaacaactattctggaacaaaaagaaaaagtagggatccataactttgaaatcttttaaaatacatagaaattcacattgaaatcaaatcatttaattataacgattaggtttattgcatggttcaacaatttacagttgctaaggttttgtttctcagttgctttggtgcaaatgtttccttgatttgtgtatagaaaaagtatatatatattagtagatctaacaaagcatgaattatttttgtggtacaaaagatatatcaaattcataatctgcaactggcacttcaggaata

SEQ ID NO: 96388 - DNA, 523 bp, Cannabis sativa
gtagaacttaatttgtgagttttggaaaattctcataagaatagaagaatttctgttatctctgtgcaaaaatactgaagtaatactaaagctatgctgtaacaactgggaaaaacctgactatggggggattagctattcaagccacttttcaccatactacatttcttgtaagaaattttctagcaacagtagcattaattttagcaagtttaattacaatcattttaattttgaatcattgctcaaccattctcattttttttttctttactttaagttgtaattagtttgttttacattgtattttgtttgcaattcctgtggagatgatcttacttatcactctattacttatttgactatgtgcacttgcatgtacataattttcacaacatgatagttttgacagttttgagctaggtaggccctttattatatctcttatttaatctagttgtgcttgcacaaaaggatttgatgcagtaggaacttgagtgagtggcctttttcttggctgggc

SEQ ID NO: 96389 - DNA, 1382 bp, Cannabis sativa
aaaaaaaattatataaataactctaaagattttccttcttgatcaaaaaaaaaactctaaagattttcttttaaaaaaaatcatcatacaatttcttatattaaaaataaaaagcacacaaaaacatatttttaaatgtacataatagtaaaaaaaattaaaaattaaacaatttttatacaaaatagaaatctaaaacaaaaagaagacaataaatctatagaatacccattatataattttaaaataacttttatcaccataacatacttgtagtcaccgctacatttatagttgatatcatcatatttcacttgtggctaccgctaggtacatttaaagttgatgtcataatcgtatctaatttgtaatcatcattaatattttttcaaataggtttgatctgtacataaaataaatcaaacaattattgataagtactcacttttatacacaagtgaatcatattaaataaactcaaaaaaatttaaaatatgcaaaactaaaacctattaaaacatccaaaaggaaaaaaatacaaaaataagtaaaaacaagatgacgataggagtgttcataaaatatccaatcgaatatgtataattcaatccaatccagtctgatctgcaaagtgcggatattcacacttgtgtagattgaattagatagaaaaatctgaaatccaaaaaaaaaatagaaatgaagatgacgataagggtgttcataaaataatcaattcaatctaaacgatccacactaataaaaaaaagacttttaaaagcagtttttttttttcaatcactgaaaaagaaaaaaaaatcatttccatagctaaaaaggaaaaaaaaatatatcttgaaacccctttagaggcgattattcggttatttcaaaataactgcctttaaaggggttgttaacttctaaatggacttcagcccataagaacctcaccaaaactaagagattggctaagtgatgtcaacatattacttagacatcaaacaataaaaatctggaacgttttttcacttacctagcgtccacgttcacgttaggatgtcaacctgggtgctgaacacccttcagtaaaacacccataacactcaatattgattcgattgacacaattcaacttacgttttaaagctctttcaagttatatctcacacccatatcccaaatttgaagatttcaaagctaaaatttgtgcgcaatgttagactataatatagtatatgaaatacaacatatatatacgatattaaatgcgaaaaataaactataaccatatcgagtatatatgcaatgaaagatcgatatacctctagccattgatctttgagcttcaatccctacgatagcttcggtgttagagttcg

SEQ ID NO: 96390 - DNA, 686 bp, Cannabis sativa
ccaaaaagaatcgtaaaactaaaatttttattacataactacattttatatagaatagatatatgtatggatgttataatttaagcaatttttttttctgtattatatttaatatatttttgtttgttaatcaataaaatgatttccttcttatttattacatggcacgtgtgaatattaataaatgaaggtgattcgccatagaaaacagaatatcaagatagattgtaggactgaatatttgaatcgggtttgactcagaactggctaactcactcggactcggacccggactcaacttggtcaacccataaaataaaagacccatttcgttaagaggggtcgggtccaatccagtatactttcgagtgggttcgcaggttaattttttttatagtcattaggtttcgagttggactcgaacctgcccaccaacctaagccaaaattaaatttttatcttttacatttttaataaatatataatatattaaaaataacagtatataatataatttggaattttttaaattgactttcgtgttttaaatttaaaattaatatttttttattttaatccaacgatatagattatggtgttataatctatatgattaatttaatatatagaaaaaatcatataaaatataattttttgagagttgtccaagttgactggatcaacaa

SEQ ID NO: 96391 - DNA, 605 bp, Cannabis sativa
ggagccttgggtttcttagattgtctttgcgctcgagattcgcatttctatgtctaccaccagccagatcacgagaattgatttgccaacatattctgggcagatggggcagcgcgaagagactacaaggcattcggagatgtcattgcatttgacacaacgcaaatgaaaaacatgtacaataagcctttatgcattatcgtaggggtgaaccaccattttacaacatgtgtattcgaatttgtgttcctaatgaatgagaaagagctgagctactcgtggatgctacaacatttctagaatgccatggtcaagtgaaaccaaaagttgttgtcaccgatggtgaccatgcaatgcatgatgcaataaccacgcatctgccacaatccacacatcaactatgttgttggtatcttagcacaaatgcaaacagagcaggtaggggtgatcccaagttcacaaaagctttcaataatttgatgtacacatgccacaaagaagaggtgtttgaaagtaaatggcgataattcattgagacctttgaaatggaagacaatgagtggtgccaaaaccaatacaataggaagcaaatgtgggctgaaacg

SEQ ID NO: 96392 - DNA, 1166 bp, Cannabis sativa
tgtttgtgaatttttgagttccttatttgatagtttttgattgattgattttgatttgttgtgagattttttttttttgaatcttcaaaacataataattagtgatttgttataggtttttggctccaaatatttttcaacaaatggcataataatataatcaattttgcttcatcatatactttttttttgtttttcttggattattcattccatgtgtctcacaaatacaagtggggttttacatcttatctttgcttttgcataaatggtttgagaattgttcaaaatatagataaaataggcactaatcactacttatattagttagtaaggctgtaaaggttccttaaaatttgaaatggttgtgagtggtttttgtgtcttagaagattaggagaagatcttgtttatgtgactttgttttaggaggcttcaactatttctttcgttattaagaaaacagaatatttcttagaacatctccaacaacaaggccggtccttagattggatgggtcttaggagaattaaaattattgggtgctttcatttaaaaaaatatgtgttattttcgaaaactattgaaaaatatgtataattttaaatggaaaatattttttttaggctgggtgggccttaggtgcgggcctatcctgcttttgcttaagcccgaccttgtcttcaaccatactctataaacacactccttaactaaaatagggagtgagacttaaaaaataagctctaactatataaaaaaaatggatatctataataaaaacggatagaaagctctttatttatttgataaactattttaatagtattttaatcaaaagtacttttacttttttattattttataaaattaatttatatttgataaattcaaattataaaatattattaaaataatcaaataataactaaaatatagagcatgatcggagtaacaacaataaaaaaggctttctatttgaactttttagctaaaaaaatagaaagtagcattggagatactctttaaacttttctcctttgtctttatttgctcttagaaataaaagttttgagctagaacttttacttcttttattgctatacaaaccccattacatgatactggttttacactgtaaatttaaaatgatgaatccaacactt

SEQ ID NO: 96393 - DNA, 744 bp, Cannabis sativa
aaaaaaggaccctccagccgttagcttagactcggagattccgcctgaggcaaaagatacgcagcctgcgcttctacaaatgccatttatcaagttcaggatatcagcgctgctatggccgcggtaagtctttgttattggtttttccttttcgtttgtgctctaccctgtggcacctgatctctcatacttaactcgtttttcttactagatcgctgcagagactggacgcctctcaaagactttgatagatcatgggtacgttatgtcggagtttgggggcatggacgaggccatgaagagtctgagagacctagcggcttaaaggaaagtgttttgggaggaagcccaatagagggaggcacaagcagagaggaggcatcaggaggtgttacaggccaaggcagatgagctgaagacccgagatgaggtcgtggccaaggcgaggcgcgagctgagggaggccaaggaagaggtcaaggatctgatgtcaggctgaagtctatggaggagctgcattaggcggacttgcagtcgacaaccaatttgactgttgaggtgaaggagctcagggattttaaaaatcaggccctgaagaaggctaaaagagatgagctcctagcccctgtcatctgcaagcattgcactaagcactttgatgacaacgttttcatggcatggtagactaatggccaaaacctcaagctcgacttttatcccaagcctgaggaagtccttgttcgc

SEQ ID NO: 96394 - DNA, 534 bp, Cannabis sativa
atcagattgggatggctaggagacatggaaagttggtttacctagagcaacctgttgagaaaattagtcctcatgttttttctttgtcttctgattcaaaaataaataatgacaccatttggcattgtagattcactactacaaaatgcacaatttacgttagtcaaggcgtctcaccaaaatggttgacagaggcaaaaaaaataggtagaaattttatgctttaatggataatcggagctaaaagaaaataattagcgtcagctgctacagtgacgctaaaagaggaaccgaggaaaaaagtaaaaaatttaaaaattatcttttgcattttgcttcggtggaaaaaagatgcaaatttctttggcttcagtagtaaacaaaggttaaaaagtttgtgattgttatccaccaaagcaaaaagatttaatatttgtatctatgggcttcaggcctaattaaaaaaccctaacttaaaacataaattcaacctaaatatcacaaacacagccgcacctctctctctctctctct

SEQ ID NO: 96395 - DNA, 691 bp, Cannabis sativa
ttgaagccttggatgagccaattacgatatggtttcccacctttcttatcactttgactgagcacgttgttcatatccccaattaagcaccatggcaaatcttaccttttagtaagatcttcaattaaatcccaagtaagttttcttttagacctgttaggctcaccgtacacaccagtgagacgaaagcttatgttccctccagacatcacttcaacatctatgtgattttggctaaaggtcttcaaaaagactcatctttaaaagaaagtaattaaaatgaccgtttaatttatttgatttataaaatataattaattacttaataattaattgagaatattataataatgatcactatttaattaccaaatatttcagttactcaattttaattactgaattaattgttaaaatattttgacaatacattatgtgaaacatagtaaatccatctaacagagttaaagagagcttgtaagcctgaatactcacactaactaagttttattttcttttgtagatctaaaaattgtgtgggattgaagctcaaagaatcaatgactgaaggtattttgatcttatatttatattatatatatgctccgtttatttcacatttaatataatcgttcttatgtttcatataaatttataacatgaaaatttaaaatctacattgatatggatt

SEQ ID NO: 96396 - DNA, 789 bp, Cannabis sativa
gtgtaaggacccaatgaaggcttgtaacgtaaataactataaaaaaaatttgactaaaaaattatttcaaataccaaaataaataaaaatacattgatacatcctcttaagggagtgtaaaatttttcaatattatatttctttcaaactttacatttttttttatattatccataatttatttgttttttttttctctctgttttttttttttcctgaataatactgaaaaagtgttcacccaagaaagtgggctgggctaaataggatttgtcaatatatgataaaattaaaaattatatttaaaaaattgatatttttgtaacaatataattaggtattgtttgaaaattcaaaaaatctcaaacaacactaaaagagtttcgaaactaagagcatttctatggagtgtgttacagtgtgatcttcctcaaccttcgactacctgctaatttcattccccaaaccccattagttattcagagttttctaggtaaactaaaaatcatgggtgtaaagaaattactcaacaagggtttaggagaaatgggctttaacgccggcggcggagtcatcaattggttccctggtcacatggctgcagcttcccgcgccattagaaatcgactcaagcaagctgaccttgtccttgaggtacgcgatgctcgaatacccttgtcctctgctaatcaggatcttcaatctcatctctctgctaaaagacgtgttattgctctcaataagaaggaccttgccaatcccaatatcatgccggtaatctttcattga

SEQ ID NO: 96397 - DNA, 523 bp, Cannabis sativa
cctacaagatatatcattttcagcagccatattattcattcggttgcacacactaaataaaatataccagagttattttcctttctaaactgaaacagaaagttcttctctaaactgaaatagaaagtctgaaacaaactcaagtggacacgggcggagaagactttttaactttggatgggaagaggctcgccggactgagccgaccgctcggatgcgaccccgccggagaagaagaagtagtcgctgcagaagttcttggattttttttgggttttgtctcttggtcttcgaatagtttgaatgaatactagtgatgaaatgttataaaattaatattattaactttttatttaatgtaataaaaaatattttttttactgtgttcgggttacgagtttgaacccgactaataaataaccaacttttgatacctgaatccgaaatctgttttaggtattttcgggttggacccgacccgacttcacgggttttcaaattttcggtttttttggcagcgggt

SEQ ID NO: 96398 - DNA, 944 bp, Cannabis sativa
aaaaataaaatgtgtccccatgattaaaaaggaagaaaaaagttaaggacttcgggagttttagtcatctttgagaggaatcttcgggactaagagtatgttggacttttctcctatggggaagaggtccccctaaagcagtacaacctcgtggtatgacctttgcacttcaccaaggactgggaactatacataattaatgtgacatgacaaaggtcaacctactctctgctagagaaagtgtgtttaagggtttcaactcatagttctctgacttcacaacatctcatgcataacttgatcttgacgactgccttgtgaactgtcaagtcatcaatatgagaaagaagtattgtctcaccaaacactactctgggcccaggcgctttcttatagaatatgaaatcatgccctaaggccatgcatgggaaattgtgtgaagtagaatcaaacaagcaagataaaggtacctttttaaccaccattatgaacctataaataccccaagaatgtagaggaaaggagatcagaaaaatcattctccgtaagaaaatatagaaataaaaatgactcatggactaaggctctttaatgcaccaaccatgtcaaaatactcttcttaaattcacattaaatactcaaataatcttattaattaattgttgctgaaaatcttggtgaatattttggtgctttcattgagagctccaggaagctttctaaaaagaaaacaataatcaatcctataccacaatggtgctaacaagaaatactttgcatcctctaaaccaacctgaagccccaaagcatccatttgaagatgttgttggaaacttgttttgccaggatctttttcactattcaagtatgttaaatcatgactaatctaacatcctaacatgaattctttaaggaataattacataaggcaccattttttgtaa

SEQ ID NO: 96399 - DNA, 1298 bp, Cannabis sativa
aatttttacattgtttgactcacagacaagtttaaggactctagtggatggatggcctagacgtctatgccataaatccttcttggaaacatgaacattggctgtgttgacaacacttgatttggacagactcgacaaaccagaaaacaacttagacagactcggatttgaagcagatttgttgggaaattggtaaaggccatctctaagcactccttccagcagcaccttctttgtgatgttgtccttcacaaaacaataatcagggtgaaactcaacaaacacatcattatcagaggttaaacttgacacacttaacaagtttttggcaatatcaggaaccagcagtatgttatcaagtaataaggatgttgactgaacattagtaggcaatttaccatagccaaaatgagaaatatgtaatttgttaccatcaccaatagtcaaatgctccttaccaccatagtcttgcttgtgcatcatgttgttctcatcagcagtgacatgattactcgctccactgtccacaaaccatgcatcactgtcaactgcttctggtgctgctgtgtaggctgctgctggttgattcgatttctgatttgcttgaccaccaatttttggatctgaacccatgtaagcttcatcgtatctgttgtagcaaattgcagcagagtgtccataacgcccacagacttgacaagttggtttgggtccatttgttcttccaccacggcctctaccattattattgaatcctcctcgattatggtttcctcgaccacctcctgttggactttgattctgatgatgatgatgattaccctggtttgagtaagagttgttgtttcgtcctctgttgttaggaaaggatcgattcgccagatttgcatttggtgtgttggaggcatgagcagatttgtttccattactgatgctgagattttgaagcctttccatcttgttatcaaaggctaaaagaattccctgtagttcctgccaggtagttgacgatcgtgcttcgatttgaaggacaatgggaaggtactcaatgtctaaaccagatgtgacattagaaatgagctggttctctgggtatggttcaccagccaaagccaacgagtctggccatgcctttttctgcttcaaataatcttccattgatgttgagccttttctggttgtttgaatcagtgtacgtgtatctttttttttttgatgaataagatcattgtattgctcaaccaaactattacaatttacaatcactatattctccctgtttttgatgtttactgtca

SEQ ID NO: 96400 - DNA, 522 bp, Cannabis sativa
catttatttttttgcagatcaaacaataataaatcttcatatattcacgccagctcttgatcgtataattcaatatggatttgtataaaaattggaaaattattatgtatactaataatgtatcaaaatctatatagggtgatcgattatattgatcattatagttgttattatttacatatatatagacttgaatatagtactacacagtggtcattaataaaaagacgatgtacgtgaatctcactactaacgacgaataatatataaaattactaccatatattatatatatatatatatttatatatatcttacaaattaatcccagtactgttcttgtcactatatatccttctccagccagttttttttttttcaactttatttttgtttatagaattctttttaaggactaagaaaaagaaaggaaagatatatatgtgtttgtaaatcataagtggaatgaatttttgttacgctatgtttttttttttagcataaattaaaaataaagatatt

SEQ ID NO: 96401 - DNA, 616 bp, Cannabis sativa
aatagtatttacccttatttatatatgtatttatttatatatgaatgtttgatttgtttatttttctactagctaatcaaatagtattaatatagttttaagtatatttgctaggatgatgctgattttgtaccatgttttgatgcttttttatggttgaatggaaatattcagaattacaatatgagtgtgatatatgacttgaaagatcttgggaagatattcaaacgcaagttgaatcgcatcaatcagattaatactgagtgagttatggcaatttactaaaggatgttcgccaaccaacgcccaggttgacattctgatgtcaacctggacgtagtatgagtgggaaaatgtgccgaacttttattttttatgcgtaagtgatattttgacatcacttagtcaatttcttagttttggtgaagtccttcacctgttctcagagatgtcatttttttgcgaaatcgagtagactcgaaacttctcgatttatggctaatttgccaatattccaacttgctgaaaatgtaaaatatcaaagtgtgaattttacttgtcaaaagtcgtatctctcattcattatggaaatagagtcatatggtcgagacaaaac

SEQ ID NO: 96402 - DNA, 506 bp, Cannabis sativa
  modified_base (62)..(63): a, c, t, g, unknown or other
aattgaaaataatttaattatattgctaaaattttatcaaaaaattttgagtttagggtacnnatatgtatgtttttaaaatacagggtatcaaattaatattattgaaaatacagggtaccaaacttgtatttagataaaacacagggtaccaaatatgtatacaacctctttttttcgaatttttgaataaatgaaataaaagtcttgttttattaaaattaaacttagccaatgtaactaataaaattagattaaacccaataataagttcactaaaggacaaaagtcatttaggcaaaatgaccattttacccttcccacaaccaaagagtcataaactcacataggggtattttggtaaattctaaaatctcaactattccagatattcctaatgtctaactatattgccctgctatactaaaaatactaggattttaatagccaaacatcgcgttccaatgttgccgggcacaaaacatgtaaaattatgaaattctata

SEQ ID NO: 96403 - DNA, 506 bp, Cannabis sativa
gagatgcttgttttaaaccgtatacgctttttttttttatttgcaaacgacattaggtggtatcacccctttgggagtgtaaccttgaggtagtttcatgtaacaatcctcatttaaatctccatggaggaaagcattatctatatccatgtgatgtaggtgccattgttttatggaagcaagagcaaaaaggagttttagtgtattgaacttagctacaggagcataagtgtcaaaaaaatcaataccttgttgttgggtataacctttggcaaccagtcgagctttaagtctattgactgagccatctggattgtacttaatcttgtaaacccacttgtttccaataacatgttcattgggtggtaaacttgtaacaatccatgtgtgatttctttctaaggcatccgtttcagcataaacagcatatttggagacttcagcataggattttggttcaattaatgactgagtggcaagagtagcattcctgaaaagattagaaa

SEQ ID NO: 96404 - DNA, 815 bp, Cannabis sativa
  modified_base (429)..(447): a, c, t, g, unknown or other
cttgtcaccaagaactgtgattgtcaaatggagcgttattcttcaatagcataagcaacgagatttacattataaacctcgaaaagacatggaaaaagctctgactcgctaccagatgattgttgctattctcttagcgagatgtcccaaaacgatacgctttataacgtatgtaatacacgtttgcattgacccagtaaaagcagaccaatcacagctgtgtgatttttaaataataaccacatttattttacgtgagatgtaattaaatcccacaattttaggagattattgttgtaagatatcattcagatttgtaattaagtgccctcctatgtaattagaaataggagggggttacactgaaatggggaggaaaaattcattagagaaaaggccctagaattgtatcagaaatctaataagatnnnnnnnnnnnnnnnnnnnaattttaactgcaaaaccacgtataaaactttttgttctttatttttcttttactgctattattttttgtgcaaattcatcacagtttaggctttcatatagttaacgaaaatctgcattaacagtttggtgctttcattgagagcctttgtgaaaaaagccaaggaaaaacccttctaatatatatatatatataaaactttctccatggcttacaacggagaaaacgttgatactcttcatgaagaaaccactcacaatcctgaaaaagagccaatgggctctcagaggcctcccaactcgtgatctacacggaccccccgctccagcaggacccaacctaagggtggcccaagtacacggaccac

SEQ ID NO: 96405 - DNA, 880 bp, Cannabis sativa
ttaataaatgataatttaaatcctgtattttttaaaattgtacaaaatagaccatgaattcaattttttcgtcaaattttttctttaatataaccgatctaaaattagtttctaacacgaacagataaaaaaaaatatgcagtctaatcataacaccttaacttattattaagtgttaatttgacaataattaagttcaaggtattatctcaaaaaaaaaaaaaatcaaggtataattttttttttctattttgaaaaatacaagatgaattgccatttaacaaataaaaggtcaaattgatacttttgtaaaatacagagtttaaaataatatttaccctaatacatgtttggtagaagggaggagaggggaggagaaggatagagaaactaatgaattttcttgtttggcaagaaagaaaagaagggaaggaagagaattaatggaaggagactctttccctatttctaatccatcatgaggaaattgaagggaaaaaaaaaaggataatatataaaatgacttttctacccttcaaaataaaatatataattacattaaaaataataaaatagtaattttaatatttattttactcttcatcattctaactttattaaacgaaaataagtaaagtgataatctcataatttattgagaaaaattattatgtcattctctaatatttgagtgtaagcacataccattacttttcatatatatatataaaacaacatggatatgatgttttaccttaagaatgcttagccccttaacctatcacttaacatttctctataaagaattatccttcaagaaagtcttcatcttctttcttttggtacataaaaattgaccatatattatggtattatgagc

SEQ ID NO: 96406 - DNA, 733 bp, Cannabis sativa
gaaaaaagagagggaagagagtatgatttgattgatgatgcatggggagagcacacgtgtatgcatggtatgatgagtaagtggtaaatgtgtaataaaaatagaaatatagtaataggcgtgtgagggtaattttgtaataaagtgtgtaaaaaggatttttcatgtaaaaatttctaaatgtaatgcatatggaccatttacgtgtttatatttatgagttaacggaagtgttagtaatgagtgttgggattttacagtcctatccctacacaaagtcaactcacacacacaaacacaaggtcaaccttgacctttcacacttcagcaagtggacacaaactgtccacgtatctcactcaaatttttgacacacagcatacacttaaccatttagctttactccaaaatgcaaaacaatgaaaaattgatcaggtctttcttgcttagattctagggttttcttttatcaaaatatgcatgcaatgttcaatgatgagagtgaaatgatatgcagatgagagttatagtagagaagatgcaaacacagtattttatagaggttcccccttagttgatggggtagtcctctttgagctcgcctcagaacaagcagggcccttgcactatcagaattcaagatccaatacacgattggtggagcttccagctacagatcaactggtaagtctcgatctcctaatgctatttattttctttctggtttctactt

SEQ ID NO: 96407 - DNA, 548 bp, Cannabis sativa
ttttacggaattctatataaaaacccctattgcaactagagctgcaacctaaatcgcaacaaaaaaaatcatatagcaactcacataaaaatagaaactaccgtaaaaactactttaaaaaccaaactgtaatttgaaaaaaaaaattaaaaaaacagtatataaaataattccttataaaaaaagattagtattttatattaattaatatgtgtattttttcggtgaataaatcatattttctgttaatgctctctcccgagaagagcctgccggaaggattgctgggaaagcccgacgaagtcatggaagacctgctatctaaaacgaacaatcttgtcgtactggatgaagatggatgggaaataaacgaagatggaggagcagaagttggaaagatgtgtgctttaggacgcctctgttctgatcgcacaatgaatcgatccttgatcaaaacgatcctaggttgggtgtggggcctaccggagaaggtctggggtgttgaaatcaaacacacttcaaagattccatcttcttggtattctcct

SEQ ID NO: 96408 - DNA, 723 bp, Cannabis sativa
tatatatagtattatttttccacacattaacatgtgagactaatgtacatttcatcttaaaagggagatagttgaattaataattacttttaatcatattaattttagcttaatcattattttttctcttgtttgacatgtaccaaatcgtacattataaattttttaaaccgttaaaaattcctccaaaactattaatattgttgaattcaaagactttcatctaattcagttcaatttcaacttatctttcttttaaaaaattgcagtataaataccatgtgttttcagttttatacacctaaatatcatattttttttcgacagattaaatattaaacattgtatttcacttctttacggcattactataatgttagttataacaaaaaaggttttacaccactactgaaatttctaacttttttatttttttatagtaggacggagtttttttaaaaaaatactgtataaattttatactgtttactgtattacgttttcacggttgttttttagttgttccactgttgttttaattgttctattttgttgttttacgattgttttataaaaagacaatatttttgtaaaaaaattcatgagacaataaaattgtaaatttttacccaaaatctaatatttttgtacaagctcttaaaaaaaaaaaaacaattttatagatattcagtacttatacggttaaaaacattattgaatata

SEQ ID NO: 96409 - DNA, 518 bp, Cannabis sativa
aaaaatatataaaaaaaaattactttgaaatataaaattgaaaaaatccttttcattttcacaaaaatttaaatattaattaaatttttacacaatatttattgtaagttttttatggattcaaattatttgcgtaatactatgtctaaaagtaaaattgtaaacgatataattcctaactaattaatattttatattataataatttttttttttgacattggaagaggaagattcaaatttagaacctcctctttataacaagaagtgtggaacactaaactaagcttatgactacacttggtcttaaataattaataataaaacaagaatggaattaaaaaaagggtaatttgcggcataccctccttaagtggtcaagtttttgcaattaaccctcaattctaaaattttagtggtaaaatctcctaaactcaaattcggttagcacttagccatttccatctatttttgggtgttaagtgccaggttggaatgtccacgtgtacacagtgtac

SEQ ID NO: 96410 - DNA, 517 bp, Cannabis sativa
aagtaagattttttgtagtatattataatatttattgtagtaaacccataaaattaaatggtatacttattttgtttaaatattatattttagttacttctatgttaataatgtataaaataaagagattggttatttttaccttgtttatcattttttatatcgaacaaaatatatgtactgtttcccacaactaaaatatgctttaaagttgctagaaaaaaataaataacctcaaagtatcctaaataatagaataacatataatatagcctaaaattaaaaaaattaaatcatagttttaaagttatttgatcaaaataagtaactaaatgtttatgacaaaaaattatattgaaattttttttttggaataaaaagtaactaattgatacattatttacatcaaaagcaactaaaaggttacttttttttaaacttgcaaaacaccgaaatttctggaagcgagaattttcaagtttattttttttcatttttggtaataattttgaatttc

SEQ ID NO: 96411 - DNA, 758 bp, Cannabis sativa
attcaactttataattttaattttctacctgtcgttttgggtctttctagtatacaatgattctgccaacagtaccttcggtgtgaccctctctcgatgtggtctcctattcgcatcttcctctccatatttctcaatattaagcttattccatgcctttttcgtatcccctccaaaactgtgtagctcttttgacattgccaagtgaccgtatgtagtccaggaacatagttgtaatacctcaataagcctaatggtaagtaattaagatttataatttaattgtgggttaattagattataagtgggattatgatcctactaatgtagttcaacataaattttaaattttctataagtgactaaataaacgtaatttataaattacggagatttatatagtatgtgtgaatgtaatatgagctatatgtggaatacaaataatttcactggcaaccttggagactcgattggaggctagaaatgtcataacgggcttaattgatagaattgatactacaaatatcagaattcgcgacggtcctaaaatcaattttttcagggaccgtcgctaaaaaaattaagtaactatttaaaaatgctgagaaaaatttagtattcccaacggtttaaaatcgtagtaaacaaaacaagcaacgttttttaaataaaatgtgattttttaatggacccttatacccgatggtttaaaactgttgggtatagtataggtgacggtcgcctataagggtccatta

SEQ ID NO: 96412 - DNA, 636 bp, Cannabis sativa
cttggcataccggaagctagtgagtagagtatgtacttgggtttgccaaacactttgagtaggaacaagaactctattctcggctttttaaaggagaagttgcagaagcgtattgagggttggcataacaaacttctatctcgtgctggaaaagagatcctaatcaagtcagttcttcaatctcttcctagctatgcaatgaatgttttcttgttgactaaaggaatgtgtcaagaaatggagcagttaatgtgtaatttctggtggcgtacttcgaataaaaaggttaactgcatacattggatgagttgggatcgtttgtgcatcccaaaggatcgggggggacttggttttcgcaatctcagggattttaatatggcattactgggtaaacaatgttggaggctgctggtttgtcctcattcgctggcagcccgagtgtttaaggctaggtactacccttctggatcgttcttggatgctgagattggttctaatccaagcttcatttggaggagtttattagaagctaagcatttggttaaatcgggcactcaagttgctataggacctggtacgggagtgagtataatgaaagatccttggcttccagacagctctaatccttatgtaacc

SEQ ID NO: 96413 - DNA, 1902 bp, Cannabis sativa
ttttaacaagttcgttcatctcttttcgagctttttcctttcgaacaaacacctgagccctcttgttgaactctgtgatgttttttgctagacgaccctgtaagtcgtcccacagtttgcctctggcagtggagagatcagtagtgatccctgcctgaagggcagtaagctaggtattatcatccaaatttcttactctcgtagcagccatgctaaaatgacttaagtatgccttaagcgtcttgctaggcttttgctttatgttggtgagtgaggacgcttcgggttgcctatcccttgcggcctagaactgctttttgaagtccttagacaactattcccaagaagtgatggagtgatgagtaaatttgttgaaccacctgcttgctgctccaactagtgaggtgggaaataaaatacaatgtagattgtttgtaacattgctagctcgcattatagtggtgaagttattcaaatgcaagaccggatcagtggtcccatcaaatgacgagacgtgatgtgggggtttttaaatcccaggggaaaaggagtactcatgatatctgtatggtatggctcgagttcttcatctgagtcatatccagattgtgttccttgctccttgacttgatacttcctgaacttatcctccaactcatctatttgaattagattggatccccttgctttggaccgagttgttggcaaagatcaagttttttctggttcaagtgttctcacagatttggttggttataattgctagcagacctcgttctactcatggactatgtcctacttatggacctcgtcctgcttatggacctcgtccttgagtgacttgcagtcttacttgtgcctgtgctttcttgatcattgttgcgatgagtactttctcctcctcacattgatcggttgtgggttcttgtgcaccccgaggtaacactcacctcttcatgccctgatcttctcccttgggtgtggttcgttgtgttccccctactagggtttgtacgagccctttccctatgggtttgggaagaacgttggtggttcctcgctggtgacctacgtgttccaggttgtgtcccagaatttccctcgtttccacgaggaatttcctattccctggtttctggtcgcctcctattctcatttttatgagatggttctagctaatcatttggttgttcattttcaggatgaacctcagtttcctcaggttgctcgtttttaaggggtccctcagtttccctaggttgttcttcctgagcgttctgagggttcccttgagctgtctcctacctcatggctcatgagctcgaggtctgcctcgtggtcttctccctctagggttagtttaattttgggtattattctcctgtgccgccctagcagcggccgcctcacgttccaactcgccattctaccggtttgcctcgtccaggcggcgtctgagttggtggttttccaactcaacgattggtgtgtatcttgttggattgtaggcaccatcctcaccaacttgattgggatggggtctaccaatattcatttcaggttattcataccttattccccaaattctgggttctccttgaacgtgtggtctgtgtacttgggccaccctcaggttgggtcctcctggaataagtactcctcgtacttgggccaacgtcaagttgagttctcctgaacgagtggtctgtttagatcgtaaattgggaggcctccgggagcctattggctcttttccaggactgtgagtggtttcttcatgaagagtgttgacgttttctccgttgccagtcatggagtaagttattttttttttacgtatataaggagggtttttttctaagctttcttcacggaagatctcaatgaaggcaccaaattgtt

SEQ ID NO: 96414 - DNA, 1037 bp, Cannabis sativa
atgggatttggacagcttgccatatctctgtaatctaatcccaaagttatagggattttcttgatgactcacgatgcgaaagctaaattcgctacgtgttggttgccctccgcggattgctgattgctttgctctgggcatgccagcgaggcctgctcggactgttccctctgagcagatactccaagtggattccatgtgtcaccattatgcgatgccacgtcagagtgcaaaaattgggataacaacctccattggagtgctgctcacatcagccgacccaaaatcaacaaaaggcgatttcaatgtcggtgcacgctttctcttatccaaaagaggagtataagtaacatatcatgaacttcttcatcagaaggaatggcatctgccttttcaatagcaacacttggattggattctgggacctaaaaaaataaaattggaaaattagaaaaattaaaagttgcaaaacaaacataaaactgtcaagcaactaaaataaaacatattttaccaacaaagaatataaactacacttacattgattttaccaacagcctctaaaccagccaacacaacttgctcatcatcaatttcaagctggcttaaaccatcgaaaaaaccatctccctttaaactaaactctttggcattaacattctcaacatccttagccctctcttcactacctgcaacaacctcagattgattcacatcagcagcaggaacatcactaacaaccttatcaactccagcaacatcaccaccatctttacccaactcatcaccatcatcagaatcgaaattaatattctctggatcaggtaatcccttgtcatcatcctcatcatcatcatcttgggttaccaactcatcaaatgacttaacctggatcaaacaacagtattgcaaccaaaataaaacagtaaaaaaactaataataccagccgtaaaaaaatgaaacaagaatagtgtaaataaatacctcatcagaaggtcgacgatgaatgacattaactttttcttgaatatcctta

SEQ ID NO: 96415 - DNA, 529 bp, Cannabis sativa
  modified_base (56)..(62): a, c, t, g, unknown or other
aaggttagggatgattccatatgcaaagtgagattattttgtatctttgattcacnnnnnnntgtaatatttatttgagtaatgcaagttcattctccacttttattttattttcttgatcaatctatactgctatatatgtaattatatactaaatatatatatagacttagtcatactttttctatatattattatttagtgatgatagtaattgtattattacccatttctatcttttatgttcatcttatttactttttgttaaatgatacataagtttagttatgttctccctatgtctctaaaaattaataaaaataatattaatattcatttctttcattatcaccgccatctatatctctttatctttatttttactaataatatataagattatatgaagaatgagtatcagcctcaaactcagcagcacaagtatccacacacttgtatgctaaagcaacacccaaatatagcctagtttgttgtacatctgtcacagtcgacttggtggtaaaagcaa

SEQ ID NO: 96416 - DNA, 559 bp, Cannabis sativa
atcatttgttggtagattagtgctgattaattctttgttattaacaatgcacacctattggagtcaaatcatgattctacttaataaaatcattaatgaaatagaagccatttgtagaagttttctctagaaatggagaaatatgatggcagggacaagatgcatagcttgggagagcctgtgcaagcctaaaaaagttaagggcctaggcttgataaacacttctatttggactgttgcaaccatggttaaacatgtttgggcaattacaaataaaaaagacaacttatgggttgaatgggtacatattgtgtacataaaacaacacaactggtgggagtataatgctccttccgataacagctagtattggagcaaaatggtagagtttaaggataaggttaagcaactggtgcaaacagatgtgtttactgttaatgaatataaaattgcagtaggttattgcttgtttgatcatgttcaagaaagagttaattggtgtaatgaagtctggtcctggcttaatacaccaaatcatagtttcatgatatggcttgct

SEQ ID NO: 96417 - DNA, 519 bp, Cannabis sativa
ttatgaactcagaaatcacaaagccatcaaaacctcaaaattaccattgaagttcaagcatttagttttcaaattaaactcaagcttgaggcttccaaatatggaaaaaaatttactatccccaatttattgtctcctccctgtcccactaattattgtaagacacatcatctaaatttatttaatataaattaaattggtaagagttaactaaggttaacacatatatgattaattctctctcctcaattaatataaatactctctcatttagtttgttttctaacgtagtgattagaatcatttatgaattgacaatgcatatattcgcaactagctcaggaacccgttgaacctggataactcatcgtctaatcgaaagacatgttttgtcaaatcatgaacgtctaaagtcagcaaacaacatgagataaaaatatatccgaaaatttagacaataaaactataacttcctcaaacaagacaccctaaaaactagagcttcaactgaatagtaca

SEQ ID NO: 96418 - DNA, 526 bp, Cannabis sativa
gacccaaaggtctaaatgcttcacggctatggttcttggattgtccccatctttcaaccgagtaaagacaaactgtattctattaaaagtccacgggcttccttcaataacacgagctatatcgagttcatgatagaattgaaaaagaaaacgatttgcctctagttctttaacatacatacctttgcccggctgccacagagacgccatcatatggcgcataacatcgaaatcaatacctcttttagttataaaagttcccacaatcgcccaccggtaatcaacatccttcacattttgttccacggtatcataagctagttccacttcctcctcatcatcaatagtgacttgggcacacaaatcttcaatctgtttcatattaccactagacgacgccattgtacacgaacacaaatctcacaagataactgaagaatcagaaaaaaatcagagaatactctcagactatgtcaatagacataacacagtaaaaatatgaatgtgaaggtttttagatattaga

SEQ ID NO: 96419 - DNA, 525 bp, Cannabis sativa
gggttttcctttttgaatttccctattcaatggtcgttaaatcatttaggcgggtacgatagggtgtgcatgctctgtactatggcatatcgtgggggacaaatttgttgtctgacatgtatgagcagagcctccgtgaaatgggtaatagcttagctaaatgcattctaagacaccttttggcatttggttgtgggaaacccatatcctttgcgggagtattcgacttcagccctgaagaagtaagtggcttcaattcctaggacggggagggacttctgatatcagaagtctcccccatcgtcgccattcaggggagtccctttcatgttggcccttttcgcgagctaaggcgtccatctttgtggaacaacggtccaacaaattgacaggctacttatcactgagtctgtccaggttgggatccatgtgtcaagcttataaaaatttggacaacataattgattaattaaaatcacttaattgagtctacaagcagtattaactagtgtggggaccatgggc

SEQ ID NO: 96420 - DNA, 661 bp, Cannabis sativa
  modified_base (630)..(635): a, c, t, g, unknown or other
tatacatgatgtatccatttgacccatatgttgtccttttttgttgcaagagaccacacatgtttgagaatggcaaccttgttccattgtgatatgtttaagaaccctaaaccaccaaccttcgtaggttgacatagtttctcccaagctacattacccgagccactcatattactctgtcccttccataaaaaaattctacaaattctttcaatatgaacaataaatttcttgggaagcactagcatttggctccaataagtatggaacgtaagcaacgctgaattaataagtacaattcttcatgcatatgagatatttctagtactccacactttaattcttactgtcattttttccactggcaaattgcagtcagtcgttgatattctttttgagcatattggcatacccaaatatctgaatggagtatgttgtctactgagaaccgagatgtcaagaactctatttttttccgcttgttccattcctgagcattacaagtctgatttctgcatattcgccttcaaactagatgaattcaaaaaaagtttcaaaccttgtagcattaagtatatgctcttgaaatcacctttgcaaaataacagaactgttaggttttatgccctnnnnnnaactccatttcaatgtaatctatttt

SEQ ID NO: 96421 - DNA, 531 bp, Cannabis sativa
gtcacgtgatcaacttgtaaaggtgtccccaattgccccacaattttgaataaagacctttcagtccaaaacttcaagtctaagttagggagttggatccatataggaaccgttctaatgtcttctttcttaaaattaacatttggatccaagctttcatcactacaggtctgttattgaagaagacatatcctccattgagcatttcatctctactttccactgtgtcaaaacggaccataaacactctgtatgacaatgatcccactttatcaactttaccttaccaaacctgccttataaaaccttcaagaactgatagaggtggattagcaccaaggacataacacactatagaggaactccaaaatgtactctaaagtgattttgaccttttgtgtgttaccagaactcttgaaagaattatccaaatttctcacaacatttccagatcttaaaatttgtggagtaacaatgttaccttgttgaatacttgcagagcattgctgattagcactcaggaagaattca

SEQ ID NO: 96422 - DNA, 2721 bp, Cannabis sativa
tttgtctcggtttcaaaaaaaaaaaaatgtgtcaaaatagacaaggaggatattgaggatgaggtgaattattgggcatcttcactggtttgttatattttgggagataaccctcctttgggagtgatagaaggttttttttaggagaatttggaagacaaaaaggatagataacgtaggattgttgtctcatggattttacttgattcgatttgatatagagaaaaatagggatactttcttgacatgtcaatcctcccgcgttccatgacatgatccaggaacttgatactttcttgaacgaatgagcacttctctcgctttacatacaactcttctttcctcaacttctagaacaccgcaaccaagtgttctcgatgctcttctaaagtggcactatagaccacgatatcatccaagtacactaccacgaacttatttaagtcttaaatggaagactattcacgagtgtatagaatgtagttggtgtatttgtcaacccaaacgacatgacacaaaactcaaatgtcccatattgagtaacacaagtcgtatttagttcttccccttctgcaatccaaacctgataatagtctgatctcaaatccaacttcgtgaagtattttgccccacttagctggtcaaacagatcaacaataaaaggaatggggtatttattgcgtacagtcactttgttgagggcgcaatatagtctatgcatagtttcaaggtcttgtccttcttattttggaacaacacaggcgcaccaaatggggccttcgatgacttaatcaaccctgattctaacatccccgttaactgcctctttaactccttaagttctagggaaaacaactggtatgtcgctttagttgggggctttgcacccggcaccagttctattcgataatcatctcccttcttgggaggtagcttctttgggagttcatctggcattacatctttgtattcatcttacacctgcccaatttcaagtagagtggatctcctccactttttcatcatacacaacgggagcgatgataaatgttggcctcttctttttcaggcccctcttcagttgtaaggtcgatagaagattgacttttgggggttgtcttagttttgcgggaaccattgaaggtttcttacccatgataagtaaatttcctgttgctagaataggaatggcccttttctcacctagaaacttcattcctaataccacatcaaagtcatccatgtgaaccgctacgaggtccagttgcccctcccatccgttaatcttaatattcactttcttagccactccaatcattgccatggcctttgaattgactgctttcatgcagctcgtatccttctccagtttcaggcccatcctcttggcttcgattttggaaatgaagttttgtgttgtgccaatatcaatcaacacgctcttggcctactttccatttaaagtggcttgtaaaaacatcaatccattcccaagggctttctttcctctcgtgccatgcttcttgagagcattcaacaatttctcgtgtgcacatagtcttcatcttcatcttcttccccacatccatgctcctcttgagaaatggatgcctttatggcacttaacttggactggtgggggaaagcagccaccctgtgtgggccttaacaaagccaacacttaaggggcttcttcccagtagtagcattagtcttagaggagaaactagattcgggagttcttatcccttcccccactttttcccttccactacttccccaacttcttactcccaacattattggagatggtctggggattcgacttctttgcctgcgaattctctgaggtgtaatcagtcagccgcttggccgcatcttgagcggtggctaggtcaaacacacgttgcatttgcagctcttgtttagcccatggcttgagtccttcaaggaaattgaaaatcctatcaactttgttcatgtccttaatatcgagcatcaatccagagaacttatttacatattctcagactatctcaacttgctttaactctctcagctggagtcgaacgaagtaggcaatattttctggcagtaattgggcattcaattctttcttaaggttagcccatgttcaatggttcacttgtcactttgaatgtctttgtacttcgtcctccaccacaacttggcatccctgaataaatacatggtagatgtcgctacctttgcttcttcagagtctgtctgaacgaccctaaagtactgctccatgtcaaacagaaagttttggagctccttcgcattcctcgcccctccatagcatttaggctcagatgttctcggacggccatactccatacctctgtgcccttcgatatttgcctgctctgccgctatcatggtaagatttagcttagttgacattcccgcctactcttcctaaagagtcgtgacagacgcatgacaatcttctattatatcattgagggagtcttataatgtgatatgcccattcccgctacctttgcttcttcagagtctgtctgcacgaccctaaagtactgctccatgtcaaatagaaagttttggagctccttcgcatccctcgaccctccatagcatttgggctcagatgctctcggacggccatactccatacctccgtgcccttcgatatttgcccgctctgccgctatcatggtaagatttagcttagtt

SEQ ID NO: 96423 - DNA, 503 bp, Cannabis sativa
tatgccactaaaaaaaatcattggatttatgcagcttacaaacctaaaactttgggtacttatgccgctatttaccctattaaataataaacatggcccccatattttctttttaataaataaaagttccacgaagttctttattgtttattttatatcactcttactgtctctcttgtatacttataatacaaaattaattggtcaagtttattttttattttctcaattgtgtcaaatgaccctgctgtaaattttctttgaaatatgcggagatggctaagttgttaatattaataatgattgttccacaagcaaatattcataaacatacagatagataagacttttacaaaagtgtacttgtgcatggctttagttcaccatcacagtaccatgcatggccaacaaaaatgagtcatcatgttcaccatgtcctaataatatgaatattagaatatttttaattaaggaaataaaataatattattgattctgataaa

SEQ ID NO: 96424 - DNA, 925 bp, Cannabis sativa
gtgatgtggcagcttaattgttgattattttctaatctctcctctcctatttttttgatttatttattcttatttatttagcctataaaaatggaactcaatggttatgtagcctataaaaatggaactcagtggttatgatcaaattattaatgatcaacttttcattctctcttttacttctaatatttatttagcctataaaaagtagaactcaatagttagagatcaaattattaatgacaaataaaatgctacacaaaaaatcattaataataaacttttccttttctcttttccgtctctcaatcttcccttctagtttttcttattctggtctatttgtctcccctatacatatgaattctataaatagttttgaaagttggagttattatgcaagaaattttcattgttctctcttctatggtctcttcaaaattgagcctttgagacaaacatttgtcattcatttttttacaggtaatttttttattttatctatttttattcatgtatattttttaaagttttgtatgtaaacctcatttttttagtattttgtatttatatgtatgtataaatatatatatagactcttttcacctcatttggaataatacttttttgaaaacttaattttatttagtggatgattttgtggcattatgttttattaaaaatttaattttatttagtggatgatttacatgtatgaatagcttggattatcttgaaaatttattaggtaagaatttaatttttctgctattttcatacgtatgtaataaacttttgtatatttagccataaataataagaatgcataatattttttgtttatttggattttactattaatatatatagatggatatatataatttaaagtggatacttttttggggagttttcaatattatac

SEQ ID NO: 96425 - DNA, 1006 bp, Cannabis sativa
  modified_base (300)..(308): a, c, t, g, unknown or other
  modified_base (859)..(864): a, c, t, g, unknown or other
cccaaactcaaacccggaccaagataaggacccagacctggactcgaacctagatcgggacctagactcaaaccaagactcgagacctaaacccaaacctggacccagaccagaacctaggaacaggacttagatgggggacctagaccagggacctaggccacggaaccaagacccagatcaaaatttagtcctcaaatccaaaccaagacctgacctggacccaagcatctgaagtcagacccatacctgaacccgaaacttgccctagacccaaactaggataggaacctagacacnnnnnnnnnccaaacccgaacccggacccgaacccaaaatctgacctaaacctgggacccaaactcaaacccacacctagaatcagacccaaacctagacttggacacagacccaaactcgaacacagaccgagatcaaaaccagagacttagacccggaactaagcctaaactcagatttggatcagaacttgggactcggaccttgacgtagacctagacccaggacccaaatccacacccaaagcgtcatatgaacgtagactaaaatccagactcaaaccctaactcgtacaaggactcgaaccccgacctgaactcgaaccataactcagacatagaatcacaactacaactggaacaaaactaggagtaggactaggaccaggacagagacctaaacccgaacctagactgggacccaaacccaaacaagaacttggaccaggacccaaaatcgggatagggacttgggcaacagaactaggatcaggacttagtacctgacccagacccggacttgaacctaggacctagcttgtgacccaacacccgaaatnnnnnnagactaggacctaagattgggatccagatctggacctggggcttggacaaaacccgtagtccgtgtctggatctgggaccaaaccccagacccgaacccagaccagcatccgaacccaaacccgaacctgcacccaacccta

SEQ ID NO: 96426 - DNA, 850 bp, Cannabis sativa
acctatagcatccaatacaaattttaagttctgtattcatttcattgatgactatagcaggttcacatggttatgccctttaaaacacaaatctgatgctctataagcctttatccaatttaaaaactttgctgaaaaccaatttgaaaccaaaattaagtcaataaggagtgattatgggggagagtaccaagcctttgagagtttagttcaagaacatggaattcatttccaacattcttgtccttatacctcagccaaaaatggaagagccgagatgaaacatcgccatatagtggaaatgggcttaaccttgcttgcacaagcaagtatgcccttgaagtattgggttgatgcctttcaaacatccgtctatctcataaatagactcccaacaccaatacttcatgacaagtctccatttgaggttgtgtacataaagaaacctgactatggcatgctgataacatttggggcaacatattttccatgtttaagaccaaccaaacccacaagtttcaatttcactcacttaagtgtgtgaaccttgggtatagtgagtcctttaaaggttacaagtgtctaagttccacgggaagagtgtacatatctagacatgttgtgtttaatgagcaagaatttccttttaaaaatggctttcttaataattatgctcctgaacattctgtttttatacaacattctgcctggtcacaacttccaaatatgcactcctttgctaataatacacctcaagaaaggatcactcaaaggcaagatctccctggagcagtacctaaccagtcggctttgttatcaccaagcaaaaatcaggtaagtcattcttctc

SEQ ID NO: 96427 - DNA, 677 bp, Cannabis sativa
accgtttggataattattatataatcttttttttaatgaaaaatagttttcaatgtgtttggatatcattaaaaatagattttttttttttgtgagttgagtaaattaggaattcaattctataaattattttaattttaaaaataatttctcaaaaatagttcactccattaaaataaaataattaaaattcttattctctctacataaatatcttcttcttcttctttttttatctattttacactattcctaataattttataacaaatgaatatattttgtttaaattttttaaaaataagtgagggtgattttataaatgaaaaatactaaaagatattagtggtgtctaatactcttatcatatcagtattatattacaattagtgtaattaaatattagatcagtattatatcgctattggtataattaagtatcaggtcgtatcgctaacccgtcgcaagaaaatacgtctagaaagagttaaatagtgccataatactctttataaaatgttggaatgtggattatataacagctcattgaaaaaatgacagctcgagttttgtttatcctttaggcaatgagttttgtttctccatttgtttctcacagctgtaaaatagtgttcttgctaaattaagctctagatttagtttatcatgagccggta

SEQ ID NO: 96428 - DNA, 909 bp, Cannabis sativa
aactaaaaatgtaaatattttacaaaacatggtgtgttatataattattccataaatttttaccataaaaatattgaattttaataatagtgtataatatgggccaaattggtacttgctatattatatcaaattcacaaaatttaggatgagctaaatatatactacaataaatatcattttttatttattttttgccactcttttctgtaattgataaccttttatattttatttatatatttaatataattattatatttttaatagagttcttaagaaaaaatagagttttcatatactttcaataaaaatttaaagcttttgttgacttcgtaagtgaattttacatctattgcattgaagcacaattgtcaaaataaaggttaattataatattaactcatttttttgaacaaaatttaacataaattttacactatatatagtgtcaaacaccctaaaaatataatatattatcgttactgtattttaataacgggtttcacataattttaaaataaatatatcaaatcaactatacattttttgcttaattatgaaacctctttatctttttgtatgtgatgacaaaagatcttattaaaatctcaaaagtaaacttagggggataatgttagggtttataccctgaaaagtctacaaagacatttctatttataaatataagttgaacacactattacaaaaaccagcttttttgtcagttttaacgtcattaaaattacaaaaacgacgcaaaaaattaatgtgcaaactttgtgtcagttgagaacatacgctgagtttgcgtcgattttggcaataatttacgtagtttgtgtactgacgctaacttgcctcagcgcacaaccgatgcaaaaaatgcatttatgaaaaaaaaaataa

SEQ ID NO: 96429 - DNA, 562 bp, Cannabis sativa
aatctcggcctctatttctttgactaatcgtttatgggtgcctccttctgtggagcttggtgatttttgtagtatgggtattatgattcgtgatagttttggtgtagtcatcagtttggctatttggcattcaatgaacgtaatgctaggtttcaatatcgtcttcttgatttagacaaggttcaatttgagtcagattgtgtgaatgtggtttataagattaataattatatttcgttggatacatctttaagtttaatcttgctctttttaatgtagctagtcttgcttattgttctaaatctgttaatgttgctgcttatactcttgctaaatttgttttgtctattgccactaataaggtgtggaggtcttgatatctaatttgtatttaagacaatgtacgtatgaggtcatttgattaataatatgatcttgcattttttttctcattttggagctcttctgctctttagaagatgtttcgagatttcttttttttaaaaaataaaattttagaaatgtattttgaaaatactataaaggtgaaaaatacttttag

SEQ ID NO: 96430 - DNA, 633 bp, Cannabis sativa
caacaactgccaaccctccagccaccaataactctgggcacaataataagagaaagggcgacaatggaggagatcagaacaatgccaaaaagaggaaaggttaccagcccatgttcacaatatactccgaacttgtggagacacaagaaaccatatatgtggcaaaggaacatcgggtggctttttggatacctgaacccttaaaagcaagtcgtgtgaagaaggatccatccaagtattaccaataccataaagacataggccatacaaccaacaagtgtggaaacctgagggatgagatagagactcttatacgtaatgggcctcttacttactatgcaaggaataggcaatacaaccaacaaggggtgaatgcacaacaacctgcagccccacatgccaatgtgcagccacagggggcacccaaaaacaatgctcctaaccaaccagcacaaccataaaagggacaaccgagacataacccatgacattcctccacttgtggaaggagaggacgtgttggtcatatcaggaggaccgcactttgcaaggacaaccaatgggctcaaaggagatatattaatgagctcaataactcagataagactcctttcacactagaacaacgtgctc

SEQ ID NO: 96431 - DNA, 581 bp, Cannabis sativa
ccatctgttatcactactgaggctttcaatagattaatagagagtggactagtgagaggcatccaatgtgaggtgccttcgagggatcagctagtgcactggcttgcctttcgattggatggcaaggttataacaccatgtccagcagagggttgtgctgactttgcacacatattttagagacatagccgcttactttgggatgtgtccaacacaaatcaccttaataagtttgaagtacctcttagtgatgtttgttctctatgcagagctaggttggcctcagcctactccctataagattgggtattattttgattgaagtcttctccaaaacaaaacgtgatagggtacttctactttagccaggttggttactagtggttgagtgacaccattagtacacctttgtcgaaagttggcggatatgcttagaattactttattgtttgggatgtcaaggaggtttgataccaccgcattcaacaataaccttcctacaagcactccatccctagtctgtatatgagggatagagcgaaccacatcccgtccttccctgtagagatgaggaatatcct

SEQ ID NO: 96432 - DNA, 996 bp, Cannabis sativa
taattaataagtataactattatggaacataattataacagttagaggcacacttcaagcgaagagaaaacactgacgagcgaagttcgtccgggacgaagacgagcgtccgggacgaagacgagcgtccgaaggtggcgtacaaccaattcagcaatgagattccggtaatttccctggctggaatcgatgataacgaaggcaatagaagaagcgagattcggaagaaaatcgtggaggcgtgcgaagattggggactgtttcaggtggtcgatcacggcgtcgacgctacactcatctcccagatgactcgcctcgccaccgaatttttcgctctgcctgctcaggaaaaactccgtttcgatatgtccggcggcaaaaaaggcggtttcatcgtctctagccatttacaagtaaactaacctcacttaaatatatataatatttatttatatattttttctttggattatgaaaactgtttaccttctccgtcggaaaataactaattttaatactagtattaattgctttttcctaaacgtaaatattgtttttgcaaccatatttttaagaaagtgttagacacagttttagtaattcttatttctaatagagtattgagatatttggacactagtgtatttactttattacctgttaaacatgtcaccttataattataattaattaattagtgacagtatacttaattgcattaaggtaataggctaccatttagcatttctctctttaatattaacgtataattcgaataaaatctttatagtaattaattgctcataaatattacgttagaaactaaatcaatactatttcttataaatgtaaatttaatactagctacctaatatctactcgagttataattttttttctcttaatattaaaaataagtcaaatacaataaatttttttcaaatatttcaatacaaaataataatattaatttttaatatatttgttacaaaaaaa

SEQ ID NO: 96433 - DNA, 1254 bp, Cannabis sativa
gtgcctccggttggcttattggtctaatggtacgtgcttcaagcgcgtgggctgcatttatgatagtcatcattaacatttatttcttttcgcatgcaacaattcacttcccgtccattgagaaaccggtgcatttaatcaatgtgtcagaaaagtactcacgcgttttcaacgaccctgatgacatttatctcgactgttggatctgtagaatacgaatcgattacgattcccatcgtacaatggcgcctgatcacagctgccttgcaccctttctgagtctataaaagccagcctttttcttcactgggttactttcaccatttctccattttcacctcaagaacacttcaagaaaaattccagaagccatagattttttactgctgttcctccgtcgttgccagtccgcattctaccgtcgatcaacaccagcccctagttcgcaacttttgtgtaagttttgtgggtactttatactttcattattcacttgtatgctacggttgaatgcttggttaagttctttatttttgggaaatgactttgctgaagactgccgtagggtgtatgtaccctctttttatttgtcttcaactgctttctttctcttctattttgcaatagacctctctgttgagagattactcagaaaatgagacagtttttgtgcccacattttgtttccttttcctctgcttttgctgcttttgagatatttacacctgatgtttgcctaggagaatccttggaatttccatttttggaaagcatctggaggggggctctttccagcggttaggggactcccattccctcttttcacattagggtttagtttgggggctaactgctggattttccttttttagaatctcaaaaccttcgggaaatgtctgtctcaacatccggagctaaatcttcaagcaaaggagcggttactctggccaccttagaagaggtgatgaagggacacgttttccaagagaagtgcacgtgtcgatccaatggttggcaggcagatgagcttcagtcaaccttaacctgtgcccatcagttggagaaaatcgtgattgtggccgggatgaagccttctgcctctggggtcttccaccgcttgccccgagatgaggagacacccaactgtaacaacggttgttttggagcttggagccagactcacctcatgtccgaagccatgcttccacttcaggattacttcataaattttctagtttttgttggccttgcgcc

SEQ ID NO: 96434 - DNA, 1539 bp, Cannabis sativa
atttatactaatctttagtggtaatttacctccctgtggatacgacatatagcccgtttactaccgcgaccgcagtgtaactaattgggcgacattaccttgccataaaaaaggaggcttaaactatctgggtgtttttttttttttttttggttacttgaggttcataggtacatgtatatataccttatgaatttgtcagttggagtgcaactctggcaattttttcgttttgagttatttgctggttacttcaaaaagcttggtttctcttagtttttatgttggtagagatggacctgaactaggattttaaattgggcatcgtgaaagccattaaaggtgtgcatgttggccttgtaggggaagcactcgtgggaggaattgaagctctagttcttgctaaaaggtcccaacaagggatggttcttgagactatcccagagggagaacccagcgcagaggaaggaccctctgtgaaagccaaaggaaaaaggaacgccaagaccccctgctggatagaatttcaatgactccatctgtgagatggatcaaaaggccaattgcttccaatcctatggaatgttgacaacatatgttgatggtgctggtctttacaatattctaggattgatgtggcacaggctgtctgccatgagagagtctacatccatgagtgtgaagggatttagtgcttggagctggtcccacatctctaatggagcacatcttcgattagggacctattttgcgactttgatgaccaagatcaggatagcccctttccagttaatcccctcatcgtacagggtcctggctgggtgttatgttttttggaagatgaacaagttggaagtaccttccccataggagattctttacttttatagtgtaaaggctaaccctatgagtacaaacaaaaagaagttgggcttctttaggttagacaagcgtcctaactcttactgccaaattagccacactgatcgttcccatgaccttcgagagtactggttctttcctctaggttccatgtgaaaagggtgccctcactctagctacacttccagttgccaggtattgttgacacacatccttaatctcccattcttaaatttactttgttttggttgttttattgatggtttccttgtaagtgcttgactttcgctagaacttccatctaagcgtattaaaactgtagagatagccataaaagagttcagtacagggcctttactgaggagcaattaaaggttaaggaattggtcatgaccgattactttgtaggtctggcctcattgtaaaatttcagaacattgatcttgttaacctacgggggcagtgctaggctccaaaagaggtgaaagaatccattgcaactaacttagttgttgtcataactcaggcggctaaagagaacaaactcctggagcttgattggttggcccgtcactcaaatcccttatctgaggaggaggaaatttcagaaacaacaggtgatattgaattgaataggttcaatatcggtcccttccg

SEQ ID NO: 96435 - DNA, 626 bp, Cannabis sativa
tttgtcaagacttcgacactgtgagcctagaaataaggtcgcaattttctcgacgatattaccaaggccaacgccaacttttccatttggggatagcgtctctctgcatccaataatcgtttacagacataatacactgggtattgtcgcccttgatcttcgcgtattagtaccgaactaatcgtatattctgacactgctaagtagatagacagcacctcaccggtcatgggcttcgataagatcggaggttgccccaaatgcgtttttaaggcttgaaaagcctcctcgcatttttcggtccagtggaagttctaattgccttttaaaatctgaaaaaactctttgcacttataagaagacctcgatataaagcgatttaaggcaacgacgttacctctgaggctttggacctcttttggcttggttggtgatggcatttccacaaatgccctgatcttcataagattggcttctattcctcgctggttaaccatgaacccaagaaatttcctggagccaactcgaaagacgcatttcagagggtttagccgcatcttatatcgacgcaatatatcgaacatggcctgtaaatgggcaatatgatccttcgcatgttgagattt

SEQ ID NO: 96436 - DNA, 687 bp, Cannabis sativa
gcaagtgaccaaaaggcaaacctttttagtcacttagggggtaaacacactctacatggactaataaggataaaattttacactcacttaaatggattttaaaaatgttaaaatttttgagttttaaagtgcttgtgcattgctcaatgtcttgagcgacatgtatggaatacatcattaactataaaataaataaataaatgtttacgcatagggtggtacatgccagacaagttaacacataatagaatatagtaatagaatcgcatagctccatacaaagaaaaagaatgccatagcatgaagggtgtcccaaaaaggataaggtcccaagaatcaaagctgcttggatagccataagtctttacacccatgaaaataattctatatatgttccacgagaaaattaatcttccaagagaaaaatacaaagcctacccgattcaacacctagcgtccaatgttaataacccggtcaggtgtaagtccagcctaccgctccaatggaactattcatgataggtctttatcgggatcaacattagtggaagtaggatcatggtcatccatatctttttcagaacatggcccattgtcaaattcttttgcctttgatacattagaagcttgccaagctacttgcagatcatgaacactgttgatgcatgccattttctcagtacgagc

SEQ ID NO: 96437 - DNA, 848 bp, Cannabis sativa
atttaaaatacttagaatattataaatattctatatacgaaaattttaattgtaaatattttatattagtcttctggtcatatttttgcacacaagagtgataatgcacaatccctaaagatgaaaacaaatcagggaatcagctccttagcattatcagacctcatgcctctaatctgagtgtgatattgagtttttattaactgtataaagggtggtataactaattgagcattagatttgttcttgataagatgtatccatgtatatctagaacaatcatcaacaatagttatgaaatacctaaagccttcaacagttttagtgttgtagggtctccaaatgtcaacatggatgagatcaaaacaatttttagacagattgtgattactaacaataggcaattttctttgtttggctaaatgacatatcgaacaatgaaagtcagaacaataagagtattgaaattgcaattttttattcagaggatgatttttgatacatgaagcatgtccaagtctataatgccacaaattgtcattattgactgtagaattgaaaacaggacaagctaaagaaaaattttgttcagacatatagtaaagattgccaattctgtcacccatcccaatcacttgattcttggtgatatcctgaacaatgcatttatgaggaaggaaaaaaaagagtagttagctgaatcagataaagcacaaatagaaatgggattatgtttgaaatcaaggacatatatgacattaatgagcatcaacgatatgagaaaatttttcaagctttacgacccagagcttctcgtagtgaatggtataaccgatgaagagaagagt

SEQ ID NO: 96438 - DNA, 677 bp, Cannabis sativa
  modified_base (621)..(648): a, c, t, g, unknown or other
gagcggtcaattattgttgttgttgggaaccctgttggaggggtgactgctagccctctcttggttccttaggccttctttaggcccgtagaccaccctttccttttggtttcttggggtatgcacttcttgtggataggtttggtggtcttgaggaatttgttggttgtgggcgtcagtacccaacccttgagtgttttggttgaaatagttttgtattaagttgacaacttcttgagtgcgatgatcttggtcatcttggccccttctcatttcctgagcatgctcttccaacaaatattggaactctctcctttggttagcgagacttttagttagggtcgctcgagtttgagtttgatcctggtgaatagtttggaactggccctgcatttcgcctatcacgtctcgtaattgatccatctttgggtcaattccttcaatatccacatgggtttcatttcgtggcctaaagatgtcaggaccccgagtggtttgagtttggcttgtgccttcattaggtgggacaaagtttctagtattaccccttttggtggtgtcgtcagtagcgccgcctccagtggtggtggcatggtggtactgttggaattattttaccannnnnnnnnnnnnnnnnnnnnnnnnnnnttaacatcctaaatatgaacttcaaaaac

SEQ ID NO: 96439 - DNA, 534 bp, Cannabis sativa
  modified_base (62)..(66): a, c, t, g, unknown or other
attaacttttgaagaatataatcaggattaccttccattgtgttgacatcactataattgtnnnnnactatatgttttggatttaacaaaaattgtatattaaaaactacatgtaaacataaatgatttctaatcttctattgataacaaataagattgtattaaaatagaatttatttagggcataaaaatccaacaaactcctacttgcactaacataaaataagtagtgcatttcaatcaatctattataaactttttaaattattttaaaaaaataatgtttaaagttttaaaatttgaggaaaacacaaataatgttcgagaatattaaaagtgaacatataattccaatataattataattttagttgcatatcgtgactcgtgagtagaaagaaattttgaaaataataatatttaaaaaaacactaaaaaaaaataataatgttacaaatcaataatattacatgagttttcttatgtatgtattataagttttaaaaattaagctatgtgcaacatgtttaaatt

SEQ ID NO: 96440 - DNA, 736 bp, Cannabis sativa
tctcacacgacccctctctctctctctctctcactcaaaccctctttgcttttaactttgaattttggaagaaaagcttggtcttggcttgatttgaagcttggttgttggaaaaaggggtgttgggagcttgaggcttgtttgtgcatgagattgaggtagtcttataatttttaatttgtgatttccttgttgaaatattgtgaaaaaaacatgaattatgtgatgttgtcttgcttatgcatgtatgatgaagttagagttaactttgtttaatttgagtatgtttgtgcttgaatcattgttgtggtgtttgattgagctatcaatgggattctagggttcttcttaaccttaaattcatgttgtttgtggttggttgctgttggaaaatatttgtgagtattgggtttttagctcaaagttcttgagtttgaaggttgtgaacttaagcatgattgtgttatgttttctcaaactgaattcttggagttattttgggattttgatgcatgaagtatgttagttgagcaactattatgtgctagtaatcctaattgttaatttgaaagtttggttgagaatttggggtgattagattgaagttcttgctgaaaattcgtggaaaacttgctaatgccgcggcccgcccctgttggtggaacttgggtttcgtcccaggtgccgcgacatggtttgggcatgtcgcggtccgccctcgtatttttgggcagtt

SEQ ID NO: 96441 - DNA, 727 bp, Cannabis sativa
ttttgtcagtatcttaaatatataaataaacttagtttttttaaatttgttggaagaagatttggaattgatactgttttctttagaccaaataatttagaatttagaatttagattttacatgtgtcctatttaatacactaacaaacagaatttgtaatgttatattgacatttagtacttattttgctgaaaatttatttgatctatatcacttataaattcaaaagttaagctatttatgcagcaaatattccaattcataaatttcaaacaaagaaatcagtcatcaaagtcatctatctcacttatatttcattatcttattaaaacgataacagaaagaaaaagaagaaatatggttcttataattttattacataaatttagttctagttcagttcagtccatgtatgtgtaggtgtggactgtggtgtagtgggtacatatttcatccacgattttgaaaaatacacggaaagtaaagccaatcacaacaagtcatgtcaccaccaaccttttaaggcctaactactacatgcccatgatcgagcaacttctttattgaattcattattaatgggtgaaatgaaacccaaagaaagcttgaaatctgagtctcttcctgtgtctgaagtaataatcttattagtgtggtcagtgcaagtagaacaacctttcacattgtcactcctaagaggaaagagttcaagagtttgaacacttt

SEQ ID NO: 96442 - DNA, 645 bp, Cannabis sativa
tttaatcctacaataatcaatacaaccaataataaaataatggtccaagtggtaaaattattgtacatcaagtacaatgacatgagttcaattctttcaaaatatatgattttttaaaaagatttaagtttttaaattaatttaataatttgaatttctttattttttttcttctaaataatagtttaattaaagattttaaattaatttaataatttgaatttctttattttttttttctaaacaatagttcattttttttttaatattttactaatatgaaataattcttatactataaaaattttaaagtttgtaattattgtggtgaaaagacttaaacttttatttgttaatatatattgatggttgtattacgtaaaatataatagcgaacaataaaataacgcatgcaataataataatcatataaaaagtttgtcaaataaaaattgaataataaattttgtcaaataaaaaaaaaatacattataaatagatgaaaaattttgtactaagaaaatatctgaacggtttcgatttaccgtagacctcatccaaattttatagtttatgacaactttaattataaggtgcttcaaacgtactataaacgatttcgaattgctacccttttaaagacat

SEQ ID NO: 96443 - DNA, 750 bp, Cannabis sativa
aaatttctcccaaaatatgtggcagttcaggagtgaaccaagtggtaatatgacccacgttacgagacactccaccttaattactttggagtttgttgtttgaagggagtaataacaaactagtcatctttgggagagtctagctgggcaatggatgcctcttgtctattcttctccacgagtatagtcgaccgagagaagggtacaggaggactgccggagtataacacactactcgaggctaaaaatactgtatatgcatttaatacggcatggagaagagcatccaacactttatgctgaatatacgtgcttaagagtttaaacccataatttttaaatttcgcgagaccccatacatcaattgacaactgcataaatgacctgtcaagtcataaataagggataggtcaaaatcccactaaacacctatagacaacccaaatacataataaaagtagggaatcatgctctaagattagatttgagaaattatgcaaagtatgattcatacaaacacgacgatagtgacatttttaccactataatgagcctataaatacaccaataatgtacagaaaaatgggcagttcgaaaattctctgtaataaacactctcattaatataacaactcgtggactaagatgcattaatgacacaactatttaaaaatcctctctgttaacattcattaattacttcacacagatataattattagttgctcaaaatctcagtcaacaattaca

SEQ ID NO: 96444 - DNA, 595 bp, Cannabis sativa
agcaaaacccagctccttgcagcccaagacttggccgaaaatgagagagagaatgagagtttttttttttttgaaaatttttttctccctctctttcgttctctatctcattctctctcaacctctctcattctctatatcattctctctcaatccctctcggtttctctcattttttttttaaaaaaaagaacactgccgacggccaccaccactagaccaccgccgatgactacaaaccaccaccgttggccactactgtggaccaccaacccccaccacctctaatttcttaaaggtatttttaaatttttaatttttaatttttttaaatatttatatatatgtatgtgtgtggcagtatgtatatatgtatgaatatgtgtatgtatgtgtatatatatttatgtatgtataagtgtatatatgtgtatatgtgtatgtatgtgtatgtatatttatgtgtgtataagtgtatatatgtgtatatatgtatgtatttatgtatgtatgtgtatgtgtatgtgtatatatgtgtgtatgtgtaagtgtatgtgagtgtatgtgggtatatgtatgtatgtatatgtgagtg

SEQ ID NO: 96445 - DNA, 709 bp, Cannabis sativa
tttcctaactcatttggtcctccatttgtaggtggacatgagcttagtttgtctacaggcaatgcaggtggaagattgggatgtggtaaacaaaaaaataattaatttttatctcaatactcaaataatccatttctcaaataataagataatgaaatctgtccgaaggaggttgaacaggccagaaactctgaggataatacccctgctgccttgcaacatagaaaattcttgcaggctaaccttgatactctcttgtttaaggaaaagacctattggaagcagagatttcgaatccactggcttcattctcgggataaaaaatacctattttttccataaatttttttgttacatttacgtaaactatgtaagtgttactctaaacactctcgggaacttaaaatcaaaactaatagtttctctatcaataaatagcatacaaatgccctaaatattgagaaatcaccaaaaatgagactttgaaatattcctcaaaaaacagcaagccgtttttgtgaaaatgtcagactattttcttgggccactgctagtaaaaatggtagatcaattctgtaaaaatggtttgcaattttccactgaagattttccaaacatctcatttctaactcaaaactatcctaaaatttatgaagctctccagaacacctaatatcaccataacaaacatattcctgctcataaatgt

SEQ ID NO: 96446 - DNA, 954 bp, Cannabis sativa
ggacaaccccaaatacagaaatatgtcaaactgcgtttcgtctcattctataattcgttggagtatccttatgctcttcgagagtactacattcaaaatgtaagtagccaccaaaagtgcgtatctccaaaagttcagtggcagtgataattaacacatcattgatttgaccatgtctaagaaggtccgatttcttctctctacaacaccgttctgctgaggtgttccaggtacagttagctgggataagattccttcttccagcaaatagtctttgaatttgaaatccaaatactcgccaccatgatctaatcgaagtgtctttaatgatttacctaattgctttttcatccatgaccttgaattctttaaactttcccaaaagtttcaaacttcttggccattaggtaagtatgaccgtatctagaataatcacaaattaaagtaacgaagtattcataacttcctcgagcttgaatattaataggtctgcacacatcagtgtgtacatgctcaagttgttctttggctctattgtcttttgtagaaagatttctttttgccatcttgcctttaagacaagactcgcatactaaaagagttccaaattttagttctctcaaaggaccatcctttgttaatcgatttattctatcttggccaatatgacctaaacgtaaatgtaatgaccgcatttataatagggaaatttgactttttatgcttacatttggttaaaaaatttcccctaaacacataataattaatatttgtaggatatgacaacttttatgatatccctaaaataccccccatttacatcaccccatttacataatcggaccccattcattggaccccacatcggacacaataagacccatcggaccaatcggacccccccccattggaccctgtatcggaccaatcggacccacccatccgacccttcat

SEQ ID NO: 96447 - DNA, 876 bp, Cannabis sativa
attataagtaaccaaaaggttactttagaaatgcaggaaaattagaataaaaaaagaattttgggattaatttcatttcaggcataatattttgaaattaaggcatattttaattacgtggcaagatattattgtaattgaaatttattaagttatttttgtaattattttatatttgacgtatatttttaaaaataatcctaacaattaactatatatagccaatataaataagacaaaattaaaaaagaactaaaccaacttaccaagttatgtataataaaaaaaagttaatttttttaattaaaataaatgaagatatgtacttaataagaaaaatactaacgtatataattttcatgatgttaaggaaaaaaaaaaagatctcattcataaaaaattaaaaaaaaaattactaataaaaaacaaaaaatattttacgagcaaaaaaaatatataatacgaaagatcattttaaaaattaacagaaacaaaaaaaaaaatcattcataagaaataaaaataaaaaaaagataaaaaataagattattgttattgatgatccaattaagggactgagatataagacccatatagttgacacatggtctttaaaattgtcaaaaataaccgaaggtgtaaaaaggaatctgccttatgtgattctcttagttctacataaaaaataaaaagataacaaataaataaaaaattaaaaattaaataaaaataaattaaataaaaaataacaaataaataaaaaataaaaaataacaaataaataaaaataaaaaagaacaatgaaataatatcataaaagttaaaaaaaaattaataaataaataaataaaaatacataaattaaaaaaaaaaaaa

SEQ ID NO: 96448 - DNA, 812 bp, Cannabis sativa
gagaaaagtgcttctaattatacgtactttttattttatttcattaatttgtcacacattaattattatttatataattattttacttaattatatatcataaaatacattaattgaaggcagaaaaagaaagaggaagcgcgatgagcaacaaacgagatttaacgcacttggataaattagaacagaaaatagaaggaagtaggcatttcttcccgctataaatagaagattccctcattgaaaaagtaaaaaaaattcttgatcacagtactagactagtcgaaactctattgaaatacacccttaaattcacacttgatgagcttagcaagcaagcgacctaaacttaatcgagagaattgagagaaaaattgtgtaaactgattgagaatgtaattcgactagatcaaacctggtgtaaagaattcaaagtcttaataacaatttgttgttgaactaatttttcgcatcaactggccatattcaatacatttaggcatattcagatctgatccaattaatttcagtcatcgatccaacatccattagatattggattagatcgactctatatattaaatgtatttcattcatgtatatctattgcattgttcaaatttatccaatattttagatttagtatttattgaattagattataatgttttaatcttaattttcatatatgcatatatatatatatatattttaagcatataataatataaagtttaattactcatctaaaatttaaatgaaaatactaatgagttcgattgaatagagatgtttgttggaatttattttac

SEQ ID NO: 96449 - DNA, 1517 bp, Cannabis sativa
ggcttcgatgagtccacatacaactccttttatcttaacttttttttttcttttcttttttctcaatattcattttatttgtttcctttttttcctcatagctttttctctctcttattttattttattttatttaatctctcactctgtgcaaatcttggaaaagcctttctctctctatctctttctctgtcttatcatatatttttccttttttcttttatttataaattttgggtttttctcaaaagtctcttcaactcatagaagctttttcttcttgagcaaagtccaagcatgcagacaacgagataacacttgcccaaaaactagggttcccgttttttcaactcccttaccgctgttctacctgtttttcaggctctatctagagagagaaatctaaagggaagagagagagagagggatagagaacgaagagctaagcacaagatttttcatttactaaaaaaaattgaagaaaattttgcttgcttgccttctttctctttctttctctccaaatcaaatttttttttttttttattttcatcctctgagagggagttggagacatttggggtccgaaccatttgtctcctctatcctcctctatcctctctccgacttttttttttgttttttaattttttttttctttgttccaaaaaaacaaaaataatggagaaacccattctgggtagttgaaattttgagccatttacgtggtcgaaggccgagttatggctcgggaatagagtttaaaaccagtcagtcaataatagtgtgtttatctgtacattttgtaaagagagaacgagaaaagaaaatctagatactcaagtcgactcaagtcgagtgagtgagtgagtgagtgagtaaagagttgtagtatatcaaagaggaagcaatagagaaaaaggaaacataaaaaagtgtgtttggcaagtgagaaaattttaagagtaaaacaggaaggaagaaattaaggtgggggctttctttgatgagttttggaggattccttgacaatagtactagtactagtggtggtggtgcaagattagttgcagaaattccttacagtagtacaagcaacaacgacaacaaccacatcatgccctctactgctatcgctcagccaagactcattactcagtctctaaccaaatcaatgttcaactctcccggactttctctcgctcttgtactaagatttctcctttttcttcttaattttactattattggttacctttttggggttaaaaactgatatggggttaatttttttgggggaggcagcaaactaatatagatggacaaggagatatgatcaggaacatggccgagagtttcgagccaggtagtggccgtaggagccgagacgaggaacacgaaagcagatctgggagtgataacatggacggtggctctggagacgatcaggacgcaaccgacaagcctccgaggaaaaaacgctaccaccgacacactcctcagcaaatccaagaact

SEQ ID NO: 96450 - DNA, 714 bp, Cannabis sativa
tacacatataatttcataattaaaattttaaaaaaaatttagtacacccttaaaaaaataaatttgatataccacctatttatttccgtatatagaagaattttttattttttcggtacttaaatgcatattgagaagatattagttttaattgtatgtttttagaaagttttagtttaaagtttaaatataaattaaatatatatctttattaatagcttttacaatcaattgtggagacttcactttcccaaaagatcttgtttctagcttttcaaacatactacactaatgcatttagagcaatgatcaacattcctctttcggcttatgtttttcctttggatccaaaccattactcccattaagttctgctgatgtgttccacagttcaggctgttcagccatctgaaagtttcattcaggcaacaagcactaaaatgacattggaagaagagatgatcatggctttcatcatgcattccttacaccaagaagcttttatccacaaagagattaaacttagataacctatttttagtttggaatcatttccacacaataatccaaacaatgaatttatatttttgtatactaaacctgtgcaaaatttcatcatgccactttgtactattattaaaagatgttaactttgttaatgtgctgctattattttttctttcaattttcgttctattgttttgggtcattttc

SEQ ID NO: 96451 - DNA, 3528 bp, Cannabis sativa
  modified_base (36)..(73): a, c, t, g, unknown or other
tactatgttttagttacaagtaactttttgttgtgnnnnnnnnnnnnnnnnnnnnnnnnnnnnnnnnnnnnnngactaaaaaattgtcactaaaagctatttttgtagtgtatacgtgagttgttgaaggtaaaaaagacaatttatgggtgaaattggtacacaatgtttacattaaagaagaggattggtgggcatatactggccctacacaaagtaacattaaagtttgcattgttccacaaagtaacatcaaaccacttgaggttagctcaagtggtcataggtgagtgtgtctgtcttggaggtcctgggttcgagtctcaggtaaaacatagttgtaatatataaacgattaaataaaaaaaaataaaaaaaaagagagagagaaatataccatcaagaagggttacttgacaccgtgccctcctaaatctcgagttcattctagcaataaggtatgggggagattcaacttgccaaagcatagtatatcttgtggttggttgtgcttgacatattaaaaacaaaacataggctttataaatacaacattgtagcatataacatctatttactatgtggccatgcatggtgaggaattatttagcatctgttttttgaatgccaattcagtcacagatgtctccaagaggtaaacaatcgactagggtagatagttcaatcacattctctaaacagattactaagatggatttcctgagcacagttgagtaatttcaaaaaggttgtcatcactgccattgttgctactatagtgtatcaagtgtggaaggctagaaaagaaacattatggctccatcaaatcaaacgagtggaggtggtgatacacagtataatccatgaggtcaagagcagaattcatagtattaatcttatgaaaattgcttgtatatatgatgagtggtttgaaggtttgtaaatttaaagaatatagcttgtaaaggagaactatactcagccctgtgctgcaatattgtaaagtttttgtttgaatttaatgaatctctgattcatcaaaagaaaaatatatgaaaaataataataatatataatataaagtattaataaatattgttttaagctttttttttaatacataacaatcttttatgactaaaataatatttattatataaataatttattttggaataaatatatatgaaaaacatataatctataaatatttatatatacaaaaatagatatagaaattgttaaattagcgataatgggtgtatagcacgtcgaaagggagtaatagagcgcggaagaatactcgaataggagaggagttggtggtagaaacaaaaaatagctaaaaaataactcaccgtcggaagatgaagaggttgtcgatcgaaaaattaaaaaatggctgcgcgatctcttggcatcctgcgcaaagagaacgaggaaatgagtaaaaaaatatacaatattgatatttaacgataacattaaaagtaaaaatgttatcgcaacttctataaaaatagacgtttacgaagatgacataactaacgataaatttttaatatcatcgctaaatatatcatcttcgtaacgtatgaaagtttaggcatcacaagaaagaagtaaagaaaaagatgggagaaaagaatactccgatcatatcatcgggtgacactatatatcagttcccaattatacgtatataagattgtaaagtatttcattttgtatgcatatagaaaatcgacacgtcaaacctatatgaataatgaataagtattttaaacgaatggaaatgagacacagatctaccagcttactgtattttgattggactctatataacaagataaagaaattaaaaaaagcagaagctttttttgaggtcataagtgggttttggaatgatcaaaatgaagaaagaatttgaatatttatatttgcaattgcaagtagtctttgcaataatatatcttggcattgtatgtggatggacctgacattgtgacattgtggagacatgataagttgagatataaaggactacaactcagtcctaccccaccactgggccatgtgaccatgtgaccataccacatataataagttcttacctagtacactgataatttagtaccttaagccaatgaaaatcagacacataactctacaaaatagttgattgatttctctttggtcgacaccaagatgtgggcaactgtagattttgaagtctcttttagttctccatctcatttaatttatctctctcacaatttgtagccttttttttattccaaagattgatatgtggacttcgtttcactaatctaactccaagtacttccccatgtcttctaccacagtattgcttgtgattcctttcttttccaactttttagggtttgtttgattggtagaaataaaagtaaaaacagaatttattaaaattaattaaaaaaaaaatacagtggcatgtttattgtgtgtgtgctttttcaataataaaattaattcttcttccgtccaaggaaaatgtagcacgtatttttatttgtttcggtatttaaaaaaatattttattttattttattttattatcgtgtgtgttgtatgtgtgtatgtgtttagaattattgaattatttataagtttttaagtttttaaaaaattctaaataatttataataccaaaaataattattaaatattttgatgcacaactgtttgtattttttatacgtgcggtaaataattatttgaattttatttttgatgttgtaaataatttatttttgtttttgtaactttataagattgttattttggttcatgtgaattgatgtgaacaagtaaattattagtttttagaatattcttttttatggttcaaaaattaaaagaatgagaagtaaattttgatgatgagggtttcttttgtagattagtcacttgcaaaatgcagtaactctgaacttgtttatcttggtagttgtttgtttcaaacttggtcaaagcttggattggtttgtacaaaatattatatttgaagttagaaattatatatgaatgaaattctataatttagttgataatttttaacttaaattatatattgtgtgaaaaaaaaaaattaatcttgatcatttagattattgcattatagttaattaatagaataaaattttgaagctgttgtaagtgtttgctaaaagtaatgcaaatatagtactgtcaaaataacaaagttttttgaaaatttatagatggacttattcaaaacaaaaaataaaactaaaaagctctttaatttgctctttaatttatagtgtactatcctcttttttataataaagggcaataaccaattaagaaatttttctctatgaaagttggattgttatagaagattttatgcttactttaaataaaaattatagggtataatacacccctaaaatgattgttttagtacactctatatattcgttttgatatttagcaaagtttttttgttttttttttgtt

SEQ ID NO: 96452 - DNA, 835 bp, Cannabis sativa
aaacttttctcacaccgatcaatccaaaaaaaactttagattcttatgggtaagttctgttaggggtgtttcaattctcgagaaacactcaacgaaccgacgatagtaaccagctaaacccaaaaagcttctaaatgtaatagccgattttggtgttggccaatctcgaacagcttcaattttggctaggtcaaccatgatcccatctttatccactatgtgccctaggcaagagacatatgacaaccaaaactcgcacttcttgaatttagcatagagcttatgatcccgtagtcgttgcaatgctaatttgagatgcagttcatattcttcttcatattcggcaaaatccagaatatcatcaataaacactatcacacacttgtccaggtaatccttgaatactaggttcataagatctgtaaatgctgctggggcattggtgagtctgaaagaaatcaccagaaactcataatgtccataccgagtacggaatgtagtctttgggatatcctcttctcaaattctcagttgatggtaacctgagagaaggtcgatctttgaaaagaccatcttgtccttcagttgatcaaataggtcgtcaattcgaggtaaaggatatttattcctaatagtaagcttgctcaattgccgatagtcaatacacattcgaagcgactcatctttcttcctcacaaataatactggaccaccctaggtggaataactcgatccttttaaattccaagttaagcaactcctggagttcgatctttaattctttcaattctgctggagccattcgatacagtgcctttgatactggttccgctcc

SEQ ID NO: 96453 - DNA, 501 bp, Cannabis sativa
tgcttagtgtcattttaagtgaaattgtttctaattaacttatagaagccctaattacaattttttattataattttttaatcaattatcacatttgaaatcatgaaaatagaatttttgatatttcaatttaccactagtattttaaaaaaaaaattcaaacgtatttttgacactgtaaattatttaaaattttaaaaaaatttacaagaataatattataagcataacaaacatcactataaaaaattaatttttatgtttgaaaatatacattaaaatatttttttaaaaaatatcaagaattctaataaattataataaaaaagttgagagtaatactctttgttcacttatttactcatagtgatcgataaatgattatttcaataataattaaaattaacaattaatcccaaaagaaaaaaagttatatactactattacaactacaataaacacagacacactctttttttttcctatatagctttcaaacac

SEQ ID NO: 96454 - DNA, 759 bp, Cannabis sativa
cctcggccaaacaggctgcatgcatccttgtcccttggtcagctccccactttcgcgcgtgcatgggtatgcaatgcatacccctatgcaccaaaattatttttgtcatattttttgattcaaaaatcctttttaattaaaacaaaattcaaattttggtagaatctaaattttcaattaaaaatctaattatcagaataaaatttatttttattaattttttaattaattaaaattagttttggatattattagttttgtattagttttctttgaatttgaaaatttgtttttccacaaagatagccttatggttaattttgaaattttgattattttatttattttaattataagacaaaatattacttattttattgttaattttgaatgatcttattttgatattaattttttttttaaaaaaataatctagtttaaattttaaaatttgctaaccatatcatatcctttttaaaaaaaatttatttttgtaatatattttattaaattaaattataagatttgaaaaatgttaattttaatagtttatcttattatgtatttttttaattaaaataaatttttgcaaaaataacatgaaattttaaaaattggttagttttggtttaaatggaaattttagggtttctaaccataaaattttcaaacttagaatttttttttttataaaattgataatatcctaactataaaatatcttatttttcaaactgtttattttgtaatatttaattt

SEQ ID NO: 96455 - DNA, 922 bp, Cannabis sativa
  modified_base (779)..(782): a, c, t, g, unknown or other
gggtctggatctcggtctaggttcggatcgggctctaagtgtgggtccttctcctggtcctaatcctgtccgtgtttgggtccggggtaggtttcgggtccgggtttgcgtgtgaattcagattcccgggtctaggacaggtcctggttcgggttcgggttcgagtctcggatttagatctagatgtgtgttccagagcttaggtcccttgtctaggtcccccatccaagtccgattcctaggtcctagtcttggtccaagttcgggttcgggtcctgagtcttggtattagtccatgtcccggtctaggtttgggtctaggtctcggtcccaatcttagtccgagttaaggtttgggtccttgtcagggtctagatccttgtcttgctcgcgggtcttaggttccggcgagggtttaggacaaggtcctagtttgggtgtcggtgtgattcttggtctgggtctgattttggggatagttaccccaaaaaaaaaaactgatcaaaggagccaaaataaaaaagagccaccgaaaaatccataaaaaaactgatcctagagccaaaacgtcaaaaaatgtcacttgcgattcgggaatagtgagcgaaaaaaaaagagagccaccaaaaatccaaaaaatactgatttgaaaagtagagcaaaaagagccacttgtgatcagggatagtgagccaaaaaagagtcgcttatgatcgagttgtccaagatggtgagcatataaaatagctaccatcttgaggggggatgttagagagtcnnnnattgctaatgtgtggaaagataatagaatatataagaagactgggctgctcctcccattaccaattggttttgagatggaaccccattcaccttatatcccaaattctaacatataagaataattatatcttaataaaat

SEQ ID NO: 96456 - DNA, 2005 bp, Cannabis sativa
agagagagagagagagagtctcaattttgactttggctttttttttatctttttatttttttttaatttattaaatatgatataaaaggaaataatacaaaaacttaaaaatacagtatttctaatttttattagaaaaatatgacataaaaatataaaaaaaaaaaacaaaaaaaaaaaagtccatcagctcaaactattttttaattatgctataaaaaaattaattcttaaaattttccttatatattgtgtaatttgtattatatatttaataatataatattatttaagttttaatttttgttggtatatatttttgtggtatatagtatttcatttatttaagataatatttagtttcaattttatcatatataatattgttggcatgttatacatattttaatagtgctatatattttttgagttaatatactagttttatttttgttataatatttttgtggtatataatactattacagtatatgaactttctatgctatgatatataaaatattgttgtagataaatgtatatatttaatgatatagtatgtttattcgttgtagttacaataaattaatataaaatattaacaaatttttataatataattttattattatatatatttttttaaaaaaattgatatgagataaaagtatttttataatttttattaagtaatttataagggccattttgctaaaaaaatttaaaaaaatgtaaatacatttaactaatcaatttatttggagttatttttcatattagcttgaataatattttacacattgtatatttatccgcaaaaaaaaaaaaaaaaagtgatatatatgttgtcaacaaattccaaatgttaagtagttttgcaatatatttaaaatatatatatttaatccatattcaaagtgttttgttgttatattatttatgataatataatatagattaaaatatttaaatgtgatatattatatgttaatatgagattaatgtatatatataatatgtttaataattaaattatataatatatagtttaataatatatataatttgtaacataagagtacttacaaaatctgaaaaataattttgaaacttaaggagcacatttgattgtatgtaattaagtgaattattacatatggatgttatgaaatcaatgagataagtttctagctgttaaaaactactacaatactcatttatattatttaaatgggtgttgggacgttagaaaaagatttagctcataaaggagttacaaaacttaatgttggcttatgatgaccttgctgaaaccattaagctctatcctcaagagtaggttgtttaaatagatataagatctgctttagcatgggggttatttaaatttgtactattacgttatcatgctaaaagttaggtaaagagtcaaaccaaagaggttttcctttgggttttgactctattacctaaacccctaaacattttaccgatgcataggtcacacaccttttccaatttggtgcgtaaatcttttgccagcgcatatatgcaccgataaaggtcattcacacatttcgctgtttagcgcgtaaaccttttatcggttcatatatgcactggttaaggttattagcgccttttccaatttggcgtgtaaacctttactggcgcatttatgtgcattaaaaacctattttatccttttttttttttgagttttaaaattaaaagtacttattgctttaactatctcatttgcatgttctttttcagttttttaggtagaagcagttgctttttactagtaggcttgtgtcgagttcaagatgtgggacttctcgtggagagggttatttctgattcactttctttgatctcagctttggagggtcagaaagtgtatttaaatgaactgggggttatcttttctgatattaaagtcctattgtctagttttcctagggcatctctctctcatgttagccgcaactttaatgttgag

SEQ ID NO: 96457 - DNA, 504 bp, Cannabis sativa
tactgccttagacaaagcagccaaaacggttccttgttgatctcgaagaatagccccaatacccaacttcttttgctccaaattagtagcagcatccacatttagtttgtaaccattactctgtggtggtctccatctttgaacatgctgatttgtagcagaagtagaaggggaagaatggtgactactggtagcagcaacaggccgaatctgtggcttagttttgttgaaatcttcatagaatctagttgcatattgaactatggcagtcggatgtctaggctgtccaccatgaacaactttatttctatcagtccatatgccccacagaacacatagtaaattttgtgttaatttgacaaaatatttactatgatttaaaatttacaccataataactgtattattttttttatttacgtttatgtcatttgtattattttaatagtatatttaactatgacattaaatttgaaacatttatattattttttattgtcttac

SEQ ID NO: 96458 - DNA, 1017 bp, Cannabis sativa
ggtgtgatttgatttgtgttttgcatttatatattgttttttgaggtgattaaaacaccacaagtggcatcagaacatcaggattcaaggatcaagatttagtgtttgataatcaacactcgatcaagattagttcagcaaagtttgaaattgacaagtttactggtgagaatgatttcaatctatggaggcttaaaatatgtgctctgctggggcaccagggcatattagaagacattgaaccagaaggtctaaaagacattaacgaggataagaagaaggttaaagagacttagaagaaggctcacagtaccatcatcttaagttttggaggtgaagttctttgagaggtttctagtgagaccactgtaattggattgtggaataaattgtcctcaatctatttgaaaaatacattggccaacaagctgtatcttaaaaaaaggttgtataccttaagaatggatgaatctggtgaagttaggaaacatcttgatgagttcaacaagatcattcttaaactcaacaacattggtatcaagattgaagaagagaatcaaggaattgtcctattgagttcactgccaagatcttatgaacattttgttgacaccatgttgtatgaaaaggagactttgacaatgtccaagatcaaagctacactaaattctaaggaaacttagaagaagtctgatgagaagaatggatcaaatggtaaaggtctaatggctcgaggtaggtcaaataaaaccaaaggacataagggtaatgattcaagtagaaatcaacaaaggaatcacataaacaagagcaatggctctagtcattcaaaatccaaattcaaggctagaaagttatgcaaatactgcaagaaggaaggtcatctcaaggatgaatgttatagtctgaggaaaaagaataatatagacaagagcaaagacaagaatgaaaaaggcaacaagagtgaggctagtctgactgctgatggttatgattctacagatgtgcttgttgcta

SEQ ID NO: 96459 - DNA, 512 bp, Cannabis sativa
attgtatagttaatattgaatatggaacgagataatagaattttagttcacttggagaattgcactgtctcaaagaatgtatttcaaagatttatcttgtcttgaaaacttattacctatcattagtactttcattgagagaaattacagtgagaaattcactataaaaactctccgccatgaagaaaactaagcttgcaaaaatgttgaaggagtcaacactatgatcatgcatgctttcgagcttatcatgccgtatgatgcttaaactcatacttatttttgtaacatctttgactctaattagacaaatattaaattttagaatgctcataattcttaaaaaagcaagatcattgataatgaagaacagacacaaaacaagatacatcatcactagagcttaatcatcaagaagataaaaaccatataaaaaattaactaccttttcctatacattttacttatttgaaattgaaatataggagatgataaacacttaacaccaacgt

SEQ ID NO: 96460 - DNA, 597 bp, Cannabis sativa
ttatcataaaccaaaccaaagcctctaagtctacatgaaggatttttattttttttctttttttcaactttcctccaaattactgtgattgtttccaaaaaatcattaaaacttctattctcatcaatttttttttaattaatttaccaaatttcttcaactagttcctcctaatttcttccaaataaggcaacaatagtcatttcttccaaaccaaattaatgtgcaccaaacaaaagcaacataactggtttctttcaaagaaaaaaaaaaaaacacatctgctccaaagaatatgaaagttttattctactcttttacacttttttaaatttgtttgtagtaacatattattttatttagttaaactataatctaaatgatttgtaatttaattaataattttttttactgttgttctatttttatatatagtatataaatttaactgcatcgtatatatattatttaagctcaggtatataataattatttgtattgtttttgatattattatgccatatatgatatttcacatttcataaaataggatatatcattacatttgatatgtcattttttctatttatttttttt

SEQ ID NO: 96461 - DNA, 823 bp, Cannabis sativa
  modified_base (776)..(786): a, c, t, g, unknown or other
taattttaaaaattaaaaattgattaaaaaagtgttaccaaacgccacctataaaaacagaatttttaaaagtgtaaataaaagaaaaaagattcctaaaagtgaaaaaatgtaaaaactatatttttttagtgtattgtgtaattttttcaaaattattcataataaaataaaataatcataaattaaattttatcttttaattattataacaaccgcatgaggtgcggatattaatttatataatttatagaaaaaatattaaattagttaaatgatatttaaaattgtaaatatattatttttaattattataaaaagacagtttaaattattgaaaagtatgttcttattaatatttagcacactaaaaaaaattatatttttaatctatttttccaattataaaagaaggaaaaatgaaaatttatttaattactataaataacttgcaagaattaggttttttttattgttgtcctataaattttgtttttgtttatcctaatttatatatatatatatatctatattgtataatttaaaaaattaaaaataatatattttcaatttcattcataattaattaaaaactaatttattttaatataaattttaaaaaatgattaaaaccgcgccaacccaaatttatttcctagttataatataaagatagggatatttgcggctaaaccacctgaactttacggtttgtaacagataaccacaaaaactgaaaatttagtaacataactacctaaacctagttccgtttnnnnnnnnnnncctccatccaaaaatcacagttaagtgccacggtgga

SEQ ID NO: 96462 - DNA, 1966 bp, Cannabis sativa
  modified_base (868)..(872): a, c, t, g, unknown or other
tcattgctatgaaaagttcaattcctgaacatttatttagtggtttctcaaacaccacaaatgctaatgagtttttcaaagtagtagaaaaatatttgatactggtaaaaaataaaaacgtgcagtggacattttatggatgaaatgacaaccattcaatttgataaatcaaaggagtgcgggattttattttaaaaattatgaatgttcagtccaagttgaaagatcaaaatattcctcttcctgactcttacattattcattgtgcttttcatgcacttcctacctatttttagccttatcaagacaacttacaacacttataataaaacatgaagtgtgagtgaccttatttctcaactcaatcccaacaaaagatagagaaaatataataaaataaacacaatgtacagtagtagatattgacatattaattatatattacccattatattatatacccaattttgaaatcataatattttattatttctattattaatgtaattatttatttaaattttaaaaataaattatcattttagttatcactgactcaaaaaggaaaagaaaaaaaaatgaaagtatgaaattgtaacaaaaaattccatgaaaaaaaataatttagtagtataaaaagataaatcaagttgtcaaaattaaataaaaaaaagtaatacaaaaacatattgagaagttgatattattttgaatattacaattaggtcattcttttgttattttcttgttgtttgtagttatcctcttgttatttatagttattttcatgttgtttgttaaatggagtactattacttacacaatcagacaatgattgcagggtggttgctacgtggttgcgcggtgnnnnngtggttgcatcagacgaatgtttcaatcaaacgatagttgcagggtggttgctaggtagttggccgaacgttgcatcagacgaagatttctattagacgaaagtttatgggcagttactgggtggttggccgaaggttgtattagacgaaggtttcaattagacgaaataactgttaccaaaatatttatgaaactgtaatgcagctattgtgaaacattaaaaatcagaatagtgtttccacgtacgtataactctatctacatgtctctttatgatttaatatgaacaaattcaccattagaaatttggaaaacaacgaaaatacaccaagataaatattttactatagtattggcgtaatttttttttgattatacttgagttggattgtttgggaactccagtttaacttttcaagatatgtcttttatggatctgaaaattaaagtcaggacattagttttatgcaaattaaactgaattttcggtaaaattttagtttcgtagtagtttttctacactttttttcatgaattcgaaacagctcctatttcgattgattctggttgtcttctcaggtgaagtcaccggaattaatggtgattctctttctggttgaattttcgtttcggttgcattgagttgctgcgtggttgcgcgatggttgctcaggaagcatggatcttgggttgaaggtgtgtgtaagtggtatttttgtaaattttttttatttgggttgtatatttatttatttggccagctagaagtatttttgtaatattgttacttttttctggttaaaattgaaaaaaagcccttgttaaattgttttagagttgttttagagttgtttttaagttattttttattttattgaaacaatatttttataattttgaaatattaacacaatattttttaaaattttgtacaataaaaatataataaaaaaagagtataatagtaaaaatgacaaaaaaaaaaaaagtatttttgtatgatccccatgaaacaatccattaaaagaagatgaaatacctattttactttatctattttaattttaatttttatttccatattctttaagat

SEQ ID NO: 96463 - DNA, 1006 bp, Cannabis sativa
tgggttaaaagattctcattgacaatttgccaaagaataaaatggtgttttagaaccatcaatttgtgctaagctatcttgtggtaagtcactttctcagttgaaatgagcgagagataaaaaattttagcttttaatttcccagaacaaccagctgccattaattcaactttatcaaccgtatttcccaatttcatgagttttctaaaataccagcttgtgtcagctcctgggttgaatggccataagtcgtggttctttatatagatgcaattaatccatttgaccaaaagacagtcttgttaagtagctatggcctaaatgtacttagccatgagagcaacattctacttttttaccttccataaaaccaatacgtaactccatagtccttaggcaagcaaacttgactccacgagataaagtgcagcttatttctattacctgtcttgccccacaaaaaatcccgacataacttgtcaatttcagaagtaaccttttgtgggagaataataatgtccatccagtaattcctaattcccaataagaccgattggatcaatagtggtctaccagcaaaggagaggtggcgactcatccaaccatgtaacttcttacggatcttctccacaatacctctacaatcagagtctttccatttagtaggtctcaagttaacttctaggtatttcagcggaaaagaaccttcagtcaacttagaggaatctaatatctgcttcttacatctcatgtcaacaccaccaaagtaaatagatgactttgataagttagccgctaagctagtagagcaaccaaaatcctcgaaagctttttggataatgtccaaaaaagaagggttacctttgcaaaagataacaagatcatcagtgaagcaaagattgacaaggttcaaggacttacatgaggggtgaaacccaaaacctttcattggaggcctgtaaaagaagcctagtaaggtattccatcaccagaacaaaagtaaagg

SEQ ID NO: 96464 - DNA, 506 bp, Cannabis sativa
gtcctcactttcagttagtcctgcaatttctttgagtggcttcatcttttggatcacaaacctgttcaatgaataagaatcccaactgagatgataatattgttctattcatagcaatttttcgtccactgcttaattaaactcatagggcaaagagggtgaatcttggtaagtgtggtctcattgaagtcatagcctttcgtaaatgggacaattaaggtatcgtctctcatagcctccttcacgaggagcgtaaacagcttgggccttgttcttccacaagagccaacaccccaaatcaggtttcaccaaatctccagcaatgaagtcccctagtacaccaccctatattaacttctctattacccttttgccatctcactcccatggctatcgtcaccgctgcccattctcgcattggcgaagcggtttttctggtttggggtcccagggagatgggcatagaggtaccccacacttgaagttggttgttgatgccatgtttg

SEQ ID NO: 96465 - DNA, 769 bp, Cannabis sativa
atgctatgagtgtgtttctcttaactaaagaaatctgctctagtcttgaaggtttaatggctaaattttggtggaaggcccagtctaatacttcgcataaggggattagttgggttagttggaggagattgtgccaacataagcatgttgggggtttgggatttagagatcttagacaatataatatttctttcttgggtaagcaagggtagagattacttaccaaggaagacttactcgtgggaaggatctacaaggctcgatactacccgacagggtcttacatcactgctgagttaggaaaaatcctagctttatttggcatagtatatgggaagcccaatcctttgttcgacgggttgctaaaagatcaattggaaacggctctactgtgcgcattttaaacgatccttggctgcctcaagacagtaatccatatgtaataactgttaaccaaggacttgataataaagtggtgtccaatttgatgttggtgggagaaaaggggtgggatgtagatgttgttgatgatatgtttgaagagcgtgatgttcaactgattttgagtatccaattgagtgactcaacaaccacgaattcttggtactggaagatggaaacttcgagcttctactctgttaaaagtgcttacaatcatcttcaagtttcgtctagaaattgcctccatcttcaagatgaaagctattggaaaaagctttggaaacttgacgtccctcctaaggttcttcattttttgtggagagcttgt

SEQ ID NO: 96466 - DNA, 951 bp, Cannabis sativa
ttagggcattggggtttctagtggcccttttcattgcaatagaagcattttccttttggcttatctccaggattagcgaccttttttttttaactgttttcatagcttgaacatgctttttactattcttccacttcttcttgttgttgggtttggaagtagaggcaatgttttcctcagccttagtcgtcccattagcattgctagaactaggagctttagatcctcttttctgtggtcctccaatcaaattttcaaatatctgaaggttgttgattaactcgtgaaagtcaagctccaacttgttcatgacatagtttgaaatgaagggcaaaaaggctggagtcaaactgttcaggtcagactcacgtgaattgtttgatccataacagctccatgattctcagcttcttggaagtaactcctcatctggagaaggtgattgcacacgctctgatgaggtctcatccgtgcattgataaaattctctgtcgcttcaaagcgagcttgaattgatgccatcccaaatagttcagtcaacttgttcatgatatctgcagccgtgagagtgtttgcaaaccttgttttcaaggtgtcaaccatgctagatagcataaagtatcgagctttgttgttggcattctgccaacgctcgaacttttcttttactgccttggttgcattctcacccggctgctcaggagcctcttcagtcaatacaaatagggcattttcaccatgagagtaatgttaatgttctctctccatttggtaaagttagatccattgagcttattatcagtcaacaatgacaccatggggttggtcattgtcatgttggatactacaaataacaataaatagaaatcaaataatgtttaacacaaaaacatattcagaaattattaacacttagcaagtaggaattacaagtgaaaatactaaaacata

SEQ ID NO: 96467 - DNA, 593 bp, Cannabis sativa
cagttttacaaacattgggtacttttgccgctaaaaataaacattgggattatgtcacttacaaacttaaaactttgggtacttttgccactatttacccattaccttacagaaacaatgtataatataacacctacgtatttgctttcgtcacctaaaataatcttgaatcaatatactataatcttaattaattagtaaagcttaaaccttaattgattagccatcgcctgcgtaatgaagaataaaaacaccaatatggttttttgattttgtaactactacaacacaacaaaacataacactacatacaaaaatacacacttagacacaacgtattggcttccgtcacatcctattgattttaccaaaaatataacccacatgatcctcctacaattaaaacatgttcctctcaatcattttatataaggttgtttctttaatttaatcacccatttagaatgtatttgatttgcattaatcaaatctctccaatctagaaaagtacaaattgaattagttatttaaattagttattttttaatattacattatttggaggaggttctaatggttacatttttattgta

SEQ ID NO: 96468 - DNA, 1068 bp, Cannabis sativa
ttcgggtgagtccatgattacaagatgtttcgttagaggtatcactgttttctccaactttaaatgaaagcactaaaatttttattgagtttttcagaaaccaataatttaaatctaatagccaaagaataataactcgaaaataaaagaaataagaacactcgagaattttacatggttagggcattaactagtataagtccatgagtcaataccattaagttaggttacaaaagccttagggattacaagaaggtatgagtcttctcggcatgtgagtaaaaaatttcgaaccctttgcatgtagggtttgttgagaatttatagtccacataggtcatactagttacccattttcccctcaaatagaagtttacaaataatatataaactttggacttatttggtgaagcctgatccatggggtaccttgtgtatgctgacgtggataccacatcacgatgttggttgtcaaaactgtgtcctatcttcataaggattaatgccactcattacttgattgtcaattaccattttttcttatttagaaagatttgatcttcaatctgagattctagggagacaatccctaatcttatgcgatctggcagtaaataggaaactatactgggatctcacctagacaagttgctcattcttgattgggcccgttgttgggccttatgtatttaagctatatttattatggaaaattcacgtgtccctacctagaaacatgaataacataattatgctccttatgctaggttttatttttttaccattaaaattagcatttattctcaaaaatattaagtttacttaagaaacctaaattattctaaaaaaaaaaatcaaactttattttgtttacaaacacatatcttaagaaattaaaccaaaattattaaaaattaaataaataatttaaacaaacttagattttgtgaagaagaaatcaaccttatttatatttcttatatcttaaaaaataaagaaaatatttagaaattcaataaaaatataaaattattttttaaaaaaaattagaacttaaactaaaaaaaa

SEQ ID NO: 96469 - DNA, 763 bp, Cannabis sativa
tttgagtgttttaatcttgtctgtgtgacatggttttattttgttttgtttcgttgttggttcttctttattcttcgatgactcgctatcaaataaatgttagtgattggaaataacaagttctctgatattgaaggagctattagtagtgcagttacataccttatacaatagttgtgtgctcaagctacaacgaggtttaatgaacctgcaacaacagttttcactattgtgtcttctgagcagtagttaaaattgaatataactattcttaaggttatctgtgatgttgcaatcttttaatctgattttatttttatttttttttatcaaacgattagggaatcagaaaggtgattattttacttattttttaattcaaatcctagtcttgcattcaatggggagatgtaataggctattattttagtagattattattaataaaatattgcatgatttattaaaaaaataaatataatacaaactttggtatagttaagctattttacacgcatgatttatctttaaacatgtttatagaaaaataaagtaatttaaattaaatgtaaaattatcataaagtccaataatactatagtgacctataaatcaataatttgttatgaaaatattatacatttcatgtaaaacacaatgctgtaaatatgagttgagcttttaattagattgattaattatattagattagatgaatttatacaaatccctacgcacaacagtaattctttaaaagaaacta

SEQ ID NO: 96470 - DNA, 508 bp, Cannabis sativa
ttatgcttgattttggggattagggttagttagattcagagcatatttctaagttaaattaaatttgtttagagtgtgaattgtgtattttggtggctgctaggtttgaatttggaagaattgagtgtaagaacttaatgttcactctttaatggtgaaattgtaattttagtgcatttctgagttttgaatgtttagatatgttatatttattgtattgagctgttctgggaagtttgagtaggtttggagaagatttagttggtttttggtgtgaaaaactagggttcccgtctgccagagaaatcagttaatcggttttacaagtgctataaaactggtaaaccaattttaccagcaggggaaaccctcgttttagcttcgaaaccggtttggatcggggtatttttcagagcttagattagggtattttagtgatgtttaagttattttgaaccagtgggaagttagaatttttccagttatggaattagggtttgttttagag

SEQ ID NO: 96471 - DNA, 849 bp, Cannabis sativa
  modified_base (464)..(464): a, c, t, g, unknown or other
tcatgggatcctgaggaggatccgttggactaattcttctggttaaaaccatggtgattgatcagaaggagatgggtaaaactctcaatgaaagtaccaaaatattgactcacaatttggtcaactgatagtggagccttattaattgatgattatcaccatgtgtaaataagaacaataaatagtaaagatgacacaaatatttatagaggtttggaccctttatttagcgggcaatgacctactctccttttagttgtattcactcttgagataagaccatgcagatcataggtgaaaaccttataatttctagctattactctcttcagtattataatttaagagcaatgtgttattacagattaataattgatgagatcttgtgaagaactttagaagagacttgacttggtgtttaggaggcatagatggactatgaagtttgagagagagagagaganagagagagagagagagagcttcacacgtgtataaggcttgaaggatcatgagaaaagacttgtagagaccctttagtgcttgtggaatgacttagccttgagagagtgatctaatgccctttatataatgtagggcttataaaaaattctcattcaaataggtaaagatatccctttaaaatagggatattaacatcttgttatctattatttaagttataaaaaagaataactaaatccttagaaaatacgactaatatctcgagagaaaattcctattttcgtgggttgttgggcttgtctcgcaactttgctcagttgttcggagttgtctgtaaatcttgaccaagcaatgctattttttagggcctggcccgcctatggc

SEQ ID NO: 96472 - DNA, 752 bp, Cannabis sativa
caacagaatattattaaccaaaatcaatcacatcaattttagtagcatatcaacacattgtagtgacaataacaatcattcaacttgaatatccaccaatagactcaaaattagaagttagcacaattagccctagaatatgcaatcctctaaacattatagattctcaaaatgcaatcacccaacactaaaattatcatcattaatcaaaaatgggcaacaatgacaagattatttacaccacagaacaaaactttatccctacaatatcacaaaccaaatcttgaatagaaatctcaccacacatggccaatgacaactccaattaaggacaagaatcaagatagcacagcatattgcagactaatttttagatttagcatgtatctaatcaagctcaatggattgcaaaagaaatttctcaaaacttacagaaatttgaatgagcaattgccctaaaaattacttgacggactatcaatggcacgcgagattgggtctcggagttgtttattgctgagatgggggagttgattgtgggtttcgggtctaggaaaatcggagcaaggcaaggggtggctgtggtggttgggttcagtttggctggctctcacgagtggggtcgtgcaatggctgagaaggagagtcaattctgaggaagcaatggcggttgaaagtggtctgtgacggaggcgaaatggggatgggttgaaggtgggttcgcctgaaacaatgggggagttgggttctga

SEQ ID NO: 96473 - DNA, 608 bp, Cannabis sativa
cagcgactgaccaaccagattctttaagaaccattacagaccttcttttaccaaaaggaggataggccttaccacgaaggtccagtggcgagaatagttagatcccggtaactagtggtctggggagcttgtttggattttatgccctaaataaaacctaattcaatataatcagatttataaattaataaaagattagaaatcattctttgttgcatggttcacaagaatattttcatgattatatatttaatggataaattctattaaatccagaacatatagttattcatgataatagtgttgtccagagagtgaagaataattatgattttatgtttcaaagttaagtccatgatttttcagtacactgaatttacactaacatgataattagcgataaaatttacttacaccttagataagtggtatgtcttttctaatatattggtaaactacgcaagtatgagatgtatggagtatacatcggcctagaccgatattgacattggataagacatcataaacttattgttatatctttctaagtcattaacacttagttgatcttaggtcaatggatctgaatctagaaatagttaagttct

SEQ ID NO: 96474 - DNA, 2623 bp, Cannabis sativa
tctctcatttggttttctccctcgatggagggcctcagctaataaccattttagtacaaaaattcaaattgattttgcattatcttaacgacttacgactgtatttaatcacaaatcaatatataataaaagtataaatattctaaatatgactaatttttaatttgctatcatttattttttaaatttggattctcgaattagttgttaaaatatttttatgtagtaaaaatactgatgaagatcaatgattggattgctagccgaatgaattggggatagacatatttcaccattttttggttaccaaccaaacatggtcttagtatcatttcactagtgaataaacatataaaagtattgccttcgaaaccctctttctccctcccttcaacaccaccggacacccaccacgtctccggcgggtgtgactacggcgacagcccacttcacttcctctttctctgctcttcctctctaggtaagtacggctgactatatatacatacacatatagattatagatacagattttgcgaaaaagtagaatcaaactgataaagaaaaaagaaaaatgggagaagggagagagggggactgggaatgtaatggttgccggaataggaactacgctttcaggtttttctgtaataggtgtaagcaacctcgtattctcgtcgataataagaccccagctgattctaaatggcttcctcgaatcggcgattggatctgctccggttagtcagtcattgctctactttttcttttttttctttagctgggttttaattattcattgatttttgttttgagtgattgtgatttgaatttgttggattttattagagttggtgggattttcttggtggccaaacaggggaattcttccccctttttgtactgctgaatcaagttgttcttgatggtttttatacatgtttcatatgaaagctaaactgggtagataatagattcttgactggaaaatttgccaaactaataacatgaaaatgttaaattagcaaaataaccacattgaacttgcgctgtgccactgcgaccgtaaagatcctttagtgtaaatttatggtcgcaaatcgactataatggttgttttttatggtctcatagtgtaatctttgtcttgctaccaaatatagttattttgaatgactatttttacaacacgctactgacttgtgatgttccattttagttgattgtcctagcatcctattggtttattggttagaatattttattgcattattactgaagaagcttgatcattaactttttttgtttttccatatatgtatatgtatgtctatatttatatatgaacaattctcttgtttcccattgtttcttgttgtgggttttgatcttctattcacactaagtagtcaagtaagggattatataatgcttacaagttacccatttggtatgaattcaattgttgagtttaggaacttgctatcaattaggttgagtggtttgtgtttatatttattgtattgtgttttggttgggatggactggttggtgtgcgtaatgcgtgtacttgggcttcttggctgcattttctgggttgggtttgtatggcaaatggatcaataggttgcactaacaacaattatgcatcaagagaaaagtgcaaaaagtgcgggcaaccaaaggaggtagcagcaatgccagcgattgcaatgcctggagcttctctcccaacttattcgcattattttgccagggtccaaggaggaggaggaggaggagtagcagatcaaagaatgaatgttggattaataggaaatggtgcttttcaacagtctcttcctttggcctctaattggcctgtagcagggcagccagctaatacttggtcctttggtggaaatcctaatcctggaattccttatgcgaatcctacgagtcagcttctttcggttcccaaaggatggcgtaatggtgattggttatgtacctgtggtttccataactactcttcccgtgaacaggtgtggtgaatggtgatgctacctggatgttcttgtttctaaaattcttatcctgtatttcgataagtctttatcttagctatctaatgctgttttggttttatttcagtgcaaaaaatgcaatgcttttccaccaggtttgctccttgagaagccatttgtgtttttactttttagtgtctatgaatgactagttctctgtattgtattaactttcatctctcttttgtgggtataaaggactcggaacaaagcgcttagcatctgaggagtttgtgcatgactgggacaacaagaggttaaacattggacatgtgagaattttacctctcctattatattaatccaacttacataaaaaacttatttttcttctattggtttacactggattgtagacacaagggcaacatcaatcacacctgggtttcgagcctctggtgggtgctattggtgactcaaaacctatagcgtacactccctatcccaatgtaagtttcgatgcagcttcaagtttgcaaaaccccatgcaattgtcacaccaaccaactgctcctacattacttggtaaagggtaagtttgtattcatttatcactt

SEQ ID NO: 96475 - DNA, 504 bp, Cannabis sativa
atctttcttttaacataatgtaacctttgtattaattataggatgtaattatggttggtaagttatatataataataaattttagggatatttgcggtaaaatttctttaatatttacaattgttacacatatgaccttaatcaaaaaaggtggtgacaaaagtaccttattttacgattttattgcagtcgtatctttttttggccgttaagtgtcaactcagaaacacgtggcggtatattattggaccaacttattaaataagctaaagaaatatatcgacacggtttttgagcttgcacttaacaaccttatttggcgtttgataatcaaaaaagggtacgactgcaacaaaatcgtaaattaaaatactttttctgctactttttttttattagggttatatgtgtaacaattgcaaatgttaaagaggtttcacagtaaatattccttaattttataaatgggtgtatattttatagcaatatatatggtattattat

SEQ ID NO: 96476 - DNA, 633 bp, Cannabis sativa
agagggtgaaaaactcatacaaattgccacctcaactccttaatgctttcctttatatatatatatattgatattgattgattggactctcaaaacgtaaagagtaccaaatcactattttcattaaaaaaaagataatttgcagccaaattttctatacttttatgtttattacagtttaattccctcactcaaaaattatggttatactctctagattcgagaattattttgctctgtagttcttccatctattttagtcttttaagtaccaaagtggactgtcacaaagtacttaagtgtacacgtggaaaattttcattagttcacttaatattaataatataaatattaataaaataattaaaaatataaaaaaaaattattttttcttttttctttaattgaaaaccctaaaaccaaaatcatcatttctctctctctctctcttcctctctcattaatctctctctttctctttacttgtgcgacactaacggacggattaggagtactgtgctccgaccctcgtctcgtccattttcccaaaacccacaaccctaaaaaccctgaccctctacggacccaaacgcctcaaccccagaacggcatcgatcccctgcaaatcaaaac

SEQ ID NO: 96477 - DNA, 885 bp, Cannabis sativa
tcgatcccggtctaggttcgagttctggtcaacgtgtaggtctaggtttgggtctgattctgggtctgagtctgagttcgagtccctggttcgggtacgattttgggttcaggttttgtcctggtatgtgagttcatgtgcagcttcctgttctgtttttgatccagggcaagtttcgggtctgaatctgggtccgacttcggattcctgtgtcaaggtcaagtcttgtttcaggtttgagtcccagatttagatctaggtctgtgtttcagggtctaggtcccacatccaagtccggttcctagctcctggtttgggtccaggtttgggttcgggtcccgagtcttggttttagtccaggtcccggtctgggttcgagtccaagtctcgatcccagtcttggtctgggttcaggatcgggtccttatcagggtttggatcatggtctaggtcgcgggtcttaggttcaaaagagggtttaggacaaggtcaggtcaaggtcccaggtcttaggtcccaatcctggtcaagttccccgtctaggttttggtctgagtttgggttattgtttgggttcggtactagtgtcagttctgagtcctagtcactgttccagttctgattctcggtccgggttttgttccgggtccaggtctgggtgaaggttggggttgaggtccgagtcttagttcgagttttggtacgggtttttgagatcccagtctgggtctaggtctgagtcggggtctaggttcgagtcttaggtctgggtcccaggttcggatttgcatctacatcttggtcagggtcaaagtcctgtgtttcgatcccggtctgggtttgggtcgctatttgggtctgtgtctgcgttcgtgtcgtgagttc

SEQ ID NO: 96478 - DNA, 646 bp, Cannabis sativa
acatatagaggcaccagaatttttgcaaaaatcaaagctcggtttgaggagtacaacctaaataacacggcgaaggaaagccgtttcagcaacttttggaatgctgttccccttacattctcctcagtgttatttcaccagctgatgttgcaaaatattaaggttgatgctcaggaggagttgaggatgcggttttacattggtcggaaggagctcagattcagagtgcttgagtttgcactcattacaggcctggacttctccaccgggccaacagaagaggagaaggctgcgcaggttgctcgctcagactcagaccgattcatcaacaaatatttcaaccggtctggtagtgtgaagacagaagcactccatgataggttcacaaactgtcagaacccgaaagacttgtacaagctcggcttgtgcttatttgtggagtcagtgcttctgaggcgcgaggctaacacgctgattactcctgacatacttagatatgtcgaagacctcgagttcttctttcgaattccttgggggaagcactccttcgccagactcatgcactcgcttcaaaaagatatgttgaaacagaaggccaactacgagaagaagctgagttcggatgttcagcatgagtgcaaataca

SEQ ID NO: 96479 - DNA, 550 bp, Cannabis sativa
catcatcttctaaataatttttcttgtcttcgcatttttcaagtgtatcatcttcaaaatcatcatcatcaactaaaacctcattattcacccttacttaaagtagttcatctacataagaaaaaagaataaaattcaaacatattttatactagtgtcaaaaaaaaaaattgaactaatcttattatactcattatgctattattagtagatgtttttttcttttttttttttaactaaacttatttgaagcacaaagcagaattacccttatgataatatataaccaattaatttgtaactttatttagtaccaacaaatataacatatttttataaatatataaattaaggaagatgtaattgcatataaataataacattgatcattagaaaacacactgccactatccatttatcggcaatcatgccaattttataagaagaaagttctaaggagcctcataattttataactaataagcaaagaaaaatcctctcttttgtccatcataacatctttataatacaaaagagtaagattcttatg

SEQ ID NO: 96480 - DNA, 628 bp, Cannabis sativa
  modified_base (256)..(256): a, c, t, g, unknown or other
atcctgaacctagaccttggaccacagaacctgacccggaccacaaaccccaaacccaatccaaaacctaaaactggacccgacccagaccttagaccccgcccttagactcggaccctgccgactccggcccgagccttagccccgatcccagccttggacccagacctggacctggaccccagacccggcttaaaataaaattaataaataaaaataaaatttacagattacacttttgttttttatttttaanattaaaaaataaaagtggttataaaagatatttttattttaaaaaaaaaaattaaaaacaaaaattttacttatttttctaattaaaaaattaaaaaacaaaaatattaccaaaatctatctaaatatttaacacacacgtattgtgatcaatacttgctttgttagtgcaagatttgcttacataatacatagttgattgtgtccacatcaattgtttttgttcgttaaaatattaattatattaagtctatattttatattgtttcgttttgttatattgatgagttttagtttgaaagaatatatgctgtatttgataaggttattttaaatgtatgtattgcaggtttaaaactaataataatattta

SEQ ID NO: 96481 - DNA, 832 bp, Cannabis sativa
ctaagatttgtagtttctcccaaaaaatttttgctaaattatttttaaaatcaaaataatttacataattcttaatttaatatcaaaagctttttttttttaatgatatccaaacacattaatcaaaagtacttttaagatctttacataatcattatctaaaggacaaaaataaattaaagcttatatacttattttatactattctaacttagttaaactatgtatttataaaattaaggaaaaaacttaacaaaattatgattgaatcttttcatcaaaggcttcatacaaatgtcattaattaactatagatgactaactgtacgagttaaaataataaggaactatttactaactcatattttaatgtctatatataaattcacatatcaattaaataattagaactttaatataagtacaaaataaaattcttacaacgtctacttaattattaacaaaagcggtaagctgctcaaaaagctagagaaaaagaggctttctccactacttgtggccaagaacaaaaggttgttctaacaagaaagcctttgttagctcactcaactacttgaacttttaaatcttattctccattaattctatcatattaaaactgatacaaaccaacctatatattactttcagattatttttcaaagaaaagataacatgaaagtgaataagtacaaaaactaagtcaatgaggctggaagggaaggaaaaaaggaagagagaatgggaaataaattaacataaacctaacttataaataaaatgtataaacctaacttataaataaaatgtacctgtctctcttcatatacaa

SEQ ID NO: 96482 - DNA, 634 bp, Cannabis sativa
ttagagcctaccataagctaaagcgggctacgcttgcgcttagggcctacctagttcaagggcccaaaaaatatttttccttttaaaaatacaaaattattttattgatttgaaaatactatatcttttaaataaggatccaattttttttcataaggcccactaaagttcagggctaaccctggacaaaaggcattttcgaaatcgataataccctcatatatttcttagctaaaatataacaagattactaataacactaatagagtaattaattaagataagcaaaacgacaatagagtaattaattaagaattaattagaatgcttggaaagccttggcaatgctataagcagctgcagaagcaatggcaccaatcaaagcagtttggaaagcactcttgaagggtttgctgccagtgaagtaacctttggcaaaaccaaatatgagtaatgccacgattgtcaaaatgactgaagccacaactgcctcctttgctattggaaatatcatataaggcaataatggtacaaatccacccattatgtatgaaaatgcaattgttagtgcactttgtattgctctcattgggtctggtttctccaatcctaactcgaatctgtatataaataa

SEQ ID NO: 96483 - DNA, 595 bp, Cannabis sativa
atatagttatatatacataatatactgtgagatatacctgtaattaatcatgtatttgtattgtaattttttaagctaataaagtgaaatattaaaatttgtaaaataatttcacttaatttactttacgcagcttctaatccttttgcgatcatagaccacacaaaattgttttagtaataattttttttgtaaaattatttactaataaaaaattccatatttgtatcttgattaaattataagagacatttcctacaatttgttaaactgtaaaaatagagatttatattacatagtaatttataaaacactatgatcatcggtaagttatattattattcaagaaaaaaaaatatatttattaactattgtaaattagtataattagtggtaaatattgctatattataatatttaaaaaaaatcatataaataataaaattacaaaaagatatttatatattgcaatattacggcaagatttttttttctatcttatctatgttattttgtaattataaaaacttaattttcatcccaaaatagtaggtaacatgtccttaacaatagagattgtatttgtttgtattta

SEQ ID NO: 96484 - DNA, 1136 bp, Cannabis sativa
aactttacagaacacacttttattatctgtttttaaaattaaaaaacaaaaataaacaaaagtagttataggactcctcttctctactgtaaaacctaacgacgaccactacttattttttttataaaattttcattaattaaacatgcatattagatcaatttaggggcatacccatcttttctcacaaagaaaatctactacatatctacatattatttacaagtttcataaatgttatatcctttttggacaaattattctccttaaaaaactagcacagtcttaatgctcatcttaactataaggtgtttacataagaatgggaccaaatattttttctcaaaaacacacaaacttcgattataccatattccatacacagctccacccagtgttgcatagtacaaatcatggacaagactcttagtcctcctgatggtcacccacttaatccaatcttcaaactagtttggccaaagcagactacctagccaaccctcaatatgctccataactctcaaagaataagagcatgagaagtatagatgatcatgggattcaagatcctattcacacaaggcagaagggagagtcaatcttgacttgttttgcaaacggggctttgggcgaaaaattaaaattgaaccttctattagaaaaaaaaattatcaattaatacttcataagtttagcaataaaaaaattcattattgcaagaatttaaaaaaaacatgttgtttactccaagaatagcctaatgatgtgaacatcaatatttgacacatgacaagaaagatgacatcttgaagttgagtagtcccgagttataacaagtcgccctgagaggggtccctagccctgcgcccaagttgacttcggaaactccagaatgaaagttcagacttcagtaacttgaatcactattacaaaacaaacctttagaagcgcttttttcagcataataataaataatcgacggcatagggttgaaaatttttagaagaaaattttaacccacttatggtaataaataattgtacaaaataaatctcaactttatttgggcaacattttaaaataattgtacaaataaatatcaattatatatgaagttactttttgtttttcaagtt

SEQ ID NO: 96485 - DNA, 957 bp, Cannabis sativa
accgttgagacacaatgcaatataagatcaacaacacgaacatcaaagcccatttttagcatcatatttttaagaaaaagcaactcaacacggtcatacgctttactcatatcaagcttaagagccatataaccttcctttccaactctcttctgcttaagataatgcattacctcaaacgaaatcataatattatcagttataagacgacccgaataaaagcactttggttttctgagatgacagaaggaagaacatgcttcaaccgattagctagaaccttagagcacaccttataaaggacattacaaagagcaatcagacgcatatcacccatagtagtggcatttttcttcttagggatcaacactacattagtatgattaagaccagttggcaaatgaccaaataagaaaaaagagcggacctgtttgatgacatcatcacccacaattgcctaacacttttgataaaaaccaggagtcttaccatctggcccaggggatttatctggatgcatctgaaataatgctgctttcacttcttcatcagtcactggttgcaaaagggaatcattctgaagtggagtcacagttgtagaaagcacatcaagaacatcatccatagtacagttggaactagtgaacagattctgaaagtaagagcacataacatcagataagcccgagtcccaatcaacccaacttccatcttcgcactgaagtttatcaatagcattcatacggcgccgagaagaagctattgcatgaaaaaaattgctatttttattcccctcttgtaaccacaattgtttcgatcgctggcaccaaaaaacctcattctgagtaagaacctcaaaaagttctatctcagcctccttatacttagcaatagcatcaggatctctaccttgtttccaccgcctcacctccttcttccaatattttatacgagaag

SEQ ID NO: 96486 - DNA, 519 bp, Cannabis sativa
tatgggattggaatattagctcaggattataaatgccttctcattgagggatgtaccttgttctaccaattggcagtagaaccagttcttgttgagtccttggaggttaaggaagtcgtgagttggatcaaaaaaaaaaaagaatggacaaacgtgtatgtggagacatattgtcttaaggttgtacacactttacggagtcccattgttatgatttctttatttgattgtgttattcaagatcatacatctttactttaaaatttgagaaatgtttcagttttttcattaagcaatcaactaatagagtgacttacagttacgctagatcttttattttataccttagtcgttgtttcaatttggagtctgttccaactaatttgttatttagtttgagtatagagtttaataattaataaatatgatttttttttattaaaaaaagaaaaaaataaatacatgaaaaatacataattttttttttttgcttagaaatatccaataaagatctaaata

SEQ ID NO: 96487 - DNA, 717 bp, Cannabis sativa
ctaaaacagatagagatgtatcggtggatctcttttaagcgggtgtattatagaagttcccaatgactccaaaatttattctaaatgtaaaaaaaaaaaactgattttctaatattgtacaacaaaaaaaaaaacaaaagataaaatattaataaaataaaatgagtgagtgagctaactaccttgcgccacgtgatgacttccttcaaccttccctctctttctctctctctcttcttgttggattggtggtagctcccttgatctggcctaaccttctttcactatataaaccctttcatttccatttttctaagctcccaaacaaacaaacatctctttctctctcgttactccattccattggctgattccgccgaagccacggaattgcgtcgccagaggtaatattttcattgatttcactctctctctctctctcttcattctttcgtttggtaagaaaagaaagagaaattcttgtttttgcgaagttattggatctgttatgttggctctttgtgttgggagattctgtcgatgtgctcgaagttgcgattgattcatgctttgtttttttgtttagtggtggaagtttgaagttaaatatattattaaggtagttgagggttagcattatgtgagaggttgagatctggtggtggttctttattaattgaatctttaggttgctattgctggtctttgaatctgtat

SEQ ID NO: 96488 - DNA, 1523 bp, Cannabis sativa
caagaagacccgccgcctcctccaacaaccgttggtacaactcctcccttccttgtggaaaactctaatcaatcagctactgatgaggttagtattctcttttgtttgatgtcgctgaaatttggttttaaaatatctcaattcaagaaaatcacgaccaaactcagcaataaaaatcacgatcgaacccgtaaggacttcaagtttgccatcatgagagctcatagagagcgtcgaccatagtaaggacttcaagtttgcgatctcggtctcctgattatgagataaaggaaataaagaacatatatgtggactgtaagttatttgtttcattccatgcactagaattcttaaacctttaaatcagattttaggaatttgtttttgcttgtgaatatgttcttgtgttatctgatatagttgctggaggaaagtgtgttgctcggccaaaaattgagtctttaacttctccaaaagtttcaccccatttggatacaaaggaaacggatgatctggtgacaaagaagccaagtcaagcagtagaagtatgtgatttttacaggtggtgtgaatcctctcttatggtgacctattactgctactggttcatttgatttaccttgttatgggttgccattatgaataagtttatctgttcattgagaggctttcagaatgtgttgaatttgttagattaaaatgcttataattaaactaaatttttagataaagttgtgttagaagttagaagttgcttatattatatgaagatatataatataaatagtttttcttaaatatataggaataatatatgtgattctgatttaagaactttttgtgtttatgatattattttttattctaggttttatggtcatgaatccaatattaattttttttgtgtttaggataatttctatagaagtttttgttgtacgaattgggtttaatctggcacaatttagaacttctagcattgggtgtatagctggccatccaggtgacttgtgatattagtcaaaagtgtagtatttttttatatataatttataccaaaaatctttactatatctttatattatctattatatatatatatatatatgatcttgatgtatttattttcttcaggggacaaacattgggacatatttgtgtctcaactatttgatttgtcaccggtgttttaatgttccgtgccgatttattttctaatacttgcagtaaataaaagattattctctctttgtaccatgtttgtgcttgaaatttttatttggagctcttgtccatagttaatcactaaacagaggtcatcactgctacaaaaagtgaatttttcgacggttttaaacagttggggtaatgtatttctgacggttttaaaccatcgaggatactcgttaaattggtttttaaaatcttattttagtaattggatggtgttctgtaagtattacaaagtaccatatgatgatttggctttcaattttatctcaaggatttcatgtggaacaaat

SEQ ID NO: 96489 - DNA, 690 bp, Cannabis sativa
ttagagttcaagaatcacattcaatcaatcaagactcatcttcaacatttcaagaatcaaactcgaactttcaagaaccaaattcaagcaatcaagaattgattttaatggctttaaaaaggtttcaagtggacaagttcaatgtttcgaatgatttcagcctatggagaattaaaatgaaagcctttctagttcagcaagggatctatgaggcacttgatgatgaagtcatgaaattaattgaagatagtaagaagaaacttgagattgaagccaaagcacatagtgccatcctccttagtcttggtgatgaggtcttgagagaagtttcagatgaagacaagaccttgggtctctggaacaagttggcatcaatctacatgaaaaaatctcttacaaacaatttgtatctcaagaagaagttgtacacactttgaatggatgagtcaaagaaattgagaaagcatctagatgattataacagaatcattcttgatcagaataatcttgggctgaaaattaatgatgaaggcaaggctataatcctgttgagttcacttcgtaaatgtctgtgcactttgttgatacgatcttgtatggcaaaggtactctgactatgacagaggttaaggctacattgaattctaaagaaatttagaagaagggagatgagaaagatgagaccaatgg

SEQ ID NO: 96490 - DNA, 700 bp, Cannabis sativa
tgccttagatgttggtggacttacccctttgtcttccctttatcttcttttagctttttaacctatttatacatgtatcctcctttgttaatggtattgtttttgtgaagtttctaagtttcctttttacgcgtatatttcttacttttcttccctctgccttagagatgtcaaaccctccaggttctcctctccctcagtctttgagtggggacgaattccattcggacgttggggatagatctccccctagccctgtgattttctctcgttactaccgacctagtggcgaagctattgttgggagaatgatgcgggcttatagggctaggcgtgatgatgcgtcttcgtcttctgacgaggagtggctttagaatttctttgagaatgagggacgtaacgtttcagctaccacaagggtccctgctgaattccataccctttgtttgcacgccaagcgtcatcgtgactaccgtcacatgcaggcccacaaccggcgggcctgggacgcggacttggagagggagcatttagctaacaagaggcggatggaggaatgtttgagagagggggctcctttctacccctggttttcctacaggctaccgccggtgctcgaggagggtggtacgggggtccattgtgattcctggttctttatgcatactttgttggcaccaccctaaccgcgagcacttct

SEQ ID NO: 96491 - DNA, 654 bp, Cannabis sativa
ctgggatgcaaaccaccatccatggtgtcaacatggtagagttagactacctaacaactctagtgaagggaatcatgaccccgaagttgtcaaagttagaactcaacagagagtgacagacaccactctctaatcagatttaaagctctaccaatcctccaaagttcaagaacccttcctggaatcaatacaccaggaaggaagatctactatctcacatctaatactttaaagtgcatactaatttacagggagaatcagatgtagaatcttccctgccacgctgacaggcctagctcagcggttgcacctcaagcttcccctggattgatcgactcatggaaagatctagtggatgcttttggcaaccaatttgctccttcttgacaatgctaaatcaaatccaatgatttggtagacatcaagcaaaaagaagatgacctcctcaaggagtatatacaacagttcttagaggtagccgctaagataaaaaggcttagtgagaacacaaggttaatgacacttgtagtcgagctctaggagatgggccctctgtggtccgaccactatcttaaggcagttcacaccataaatgactttcttgttagaatggatgactttatcaattaggaagaagtggtcacccgagctaag

SEQ ID NO: 96492 - DNA, 808 bp, Cannabis sativa
gccaaaaaagttcagagggcacgatttagtacatgtcaaagttcggggagaaaaattattaatcagccttattattattaagtattgtagaattttcctataaagtaaataaattcgtgattgttacattaaaaatgacctttttttttatataaatactacaataaaaagctacttttagtcacaacatagattttttgtgacttaatgtgatttttagtcacagcaaaaagttacttgtgactaaaatatagtttttagatacaagttgtcactaatttacttttagtcacaacatattgtgactaaaatcgcattcacaataaattgtaatttttgtgactaataccttattaactacggattttttagttacaacataaaaatgataatttataattactcacaatttctttgcttttagtcacaaattttgtttgttgtaacttaaagtaaaatcttttgtagtgaaagtaggagaactacttcttgaagttatattattattattaatgttcatattaattaattaagaaactaattagtcaaaagtaaccggtttttaaacttagtattcactctacataaaccaatttgtgaagcctataaaatacgtgacttgaagtgctgaacattttaatttgatcagttcattcgatcgaacattatcttcatttttttgtggcttcaaagttcaaagatatcaataaaaatgtccttacatcttcttactttgctaatattattaaaaacatgttttcatggaaaattacttgctgttcaggcagttgattatggtacgtgtagt

SEQ ID NO: 96493 - DNA, 534 bp, Cannabis sativa
catgtttcacacaaggtttgtataacaattttacattaaatatgttcaaatgtgagtttgatggacttagtaccatttttatatttccagcaaaaaaaaaaaacacaggtttgataacttttatataatcagtctatatattaattaagtactagaaaaataagaagaaataattcaaaacaaataaaagaattatattgatttataatgaattaaaactattgcatagtgttaggtacaaaattacatataaacacataatagtactttctctatcttctaggccatgttacactcttgaggaaaaccttgaggaaacctcttagcatcattgcaataattgtaaatcatgtagttcttttgaacccatttcaatttctgttcaccagcagagtccaattcttggttgagccatgaatttgaattagtctgagtgtttgaggcacaagaagatgagccagagttcataacacaagcattggctttgaagtttctgtatgaggctgtgaagggagccttactccaatcagtctt

SEQ ID NO: 96494 - DNA, 1731 bp, Cannabis sativa
gaagatattttatttttaaaaattcctcttcggagatgttaaatttaattatgtttttgtgatctcaaatttaaaaaattaaaccactttattatttcattcatgtagccactaaacaagtaatttgctccgttcaaaagcaaaatgtttggcaaaaaactttaatagcatgtatcctttagtaaactcttatatttacatttcttgtttctatttataaagtctcataaaatcaaatcacagttagcaaaatagcattgtcaaagaagttaggtcaaaaagattgattaatgatcgttaatggaaaaggtcatgagaataatcaaaaaaaaaaaaaaaacaaacaaacaaacaaaaaaccaaactattatccccatatttcgagcttcaatatatgagattagttttgacatgtgtattaacatttaacaacatgatttggctcacatattaaatgacttgatatttaacatatacgcatccaaacgaaaagtaattatattttccgacggaaaaaatagtgcctcaagaaaattaattaagaacagatagaattatatataacctgggcatgctattgacgaggtgggaaaatcgaacttgaagcaagattaaatatcctcaaattcaatagagcataagagatacaatattttaaaagaacttataataagattgaacaaaaattatccaaaatctcattgcaaggttggaggaaatttgtcttgcaagttgagccatctttcatcttacaagtcaaaccatcattcgttaaaaaccacaaatagagttataactcgaggagaagaagatattatttgaagtcgcgactcgaataaagcatgtgctggataagatcaaacataatcgtaatttatttgtagtttaaatagaaaacagttaaatgtttattttcccatctatattaagaaataaataaacgtgaaaattatcgacgttttataaactattagttgcgggtatatggaaattttctgacttgcttgggttatgagtctcgcttccgttagttggatgatcaaactataggaagtttcctcgtagtgagatggtcatctcgcattcttgttcttcgagtcgatccaacttttacacttagtttgcttattgtaagctaaggtatgtgttactcttctccggtgtctcgctattctcctttagctacttagggtttctcgttaatacactaagtactagtttgtacattgattcctcgcctaaaaccttacagtcagcgggttacaaatgtactctgatacttacgtaattaatgagttattccaaaaaaagatatgacaccgattcacatttcttttatcttgatacatgtcctccagccgaatttcgaggtataacaggtttctacgtagaatttcgtaaaaatacttaaaaaaaaaaaaaaagttttgaagtgtaaaaataaaaaagcccatgttttaaaatagtttaaatagttatagacaattaggtagatatttatggaaatttttataataaattatttgtcatggcatgtaatttttttaattaaaataatcattaataaatatattttttaattattaatttttataaactaatatttaatatattttttaattaattattgatcattaatatttataaattaaattaaaaaaataaaaaaatgagataattaaggaaagaagaagtagtgctatttgtagctattttaaaatatcatgtcat

SEQ ID NO: 96495 - DNA, 1529 bp, Cannabis sativa
agttgctatgatggatcaagatgggtgctctgttaaagttgaaatggtatgttgaaggtaataaagggatctatgacagtcatgactggagtaagtgggaatggtatctatatattgaatggaacttcagccaagaaccatgttaatgccaccactcagataacaacagatcaacaatgatttggcacaaaaagcttcgccatatcagccttggtgacatggatctatgtgtgagcaatgtgtgctggaaatcaacaaagatcaaatttggaattggaaagcacacctcaagcaacaaaatagactacatgcactcagatttatagggaccttcaaggactctctcagaggtggagcaaggtactttctaactgttatagatgattataccaaatatgtgtggattcatattttgaataataaaaatgatgcctttaacaagttcagagagctaagagccatgcttgaaactcaacctggaaagaaattaagaaattgggaactgataatggcctggagttctgtgcagatttgtttaatgattcttgcagaaaggttagtattggaaggcacctaacagtcccaaggaaccctcagcaaaatggccttgctgagagaatgaatgtaatcattcttgaaagggtaagatgcatgttaatatgctctagtttgcctaagattttttgggcagaggctgctgtcacattatgctatctaatcagtggatgtccttcatctacaataaatttcaaaactccaactgaaatgtggtgtggctatgttaccagctatgatcatttgaagatctttggatgtgtggcttatgctcacattagacaaggaaaacttgatcctagagctagaaaatgcattttcttaagataccttgaaggagtaaaaaggtataagatatagagcatagaagaaggaaatcatcaaaagaacttcatcgttagagatgttgtatttgatgaaaacatcatgtacaatgatctttcaaaagaaaagggttcacacatatctggtaataagattagagagagagttcggattgaggtggaacaaattgagaaggttcagatggtagatgagactgttgaacaagaagttgaacaagaaattgaagaacaaactggtgaagaattttagcatgatgatgagcatcaaagttaccagttaactagagatagggaaaggatagatatcagaccaccaaacacgttaggatatgatgacttaatcttctatgctctaaatatatcataacttgatggtgaggaacccggctcctatgaagaagctatggtgtccatttacaagctagaatggaactcaacaatgaaacaagaaatggtatttttgaggaagaaaagcctatggataatagtgaaaaaacaagtagggtgtaaggtgataagctgtaaatgggtgtacaagtacaaagaaggcattcctgggattgaggaagcaagatttaaggctagattagtagctagaggcttcacagatatatatatataatatatata

SEQ ID NO: 96496 - DNA, 558 bp, Cannabis sativa
  modified_base (280)..(292): a, c, t, g, unknown or other
ggcaaaatcatcatcatagtcatcggggtcatccatagtcaatgtacctacacattaaagcaaaataataatatataaaagtaacattgaaaatttatattaggcacaaaaaaatacaaaataatataaaacaaaacacaccaatatttataaattgataaattactcaatccataatccttcaccgtcttcacgagaagatatgatttcgtccccaacggcgacatcaattagtggtggattgatttcaattgttttatcattgagatataaatctccnnnnnnnnnnnnntaatcataatcttttggttgtgttgttagaacaactgaccagtaactatctagtgggtcactcctataaaatacttgttttgcctgggatgccattataaatcgatcagacttgtgtcctattcgattcaagtcaactagcttgaacccaaactcatcttctacaactccattatcactactcacccaatcacaaagaaaaatgggaattcgaaagctaatgtaatctaattcccaaatttctttgattacaccataaaaggtcat

SEQ ID NO: 96497 - DNA, 1079 bp, Cannabis sativa
agactaaaagcttagaatgctcttcaaggggggagtacctagtgtcagctctcccccacccctagcaccttgatgctaagtgagctactactggtcagtgggaatagtaacacgggcatatgaggaccgcgagaggactcatatgtctccatgggttggaatactcatagacattatcgggctcacccggcagtgcgtctaagaatgctgccaaaggttagcaggtacatttccattggcttgccgatatgctgcttccacagaacgtgcctaaacctctaagaagacgttgtggtgcaccttggccacgagtctcaatacgagatgatacaggtagtcattcgtgggttggtttgcatacgcacatggggcgaatgcaccatgttggaaagagacagtggtctaacgtatgctactagtttggtggcttatctcgagggcatgccaacatgcgtggaggcatggtgccttgaggattggaccatgaacgtatatgggtccttgggagatgagggagacagtttagacagtatcgaatggggcatgattagaagcatcaagacttcagcttagtgttggtatcttatcacacatgctaccttggtcacgagtgactaagtgagcgacaatgttgggactttccttatcatagtgagaacctatggacagtgtgagtatcttggctaaagagcctcgctgcatggatgcactcatggatgcttccgagcatgacttgacaggagttgttcgagagacggaagtgtgcacgaggcacacggttgggcaaaaaatgagcccattattactcggatgattggaaggctaaccttggcttagagaagtcaagctgttgcacgggtattctgctacctgaaaaggtgagtccgtgacagttggtgtcagagccaagttcatctcagtggaaggtgaacccagttggcctatcgtagaggggatgtaggcatgtggaaggattgagatggtttgaatgttggagcaagatgtcatttagcagttactcttctaaagtggattagtagatcgagatggagttgagactgggttgcttttcttcatgg

SEQ ID NO: 96498 - DNA, 514 bp, Cannabis sativa
agtttaattaattagagcatccataatatcaatcctgcaggaccacgtgttcattgagaatacctggaaagaattacccaatcagtaattgagtaaattgaaaacagcaaagataacatcaaatcaaagtgcttttatcaacttacagaagcaagaagagagtgatgaagaacattatcgatatgtgaaactgtaacagacagtgccttcaaactcgtttatcaagcattaacaaacaaaatttagttgatcaaaataaaaagtcaaatttgacagaatgttttaacaggcttcatacaggatgtctataaagtaattacatgataaatcccatgaaacaaatgaattaacttctttgacaaagaagcaaaagaacttgacaaaaaaaatagctttagatagagagcttaccacgagcagtgcaacctcatcaggagcaagatgtcccctgtggtgcatgactgcaacaagttggttatacttgtcactatccccctaaaccagaaaagataaa

SEQ ID NO: 96499 - DNA, 523 bp, Cannabis sativa
tgttcgggagaacactgataccacgtacaaatctcttgtgtcaagtcatttaaatttctgcaattatttttatattctgtccattctgttttgttgctgcgaaactggtttctgcagtatcagaattacattctgcttctacaagataatacagttttgtatttttatatatatcattgacatttgtaaaaactcgatttttcagtgagctacctccgctaatatgtcattctataaatctaattgttttcaccaaaaagaaacactgttaataatataaattcaggcagacaagccactgtcaaacattctcaccaactacaacaaattcagcaagtccacctctattttgacatattacataacataaattaggtatacatacaatcaattaaaaccacatcacctctaccaataacccaatttattatctataattctatgattatagagacttgtcaatataatcattaattcttttatatcttatttctatctattattcttctttttacccataaca

SEQ ID NO: 96500 - DNA, 800 bp, Cannabis sativa
ctattattcatatagggaatgggttgcacacaagtatcacttctgatccatggctgcctgatttaaacaacccgaaggttacctctgcacacccagctttatttggccaaaaagtgactagtcttatgtgtgtaggtgaaactagctgggactctgagatacttaatgatatgttcgatgatagggataaagctttaattttgggcatccctcttagtcaggctagccgtgaggattgttggagttggttgctagaaaaatcaggtatttattctgtcaaaagtgcctacagagttttacaacaatcaaagaacaatggccaacaaaactctgctctttggaaggatttttggaaaatagaagttccttctaaaggtctccacttcggctggaaggctatcactggttgtctccctacaaaagtccaactccaaatcaagcatgtaccggtcgacaatctttgccccttctgcaatgttgcagctgagactatcattcacatattggtgtactgcccgtatgccaattcttgctggatcagatcaagcatcagtatttctactgatacgtttgtctcttttagctcctggttcgaagcacaagttgctggcaaaaatggcagcttgttgaaggagattttaatgatcgcgtgggctatatggaacgcaagaaacaaactggtctgggataaaaagagtatgctagctgctgatgttgttttgtctgcaagatctacccttaatcaatggagttttgctcatcaaagaagaatggatcctctgcttatgttcaatgaacat

SEQ ID NO: 96501 - DNA, 689 bp, Cannabis sativa
  modified_base (555)..(555): a, c, t, g, unknown or other
ctcatgtggttgagcagatcctcttcgttccccttcccctcagcccctggcccgatgagtacatttgggaatattctcaatctagtatctattcggccaaatcgggttaccatatcagcctatcttcctcaccccctccggatatcccctcctcctcttccccctcaccttggtggaaaaatctgtggcatctttcccttcctgccaaggtaaaatattttgctttccgagccacaaactctacccttcccacagccaaaaacctagctcataggaaaatcattccttccttgggttgtgaccgttgtggaggaacggaagagtcagtctctcatgcattattttactgtcagagcattagaagagtctggaaaggtacgcaattttatccttacatttttgctaattcttcagaaatattatttcatgatgtcgctgatatgatttacacttccctaaccaaaaaagatgtagagatttttctttgtactgcttggcttgtctggtttaacaggaacaaagctctaaaggatcaagctcacgacccagatcatncgattctcagcttggctcaaagctacctagaagactaccattcctcccaacggatccccacatcctccccccgccctagccagatgtcagctcctacttcttggtctcccccagctgcgggtcttctcaagcta

SEQ ID NO: 96502 - DNA, 611 bp, Cannabis sativa
agttatatttgcaagcttaatcttaaaaaatcagaacaaaataactactaaaacaatacaaaaacaaatgtaaaacaataagcagatataaccactcagaaaaataataagcagacatatatatatatatatattatattctcacttagaaaaatataaaaaaaaccacataccttacaaaaataaattataaaaaacaactgtaaaacaacactaaaataaataaaaaataaataaatacagtatactgcagtataaaacttataaaaatacacagtaaaaaagtaaattctgccgtgtggtagtatttttgtaaaaaaatggcaaaaatcgatataccatgtaaatttttcttatttatatatgttattaataaaataaagagcataaatattggcagacccatataatacctaaaagatattctagcgctctcacatttgtatattttggtatttatagtatattttatcattgatctatgaatatgtagtattataattttaataaatttttaattgtatatgtatatttattaattatttaaattttgtattaatactagtaaaattttattaattcgtcgttgagtattagtcaaaaataaattt

SEQ ID NO: 96503 - DNA, 517 bp, Cannabis sativa
aaaagtaatttctaataacttaagtcaaaatgaccattttgcctttttctttgccaagaagaaacctataaggtctagaggtaaaatggtccaaaactataattctgaaaaattttgacactctaatttctaagatactcaacgatatctaagtgactctaatggccaaatcgttgcattccactgttacaagacataaaaatatgaaaatcataataattcatatataacacacctataattcaataaaatctctctaattgagaaattgtttctataaggcctatttatcataatagatcttattttcaactagaaagcatataatcataaaataataatcaaatctttaattatccactaattctcataataaaaactatgcagtcattacatgaggtggctgaggcgatggctcttcacaatgctttgactcagtgccacttgtttggattggaaaatattcagttcgagatggattaccaaagtattgttctcaagctaaacaacaattcta

SEQ ID NO: 96504 - DNA, 1069 bp, Cannabis sativa
tttgctgcatttttctcaatttccctataagtgttgacggtgacaattcgtcaaatatattgtaatgaaaaattttgagtaatgacacataaaaatagcaaaatgatcttaacgtaaaaatgttagagaaaagatgtaagatgtttttttatttaaaaaatgactctaaaattactaggttctcaatacccttttaatggagtgaaagggtatttatagttgggctatattgaccttgttcataaaatgagttgtaagtgatctttatagaaaccacgtactattataatgacaagtggtacaaggatggagatattgttggttaggtatcaggtgatactgttacaagcacctccactacttcactacaaaaaaacttgaattttagttacaaaaataatttggactgcaagtgaaagatgttgtgaccaaaagttttagttactttttttttgtgacgttgtgattaaaaaatttgtggctaaaagttataataccaataaaaataaaattatcactaaaagtcactttagagccaagtgcaaggaagttgcatatatctatatatgcagtgattcaacctccaataacactccatttaatgcaccattttgagattttctctgcagtgcaccgcatgtagcatatatgtcgtgcactgtagtcacgctatatatatttaattaatatttatatatatttatattattatatttataaaattgagaatttatttttaagaaattttacaatatatatttttaaaagtaatgtacaaatatatttgatttgtttcaacagtagacagatttttttagtttatatttttttagttaattgtgtatattataattatttgaaacattttataaaattttgagaaattttaaaaaaaattaacacgtcgaaaataatacacttttataaaagtagcgcactgatactactatctgttttggcattcgagagacttatataattttttttcatggtcatgtacattatagttatttaagacatcttataaaattttgaaaaatttaacacgccaaaaataaaattgagtatt

SEQ ID NO: 96505 - DNA, 595 bp, Cannabis sativa
tttttttttgtcgttttatgatttctctattttcattaagttttatatttttttttttcattttctctttttcatatatataatttaacatagatatattatttttaattttattaattatgtagatattttttagaagactatcaccaataaatataaatttactaattaattcataatttaaatttaataatcttttttatatatattaaattaataacttttaaaagcttcttatattattactttaattaagctaagtcttattcattatagaattatatggaatgaaatataatagcaattaaatacactttccaatatcactcattattagagtagcaatttagatgataacatgcatattttacataaacataacccattttaatttatatgttcaatatgacaagaaaaattatgtgaatcatgtttttatccctaaacccaatgtgaggttttctatttttacttgctcccccaccgtgatcaaatgagaatggataagaggctcgtgagattgatttgagggggtagggatggctatattcgtgggagtaaactctaggcaaatatgaagcgtatggatacaagt

SEQ ID NO: 96506 - DNA, 667 bp, Cannabis sativa
agcttaattggaagttgaatctttcttattggcaataaagaatttcaagccctaaagctggataggacaaggcgttaaattggcctcaatttatccaattgcttggaaagaggttttgaaaagaatgttggccaagcttctattgtccactaagattctggatacccttttgttagaaatttaagcctcaatcactcatggatcattgtgagggaagtgtacgtacttagtgtcttcttccaggaaagtgattgggagattcatcattcacgaacgttgggcatgagtttgtacaagagcacatatttccccttcttgacctagctcattgaggtatctctgttgagaatttcttgtactttcggaagtatgtgggcctccatatatggttgcaacatgaccatttatcgctagtggagtaactcctagtggatacgaattacctggtctgggatctggaatgggcttaggcacctaggcatttgatactccctaagggttctacatgccaagagtttgagttcatgggcctgtattcccataacatgaggataacctactccctaaggaagatttatggttccttgttgtttgagagcaaatagttgccaatgtcccactccctgtctgggataaatgattaggatccgtacccaattggataaat

SEQ ID NO: 96507 - DNA, 1013 bp, Cannabis sativa
  modified_base (31)..(42): a, c, t, g, unknown or other
ttaatacgagacttaaaaaatgtataactannnnnnnnnnnnaggttattcttatttataacttgtccgaatcgggacttaatttttttataacaaattagagattattcttgaataaagtgttcttaaataaaaattctactgttgtagatagtgtaattttatatagcttctataatttaaagaactttttatacatagtgtaataaaacatttattgagtgctgagaagctgtgatcctttggtccaattatggtttgagctaatcttataaacgcacagtagcacatgctacattaaaatctctgccttctaacttatattggataagatgatgtaggagaaagtattatataattatatcatctcatttatgattacaatttacaagatgtagaacactgatcaattacttacatcgaaatgaagatatggacaggcttgtaacaagtgtgccaggaatggaaagttttctacggttccgagatttgcctagtatgtgccgagtgagcgacacaactaacaaatctttccaaatgatttctcaagtgaccaaccaaactcggcgagcccgagcacttatcctaaacacatttgatgacctcgaaggttcatttgtcaatcgcttaactgagttttgccccaatatctacacaattgggcctcttcatgcccacctaaatcacaggcaagcccaaaactccaaaacgtcaacagatccatcctccaataatctttacgacgtagaccgaagctgtctcacttggctagattctcaacctccaaactcggttatttatgtcagtttcggtagtattgttgtcatgactaagtccgagctaatcgagctttggtacggtttagtgaacagcaagcaacgcttcttatgggtgatgcggccagacatgttaatggcagaagatggcgaccgttcggtgcccgcagagttagaggatgcaacaagagaaagagggttcattgtaagttatgctccacaagagcaggttctttc

SEQ ID NO: 96508 - DNA, 586 bp, Cannabis sativa
actctaactcattgccaattgctgacagtatcaacagtttcttggttgatttttttttttttctcttttccatattggtaactttattttatttttagctttggacttaatagaaagaaagcaatttagtgaaacccattcaccaaaagcttagtactttctactattatatagaggatttagtaagaatcgatgtgtttggaagtaacaatgtaattattatagtggtaattacatagtgtagtaatcacactatatttaaaatacaaggtgtatttggatttgaggtgataatcgaatttttaatatcttgttaggcaaaacaaatagtaattacataagaaaataatttttttttttgttgttaatatttaaaatggaaatttatagtacttacacagtgtaattatattcaattctcataggagcgtgagaattaaaaagtataattggcacccctcatttacttccgtccaattacatagttacagtataattgtatagtcagacaaacatatcaaatcatataattacctccgattataatgtggctttttaaacgcgcccttaacctgtcatcaaaaga

SEQ ID NO: 96509 - DNA, 1306 bp, Cannabis sativa
aattgaatgtgaagagtttttttttccattaaaataatataaatagtcaaagattcctttataataaccctagcatcccccttcatctcccaaaccctcagttgtttctctctctacggcttctgatttcagaaaaaaagagatcgtgccatcccttcgtctcccactggaacgacgaagacaactgaatgaaggaaggacactcatcttcgccctgggacaacgaacgaaggacccttgtcttcgccccaaacgccctcggtctctgtccccttcgatgctccactgccggttcttcgccccaaatgccctcagtttctgtccccttcgtctcacatggctccctttcttcgctcttcactgctttatggaccttcttcttcttattcattttgctgcaacttagatctctagctcaaaatgccaccaccgacctttccaaaggtaagccttttaattaattattattatttcaaaaaagagttactattgttgatacattgatatggtttgtaatccatttgtgtacttcacttggtttttagatttctactctgcacttgtactaatcctatgaacggatgtaactgtattcacaaatttgagttgatcctcttttttttttctttttgttgggttctacttggtttgttggggtttgggtttgatttccgtactcggctaatgcttctttttttttttctctaattataattattataatttgtttatttacacagcttacttaaaaattgaaaaagaaacaggataagaagaaggaaaaaaaactgtgatgattgcttagttaattctctaacaatggtcaatttgaagtgggttttgattttaagggtttgttgtttattttctactgtttacataattgaattgagtttatgaagttagaagttgtgttaaaattgataccctgttatatataagtgaaaataagataattttcctaaataaataatattcaaattcaaaagaactgaaggtagcttagctgattaaggttcttttcttgatgccattgatcttacttaactatctgttttatgtttttgggaaattagttgaactgggttttatttattttctttgttaagtctcaatttaggatcaaattctttctgtattttgaaaaccttcatttttcaaaattatactgagtttagactttggatgaacaaatgtttactcatgggtatgtaaagtttagttgtaattggttatttggattatttgattgttgattatgattgtgggcactgagaaattatctttagagaatgtggttgtgatg

SEQ ID NO: 96510 - DNA, 590 bp, Cannabis sativa
catgaaaatacatttcgtcgcctcggaaaaggttacaatgttacagtttgacttaatacaaatggtgattgtgtctagttgtaaatattctcttgatttccatttcttctttgttattatttgccattgaaatatttcgataaagtagatactttttgttgagtttctaacatgacgaaccactaaacttttggaactatgctttcactgcctttactatttagcgtcaggactggattttcctataatatcaatatggttttttgttcttgagagcttatattttcagacatttgtctttgtattattacagatgactggtcacttggatatacttcaattactggaggtgaagacatttgtattgggggtcatcgattgaatgtcgttttttctccggtattgcttacactagaaattttttagaatataaaatgaaagtaataagctgaacaagggtagaatttacaatttatttgtctgttttgcaatgataataataatgatgatgacaccaacggccacaactacttatgaacttcatgtacaaattaataaagaaagcaaaagaaaggaaaaaagaataatag

SEQ ID NO: 96511 - DNA, 653 bp, Cannabis sativa
gcctcatcgccacttagccaacccctgacttgccacgtattttgggagaaatcatggacaatagatcccaaagttgatgtctctaaatggtaagttgttaagttagttacgacttaacaaactcctcgtaacaatatctccatgtcaacacaagaagaagtgcttccagatgagaagtacgcttcctaaaagacagaccaaagtgtacgttgaggagactttccgaataggaaaggcaacaactggagtcaactattagagactcctttcctagaggaaacatctagctattcgaaacttctttctggaagaagactagctttcttgaagactcctttcagatggacatgataggcatccaggttctcccttcgagatggcatttataattccacgagattccttctagatggacaagttaaagtttcgaaaactctctttcgaatgtcatctaacttttcataatcagaacaacttttgaaaatatttacatttgaaggaactataccacaggcaccttaaggtgcccaacactacactgatatgatgtattcttaatggttagcaatttttatattatttattaaattaaaatatatgaaactctcaatattaatatgcacaggggcggatgttgggttttatgccctaaa

SEQ ID NO: 96512 - DNA, 560 bp, Cannabis sativa
ttgatactcgggatcccgatccatatgattattaatatattaattattaaaatttgatttcggatttattattattaaaatacgggctttacagtttgcctcgacgacattcaattaatcacctctagaaaagagtcatcaacatccatggctgaaggaggtattgaaaggcattgtgggtctaattaaatattttgtctttacaaaaataatttttaaaaaatatagctaataaattatgagacgcaacttataaaatgtgctagatactaatgttgttcaataacaatgcttgaattagttaaattatagagattccatgatcctcccactcacacacccctcaatactccttatatggtcattagagctaaccaagtgttttttttttttgaaatacatagcctcaagtggtttagttcgattttttttaatgttatgtacaaattatgtctacaatttgttaggttgtcaaaaactttgctttaattcttgagattatttgatgtaaagatttttttttccaaatttcgttcaattttactaatgtaacaattgtc

SEQ ID NO: 96513 - DNA, 1090 bp, Cannabis sativa
attctttatcaactttggaagattaatgtcaaggttttagatattctaggagtgggaatgagatgttcttgaagcatatcttagagatcgatgcaactgaaaaaccttccaaaaatcaagcaaagggaactgatcctaaagccatccttctgaaagatacttgtctttcaactcccatggtggatccagcttctgaggcttcaaggcatgtttagcaaagttcaagtactcaaatatatgaccttaccaagtcttgaacttaatatatgtttttattttgaacttgttttattggggacaagggtccctctttttacctttgcagagacaatttattatgcccttgtcgcggggcctttagtatgtaaatatttgaccttttgatggtactaaactgctttttatttatcatactattgtttggattcatttactatttgttatacttgaacaaatttgtatgtgccaagttagtttacttccaggttccttgaggtttcggttccaatggcttgaaccttaggatctcaacctatatgcttagacttttatctttctgggacaaattatttactttttttggattcttgaagattctagttccaatggcctagacctttagaatttcaataatttattccttgaaaaaattaataaatgctacttacttctggatccctatggttctggctccaaagtcttggacctttggattttagttttcttaaagcctgaccttctgtgttttgaagcctaaacttttgtaattttaagcctgaactttcatattgaaccctgaccttctttataatttagccaacctaaattgacttagcaatttattaactttaaaatatggtaagaatgttgcttactttcggtatcctgaagctccaacttcaggcaatactttctgctcccatacttaatgttaacttgcttttgtaattttttgaagagatacttaatacatattacccccaagtgatttaagagtttggactcttggtcacttattacagtacaactgaaaaattataagactaaaaacttaattgaaatttttttatgtttttatttaatttaattc

SEQ ID NO: 96514 - DNA, 588 bp, Cannabis sativa
  modified_base (404)..(405): a, c, t, g, unknown or other
tataaaataaaaagattaattagtgttatctaataaacttggtttaatattcagaataaaaacctcatttaaactcactaaaagacaaaaggttaatttaggtaaaaggactattttacccttcccaaagctacctaatcacaaaatcacctaggggtatttttggtcatttctaaaatcttgactattcccgacattctcaatatctaactatatttctcctctatactaaaaatactaatatgtgattttaatagccaaacactgcgttccaatgttgtcgggcacaaaacatgtaaaattatgaaactccatatatgacatataaaatgcattctgaattcaaataaatctccataaactgataattcataactaacatgcaagtttcataattaaacccnnattatctgctaatttccaaattaattaaagttaagcggtctttacaccaacagtgcccgacgtacaaatatgtcaacctgggagatggtaacagggagacatgtcaatctgggcaccagcccggaatgaaagcctcatgtttttgctcttttgttgtcgattgatcttcttggtggaaaatgc

SEQ ID NO: 96515 - DNA, 677 bp, Cannabis sativa
caaggtttgtgtttctgctttctatgctagccttttgtttttttggttcaaggttgactttacttctatggaaagacaccagtctctgcaattaggtttaaatttttttagttacgtatttatgttttctgacaaagtattactacatatttcctttactaattgatctataataaaatacttgatagatccttcatatgatattcctttactgatccaggattgagctatacttctgtagatgacattgttggaaattacggtgtcgtgtttgagtctgttgtgtatcatttagtttattgaaatatttactcctgcatgacagatttctttgaatatttgatttagggcttggggttgccttttggcttcataatgtaaagtgctttaaaggaattctattctctagtttattaagacagtgaggttttattttttaatgtttgctatattgtttgtttatgtgtgtatcacattttattgctgtgatacctgtggttttcccacagccttgtgtatccattctgatttatgaaagagttttgtttaaacaaactgttccaataatgatacatgttatcctttacttttaaattctgtcgtgcatttgagtcctttcttgctattgttgccttttttaggtaccttactgcctttaacttgtgatgcagaaaatt

SEQ ID NO: 96516 - DNA, 526 bp, Cannabis sativa
gaaccaaaccgattcaattatcatccaataattattcaattttttttttaatttttaatatacatttataagtttatatatttaatatattttatttaaaaaagtactttaattgatttaatatatatttaaggtatgaaattaaaaaaaaaagaattttagatctaaaatattaattctcatctttctaaatgctaacagaaattgtcaatgtgtattgataagttttatttattagcggttttaatatgggatcatgagaattagattggactaaactaatgtatattgaatatgttagattattaggttttaaattttattttatatatatatttttcttttttatgaaattaacttaaataatagctaaaatggattgaatgaatctaatccaatccaatagaagattagttaatacatttattagttggaatcgatccaatctaatatatctattggatcggatcatatcggatgactcaatttgattggattggaatggatgataaaattcaatatccaa

SEQ ID NO: 96517 - DNA, 1142 bp, Cannabis sativa
  modified_base (895)..(896): a, c, t, g, unknown or other
aatagtaaggtacttttaacttgatttttgatactcgggatcccaatccatatgattattaagatataaattattaaaattaattttcgagtttattattaaaaaatacgggcgttacacttttcctcattggaaacttctttgaaaacctcatctcctaagctgagcaagattgcactatgtgtttttttctcaatctcatacagctttttcttgtcttcactcaattccttgagagaagtttcatcaatggtttttacaatcccattgtgaacgagtagaacattcatctttatcttccaaagtccaaaatcatttgccccattaaatttgtctatgtcaaacttcacaccaaccatgttcttgacagattattaaaacttcagacttaaatcttgatcgatataatcctcagttctgataccatttagcataaaaataccatcgagaaacatcaagacccaatcactaaaacaaaactcaccaataacaacgaaacctaaaaaaaaagaaaactcaataaaaacagagtaatattaaggattttaggtggttccaccgaagtcttttaaatcccgatccagtctactgtaggaacatcattcaaagtcacacaggttttgattatctttattcaatcacaataaaaataaaaatggtaccaagttttgtctaagagctttacaacaaattacttggcgtttggttaggaggaatgaaaacataggaataagaatgggaatgagaataaaatttaaaatgcataaaaagttcgataaaaaaatcattaaatatttttttatgatacatgggaatggtctttccttctattttaaaatggaatagtcataccaaaatagtcgggcattccattagaatgacattctaatacttnnaaatgcaaccaaacaaagaaatagaatgaaattattttatttccattctatttcatttcattatctccaactaaacaccaccttagttcttggagctcaaagaagactctctcctcacttaatctctctgttttgacaatgagattaacccattacaatagttaggatgagttttatataagttttggttctaaacagaaaaagagagcaaaaaagtagaagccttctaactgaattaactgccac

SEQ ID NO: 96518 - DNA, 603 bp, Cannabis sativa
acagaacaattaaaataatagtggaacaactaaaaaacaacagtaaaaatttaacacagtacatagtataaaatttacacaatatttttgaaaaaaattccccctcacagtttaaaagtaaaaaatttataaatttcaatatgtggtgtaaaacctcctaaaaaggaacttacaaaagtaatggaatttaggttaacttttacaaaaataatatcacgtagatttttttaaaaaaatacagtgtttttataaaacaacagtagaacacaaaacaaaataactaaaaacaatagtagaacaactaaaaaataaccgtagaacaataatgaaaacttaacacaatacacattataaaaacttacatagtaaattttttttaaaaaaaacacacagtatttttgaaaaaaaaaaatcaccccacggtaaaaaagtaaaaaaattaaaaatttcaatatgtggtgtaaataattaaggatagattagataatcttaatcaagtccagccctcaccataagcgggttagacttgtatttagggcccatctagcacagagctaaaaaatttttttaaaaaaatattatattttttttactaattttgaa

SEQ ID NO: 96519 - DNA, 567 bp, Cannabis sativa
tgatgctgcactgatgatacgacgctcttttttcggtcctctcggtcctgagggccagtgctctctcgggggagcctgcccttctacggacctttccctttcgggaaattagagcgaacttttcgcggatcttgggcttttttgttttttcaaggaacgatgtaggatttcacttagggtttccttcaaagggataccgtatggggcttggctccctcttcttaggcttttgagtactttgtgaggactcttcttgtgtttcttctggtcccagaggcacaaccttagggtgcacgtggatcccagccatttccatggccttttgcatggcaaccattatttcttacgtcctcctattttgttcattttgtgcggctagttcggcctcatgatcaaccactttttgccttagggccagtacatgggtatacgaccattgtcgtaagcatcatacccttattggttttcttcgtactcctcgtcgtttctttcatcgcgctcctcagaatccatgtttgctcgtgaagctgcttcttcatccctaggttctgaggatcttaggggggg

SEQ ID NO: 96520 - DNA, 653 bp, Cannabis sativa
  modified_base (146)..(153): a, c, t, g, unknown or other
agcatggtttagtacataagcaattactgaaatagtaaaattgaatgaaattagaaaaaagtccttaaatccaacaatcttaaaagttcagggggcattatcaacaaccttaaaagttcataggatatgatttggtacatgtcaannnnnnnngggcaaaaatcctaattagccattgttttaaaagtgatacatttctatattattttaaaatataatattttattttatttttcttttacattatttttggcactattacttctaaaaatactctaatggtataacacattttaaaaataatataattatgatctcacacattattatatactaggttattgttacttagttatatttttaattttatttttgttatgtgtattttaaaattttataaattaaaacgaaactacttattaattttttttattaaactattatatatattgagcttttaattgggtaaataccattttagattttgtgttttacaaaagttattaattggactatcggttttcttaaatgataaaatactttatattttccaaaatggtaaaaataagataatgagctcaattttcatcaattttatttttcaatatatccattgtcataacatctctagatcagattattattaagtttta

SEQ ID NO: 96521 - DNA, 526 bp, Cannabis sativa
  modified_base (50)..(63): a, c, t, g, unknown or other
tattctcaacattctcaatgtctaactatattgcctcgctatactaaaannnnnnnnnnnnnnttctaatagccaaacaccgtgttctaacgttacagggcacaaaacatgcaaaaatgtaaaattctgtacatgacaaataaaatgcattcttaaatcaaataaatctccataaactgataattcttaactaatatgcaagtttcataataaaactctatttatctgctaatttccaaataaaagttaagcggtctttacaaatggcatgtttggattttgtgtatgtttcttgctatttttgcctaaaaactattattggatgttgttataggtgttctgaaaagtttggcttggtttggacacattttgagcgggattcaaactgtttggggaaagctggtgcaaaccggttaactggatctggggcaagtttcccaaatcgttcgattcgtcgattcgtgtcattttcagtgccttagttggttaatttcttgatatgtaaggtatttttataatagttacc

SEQ ID NO: 96522 - DNA, 825 bp, Cannabis sativa
aacttttcccaggtcattgtcgtgacatcatgaatcatagacaccatgtcccataagaccaatgcatcttcttgaaattgaaaggtggcacagaccatcgtatcgttaccggtgatgcccataaagttcaggattctagtaatcactattagccattgcttgactttcatgacatccgggcctcccaaaaaaactggaggtgcttgcttgcggaacctttcatacaggggttccatcccattcactgtcaccactggttcggcctggacagcaggggcaggtgccactggaatttctagagcaggcactgcaggagcaccctgctgtctcaaccgtcgaatttcattatcttgttcattgatcctagcctgcattgatgcaaacctattttcccaattttgggcatcctgagcagcttgggcaacctgtggcggattaacatcatcccggccacatgccctgcccctaagacctctacctcggccatggacatttaggggaatctgagctccctgaccagcattagatccaaccgaattgccctggctgctggtatttcgcctggcgtccttactaatctgaacagcctgtgtaaccaagagctagtctggtcagattgtgatcaaagagaaacttactaatgccgcttatttagaaattataaacatgcgcctattttactatcaggctactaacatgcttcctaacaggctattcttagataatactatagaaaataaagtactaagcaataaaagcttactgaaccgtgaaacgagctgactaccgatgataattgtacatgtcgtgacgatcttcggaaga

SEQ ID NO: 96523 - DNA, 641 bp, Cannabis sativa
  modified_base (30)..(44): a, c, t, g, unknown or other
aagaattcaattatataggcacactttatnnnnnnnnnnnnnnnatatatatatatatatttcctatgtttatatacttcattcatttaatttgatgagagaccccacgaagttattagttattaatttgaatgggacctttcaccaaacaaaactctagctaaaaaggatatattattatataaatatatatatttatgtatatatgtcaagaaatttattaatatcactttataatagctaaaatcagtggaacacttagattcatgtggggtacatgacttcactcacatttcactgattacaattttgatataggtttacttttactttttttatatatatttttacggtattttataaaaacacaaaaaaataacaaaaaattacatgaaagtaacaaaaaaaacaaaaaattacataaaaataacaagaaaacaacatcaaaataataacaaaataacataaaaacaatatacaaataacaaaaaatttatcggttatggttacaaattttgtcatccaggattggaagttgtgaatctgaagagcatatactggaagcttagtgtggatctggaaagccctgtgcgaaaagtcttgtagaatctaaaagttacttccaaataagcttgtaccgt

SEQ ID NO: 96524 - DNA, 1361 bp, Cannabis sativa
attcaattcaataaactcagaccttggttttctctcacaaaggttctttcgtgataaacacacacactctctctctctcttactaagttaggtgaaatctttctcgctctcgctctctctctctttctctctctgtagatctcaaaagttttgttgttttgagttttcaggcgcctacacttgtattagaaagtacaaagtcctttgtggaggagtttggttatttagttttctaatttaaagattgagttcaatgacttgttattgctttaccaaaataagaagcaaatgctagagtgattgattgaaggaataatttaatcttctgcgtaaatagtataattacgaatactgttattcactttgattttgaagaaacaagttttaggttttcttaatttatttgtatataaggtcaagaaaatatataagttaattaattgtgatctggtataatatttccaacacaacggggtataaagatctctccgatatgattttgatgtggagatgaagaaaaaatagtggggcatgcattattggattgtcctttctatagggagtgttggaagtcctcgacctgggcgactatgtgggtgaagtggcaacatctagctattcaggatgtggtggctggtttatttttgagtttgtcaatctaagaagttgaggtaatcatgtgtttgttatggcttcttggattgggacggaaccaagctcgatatggagaactatatatacacattccataccaagtgagtcttgatattaggttttttctttttgagtttcagcaagcttcaaattgcaccactattgctactacctaatcgttattagagcagcatagttagggggaatctcgagatagttattggccaaggagggcatggtatctgccgaagctaggtgagtttaagttgaacatcgatggcggtgtggatgatagaaatgacagtttagggtttggggcaatgtcaggggtctttaacaaagtctttcatggcttagcatatctcccgtcaacctcctttcactggtaaacttatttccatcttggaagctctcaaatggtgctatcatgattcatgaacatattcaagtttcgtcatttgaaagtgactacaagaatgcaatttagtgattcaaaagtagcacacactactacaaaagtggcattttgcttcggttttaaagtgatgttggattaaaaatcttatgtggtcacgtatgtataatgtatacactattataaagtgtgataggtatcaaaagggtatgaaattgtcatgaaaataatgtgtatataccatatgttaatttataatttgttgagtggccaaattataaatacccaaaac

SEQ ID NO: 96525 - DNA, 547 bp, Cannabis sativa
atatttccatatataatttacacacaatatatatgattttttttttttgaattcaaaattgctgatttagaggaaaataaataatatgagcctctctttaattaactgatgtagtgtgtgtatatatatatatataacacaaaaatcattattcttaaattataatctctgttaagagaattacaaagtagttcgaatatattttttgttttgaaatcaagtagttcgaacattaattccacctgatatatataatatttattgtatcataattatattttttagtatggaattaagtcgatcaatattatttttattagttatcgtagaaactgaataatatctcctcggatcctatttggtcgaatcaaaaacaaaaacaaaatcatgagcataaatcatacctgttggaccagtgtaataagctatttgtctgaaaaaaaaaataagaaaaaaacaatagataagtttttcatttattattatttcagatcatataataatttaagcaaaattaaaataaatatcaatacaaaaaattcatgaa

SEQ ID NO: 96526 - DNA, 991 bp, Cannabis sativa
  modified_base (50)..(63): a, c, t, g, unknown or other
tagtacataaaaaatcactgaaatagtaagattgaatgaaattagacaannnnnnnnnnnnnnaacaatctcaatagttcagggagcatttttagcaatcctaaaagtgttcagagggcataatttgatacttgtcaaaattcatgaggcaaaaatcctaattagcctaattataattatatttcatataattatgtattatgtgtaattattattaaaaaagatattgaagtaatcaaaattatagatatacataaattgtaatatttaactcattaattgtaataaaaatacaaaaatataaaacatgaatttgagcctatataacaaaataagttggtctatttaagaaaaacaggctaatccaaataaagtacgttacaaatttgagcatgacatgaaattactagacttacaggccatatcgagcctactttgtaatatgattctacacactacgatccatatttttttttatagcatgatatgacgtgacctaattattttttttatgatctagcatggcaaaacattgaaaaaatataaatcgggctagtacgatacgcacttatttacattcaaatcaaaattaaattttcttctaaattagaaaaaacctattttatccttattttcaacaatataatggtaacaaaatttgcattcataaacaaaagagagaacatattacactttttttaatcataatcaaagatgaaaatacattgctaaccaaaagtattgttactttttgaaaataaaaaagaaaaaaagtattgaaacttttgggttttgttgtttatatggcttattattaattaaaaaataagaaataaaataacgtgtgagatctagtcccgtaagacgtgtctgtttttcaattaaaaaaaaagggaaaatcacaagcaaaatagattcattattattatttattatttaaaatagattcattaatgacacaaaatactgaccttgctcattttttagtaag

SEQ ID NO: 96527 - DNA, 1216 bp, Cannabis sativa
acacacattgcattttaaaatatagtgtaattactaaactatgtaattactaccctagtaattaccctatctagtaattacacagttacttccaaacacacccttagaaatttgaccataagaaatttatctgttgtacaaagtttgttaagaggtattttatcaattgtgatctcaagaatatgatgtaatcattgataatcattgttaggaatacactcaattaaatcgatttatatagtttttaataaaagtgtatatattatattacataaatttcatttattagttaaattattttgtatttaaaatttggacattttagtgtttaacttaaaacttagattttatagttaataatttttattgtatttggatattgaagttgaaatttacaatctataccatattattacttttttcttattattttattattttatgtttactcaattatatttatcttatattaaagttgttaatattaatttaaactataacatttttttaatttgaaatataaataatatatttttttttttgaatctaattatttgaatagtagaaactaacaataataattataaaaaaagtgaacggattcgacagattaacccgacctaaccgataaaatcattgggcgagttgaaatttttttaatttttgattgggcaagttacgattaaatatttacaacccaatatttatattgggttaataaaaatatgctataacccgaccaaactgattagcgtacacccttaatgcttactttcatgcttgcattgaaaaaaagagaagagaatagaactgtgtcttacattgatgatcaggagcatcttgtagaggagtatgataaagttgtgaagcattttattgaccattttagaagctttatgggaagtgctagtttcaccacgaagccaattaacatctaatgcattaaattaggaccctgccttgaccttgataaacagctgaaacttattagaaaattcaaagcagaggatgtcaagaatgctcttttcagcatttcgagtaccaaaagtcttggtctagatagttatagttcgaagttcttcaaagctatgtggaaggacattgtcaaagaagtctcggaagcagttttggacttctttgaaacaggttatttgatacctaataatctgaatgaaagtactttagctttggcgcctaagattgattctccttctca

SEQ ID NO: 96528 - DNA, 774 bp, Cannabis sativa
aaaaaataccataaaagagtggcaaacctataaatgccatatttttataacttttttacaaaatctcatattttatattttatgtaattttcacttatgtatttgttaaaatttaacagcatgaaataccaatatatatataaaacttggattaaggttgatgtttttttaatttattagaatattaaactcaattatttaaatttttaagaataacctaattaaagataattgtaaagaaaaatgccaaacatcacatttgaaatgcgggctctcaaattaatataggggtattttcataaatatataaaagactaagttttattcattttaatcggaaataaaaatatatattaagttattgttacgtgggtatcctaatttttattttaggtatccaaattttgaaggttaaaacaattttttaaaaaattggcatccaagcatctatagattattgccatatgttctatgtgtatggcaaatacctcacatgaatggcaatttatatactcatatgttagtgctaattaaaatttctcaacatgagaccactctcgtatggtattttatactcatataataatagtttaagattacgtttgatcgaacaacaattctttctaaaagtacttgttataggaacatactaattgttcattcaaaatcataccatattgttcaagatacgagaatcgtgaaaccgttacaactatgtcagaccgttacaactatgtcacgacgatcattatcacttcttctgctaaaattttt

SEQ ID NO: 96529 - DNA, 626 bp, Cannabis sativa
agagctttaaagggggacgggacattggtgaggccgaatttgttgcccctcatgagtctaaaaaactgtcttttccacatctctaggtgccatacgaatttgttgatatccagacttcaaataaagtttggaaaatatggtggcaccatgaagctcgtcaagtaactcatcaataataggaatgggaaatttttcttccacggttgcccgatttaaagctcgataatcaacacaaaattgccaactgccattcttctcttttcaccaataaaaccgcgctagagaatgcactagtgctaggctgagcaatgccaatatggagcatctctcaaaccatcttatcaatctcacccttttgaatctgagcgtatcggtaagaatgcatcgatatgggccctatgtctagcttcagggtgatggtatggtcccgatggcattgtggaggtagttccggtggtagctcaaaaacatctttgtattgctcgagaagctggctcataggagcaaggattggtgagtggtgttgatcctcagctgcggacaacgccctgacatggataatatatgcctcagcccctttttctaccgtgaacatcatagctttcaaagagatgggtgacttacat

SEQ ID NO: 96530 - DNA, 555 bp, Cannabis sativa
gatgtgaaacaagagtatttgcattacttgtgtgaccttttagattattgcttaatgcgaattatttgttgtactatctcagagatgtagtagttgacatacaatttaggacatttatgatctgaaaagagtttaggttaatttacaatatgtcatcacataggaggaagaagaatagttaattagtgttaacaattaggtaatcaaaacaattgaaatcatatccctaatttcacatccattgttaaaccttttatttgtttattttatttaattttgcttagtttatttagtttcttaaatttatttatttgattgctaaatagaaacaataattcaattgattggtacttaactacagtcgtcgtggaaacaatctcacttacataagtattacttattaaaatgatacgtatacttgcgtgttggatttatcgcaacaatgttttgacaccgttgatggggactgtttttgtaacaccctatttcatagggacgccacgtgtgtgattttataaactaatttaatattaataaattaattaattattaaaa

SEQ ID NO: 96531 - DNA, 551 bp, Cannabis sativa
aaaaaaactttaaacgtaaaaatggtgtttcatgtaattatcctaagattttatgaaaacttcatcacaatctaaacaaaactttgtaactatgttaaaactttcaactgagaagatacaacttgaaatgatatgaaataaatgagtttgggtaacacatttatttagcatgcactaaatgtgctaaaaaatctaagaaaatattaatttgaacaatttttattttatactaaattaaatttcttttctaaatccctattatatttttttaggttttgatgggatcatttgaagcttgcaaagctcaaggagaagggaaagaaaaattgatagaatctgcacaagaatctttaggttttctcgagaaagaaatcgaagggaagaagtattttggaggagaaagcattgggtatttggatttagcagtgggttggattcctatatggcttgatgtaatggaagaaattggggagatgaagttaatccaaccagacaaatttccatgtctttatcaatggtctaagaattttcttacagataatccggttgtg

SEQ ID NO: 96532 - DNA, 716 bp, Cannabis sativa
tctttagaagagagagtcaaatttatatttagtaaaaaaaatgagatagttctatttctcttttgttttattctaaagtataaaatcataaataacttaaaataatttaggattttctacttaaaagaattaagagtaatttgcggtataaatacccaagtttagctcctagttacaaataaataactaagtttaatttttagcggtaataatacctaagttatatttttagaactatgtaggtacttgaccattaaatattaagttattatccacgtgtcatttttttattggtatatttaaattaattttttaaaaatttaatgacttggaccagtcaggaattgccacgtggcaatttacttaacacttaacagccaagtacctacaaaagtttcaaaattataacttaggtattattactgccaaaaattaaacttgggtagttatttgcatctgggagttaaacttaggtatttatgccgcaaattactcaagaattaataatgacttaggaaaaaaaataccattttctcttacttcacacttaattgtaaaacttaggggtaaaatagtcaaaaactataatcctgcctaaacccgatattctaaatatcaataatacttgcctcactatataaaaggttctaaaccaaacctatgtgactttagtggccaaactatcgtattttcaccgccgagcataaatcacaaaa

SEQ ID NO: 96533 - DNA, 1109 bp, Cannabis sativa
ttataatgagagaatattctgaaataactgccctacgcttattatgggaagtttccttttcatcgcgatatgatattattttctaatatgataactgtccttcccttatttataggagagaataaatagggaaagtggaagagtccactaggaatagtgcaccttacccttccgaccccatgactccagaactgtcctttgggcttgacctatagaaggcggaaggtatcctaagtacaaagccaagataactcctagaaggacatattaagatgggctttgcctaccttaacattgatgagggtcccactgatgggtctgaaatgttgacatggaatccacatgtcccctcctgaaacgcgaataacatttaccccccaagcttccaagatgctgttcatgataaaagcttgctctaatctctacatcttgatgcgtggatattagaagaataaaaataatgattcttcccaaattactcaaccacagaagttggctttcatctgtcatgatgatgtgtccacgtggtaattgagcgttggttagaacacagttatcgaggagttatctttaaggaacgactatattttgattgctgctcactaactggcacaaaaattaaaaaaaaaataattttcattattagttcatccttgattttgaaaggcattaaatgtggagatattcatatctttagtttccctgattgttggatgaggattgcacttttgtgctaaaaaaattgcggccatccactccttcctcacgaggatcattgtcttgggttataaataccattggtaaccttcagttaccactttttctttcttttccaaattctctaactcccaaattgcactagacttcctaccatcgaagaactttgaatcgcacttaaggaaaatttttttggaagaggtaatagattactgccttcgccggttgctaagaattagggctcatgaatatccctatcttctattgctactgattaggacgactaccgtagaggagatagcaagcctagactttgggaaggaaatcgactcgttgatcgcctccatttctcgtcttcaagagaggttcgatcatcttcctgagccgaaccc

SEQ ID NO: 96534 - DNA, 581 bp, Cannabis sativa
tgtaattaccaccctagtaattatacagttacttccaaacacacccttaatattatatttataaatatcatcttttattataaatatacatgtaactaactaaaatacatatatatttttttcctattatttttagggcgactgcacttatacgtagtccgcaaactttgtactttggatccaatatataaaatggttgtgctcatctattttagtaaatctcttttattttcttcattttgtcttttttttttacttttataaagtattatttattatttaatacaacgtaactcttatagaacgtactaaactgccttatatgtatagtttaaccaaatatgaaggtattattgttttacttcatatatacactcaggatttccaactaaggttttcatcaaactaataaatatacaaacttaaaatatgagtaattacaaaaaagtccacttattaatattagggtaaatagcggcaaaaccccaaatactttcgttttggtttcactaaacccccaaaaccaaaatttttgcgggtaaaccccaaagccaggaaactgttagcaatttaacacttcc

SEQ ID NO: 96535 - DNA, 551 bp, Cannabis sativa
  modified_base (424)..(436): a, c, t, g, unknown or other
aagtacatgcacaaaagcagaaaactgagttaggtcgagaacaaaaatagagaagaacaaaatcaaaatttgtacaaagaaagaatcgagtcttacttgatcgttttcagtgacaagaaactccaaaacattataaatcgccattattgacagtggatatcaagctagatttctgagatgagcttgacagagacgtagccctaatttttgggtgaactctgaaataattctagtgttctctctccctttctcttgtttttcatttgattaaacaaatctgtgtgtgtgtgggtgaagatcctaaggtttctacttatcaagaacttgctctgctagggtttctagtttcgaatcagagaggctgagtgtgtgagttaaggcttctagacttttcttgagaagtctttaagctgaaggattaaannnnnnnnnnnnngtgtcgtgtggtttaaaattgttgccgttttgtctaaacttcatacagacaaaggaaaggtcgaaattgaccttggatactgataataaattttttgttggtgtaggttaaattg

SEQ ID NO: 96536 - DNA, 502 bp, Cannabis sativa
ttagcttaaaattcttgtatgtataaatagtggaatacaaattgcaaagacacaaaaacattcattgttaatgcttgatgtattaggctttacggaggtttaaaatatgacattttaatactggattggtactatttctttgttcaggtcaatagctgtttaaatagtcctttgaaggaaagtgtctgggtttctattgagtgcaaaataagaaccagggggtattgattcctctatagtggttaactgttttatctatcttgagacgaggtttttgaccccacaaatttctgtactttcatcaagcaaaaccttgaaaatggataacatgatacgctcatgattactaattagagttgcaatgaataaaaacatctgcaataccattaataaaaataaataataaaaaaaaaccaaaaactagatacagataaaaatacaacatgaacaaatagtatatcctttccaaactggtataggggataaagattaaacaaattcc

SEQ ID NO: 96537 - DNA, 640 bp, Cannabis sativa
ctcatgttgactgagaatatcaacctagacgtcgagtgctcggtcactccaaattggaagtgttccaatgttggttctgaggcttgtatcttgcttatggcatgtctctcatgtatctgagtgcaaggctaagcagtttgcactgagataatggctttggggatcgaaaatgatgcattctagggtacaaaatgtcaatgtcgacactaggcaaggcccatggcaccaagttgatttctaaaatatctaaaggacatccttagcttcgaggtccatgagttggagtcttcttgacttgttagcttagtctattgaaggacggtgtctttgaaacgacttagcatgatccaaatacctaccaggaagctcccttctgtcaatctggacactaggcaaggccattagaaccatgtcaactgacatgggatgcgggacttcgggattatcttttttcttgccgcgtgtcaaaaatgatgtccacattgtcagtgctaatttctgaatatatatatcatacatattatatcacatgttttatgctctatacctcccttatacatatatactttaacataacatgttataatctcaaatactatattatataacatcatcttaatataatacacacatagacata

SEQ ID NO: 96538 - DNA, 652 bp, Cannabis sativa
tctttttgtttcaatgttctttgacattttcttttttcatatactattataattgattagggagtcatttcatttccataaaataaaactgcatatataattaataagaacaaatattttggattgggggggctagggccaccgtaaggtcctatatacccccgcccctgcatatatatatatatatatatgtaaattaagtttttaaatctcatatttttaatgtttttatttatttaggtagttttatttgtcactgacattggaaaagtcaccggagtttgctgtcggtgccagaaaaattaccagagtagctgtcagtgccgaaaaagccatcggagttgctgctgatgccaaaaaattcgtcagaattggcattgtcgctagaaaatcactgaaaaaatcaccatgaaactagttttttgatgaaaaaaaactggtttcttgatgaagaaatcgatttcttgatgaagaaatcactttctaggtgatttttccaatatcaatgctaatataaattttgataataagaaatcaaattgtgttgctgaaattttgaggtgttgaatcttgtgtaattgtgcattaatgatggttgtgatagtgtcaaattcagagcactgtgaagaaacgctttttctttggaaaatta

SEQ ID NO: 96539 - DNA, 546 bp, Cannabis sativa
gtagaagtagaagcataataatggtgtgaaaagttagtttgattattctaattgcatgttgctggcacgtggtgattgagaaatatggggtaggtgtgtgtggagatgcctaataatagatcacgtgacttataataataataacaataaagaacgattgagtttgatggagccaataaatgttggttgttcaaggttaagcaaggggaagttgcaagagcatttgggtaaacattttttatatgatgattcatgattggttagcaatatttattaaaaattatttttttttacattatataaaatttgatacttaattgcactaatagcggtatgacaacaaaagtactaatgatatcttttaataattctctaagtataattgtgtctaacacttgaaagaagatagaagtttttctaacaaaacaattagtgttgtactctaataccattcactcttaacacaaaattttcacctaaaatttaattaaaataaaggacaatatatatgatgtattagtagaagagaaggcaaaacttgatcat

SEQ ID NO: 96540 - DNA, 663 bp, Cannabis sativa
  modified_base (210)..(211): a, c, t, g, unknown or other
  modified_base (412)..(414): a, c, t, g, unknown or other
ttttaaacaatataactaataaatttattataaagtatgattatttaattaaattaatgtctaattcaaatttaaattaagatttatatagaaaatggaaaattatgtaatgcacctccttagaagggatgcacaaatacatctttaactgttttagtatcgaaaaagtttaacacgctgaaaactgcgtgactattttattttatacgnntgtaaaatagactgtttgaacatttttttctatattgtaaattaatctggattttttaaaattttgtaggatatcttaaatagctataatgtacatgaatatgcaaaatttagactaaaagatttttgtgatgccgaaacaagtacatccttttaagagagtgcattgtaaaatcattataaaaaataattatttaatttnnntgatacttttaaataattatctaacttatattttaaaaataaattaaattttgatatttaaaactgtttttttaaaaaataactaattgattgatttaacggtgttggttttaactgttaaactaataatttctgttcgatagccacattcaatataaaatataaaagagatatatgtatgaatatttattgaaaattaaaatcatatcaaataattttacattcatgtttatttataatattaaaaaa

SEQ ID NO: 96541 - DNA, 551 bp, Cannabis sativa
ttgatgttattttcatgttactttgatgtagtttttttgttgttttcatattgtttttatgaaaatcgtaaaaatgtaaaagaaaaattctttaaacgtaaaaatataatttcttataaaaaatggtaccttatgtaattatctatttttttttttttttgtagtagatctcctaaatcattttggtagagtttttatttgttttaggagaactttttttaggttttttttttttcatgattgtgtacgttatagttatttaagattacttataaattttagaaaaattatgaatagtttacagtactgaaaataaggtttaaactgttacttaccaaacgtataagaaatttttttggcattgtacaatattcaaaactttctaaaaatttataaatggtcctaaacaattacaacatatgcgattgtgaaaagaaaattagactaaaatgttcttcttaaaatatatatatatatatatagaatttactgaaacactcttttaacaggtacactgtatacttaccttaccaattattaaaaaaaagtta

SEQ ID NO: 96542 - DNA, 1032 bp, Cannabis sativa
ataaatgacttctaatcttctatttataacaaatcagattagattgaaatgaattttatttagggcataaatcccaacaacctgcacacctatctctattatatttgaaattgtatcttgattatgtgagggtgttagaataatttaagtataatactcataaaataaaatatatttgaatgaaattttacttaaaagtaaatttaattaatgtatatataagaaaaaaaaaaaaaagtatttttttaacttctctctaaaatattaatattccttaatttttttccttgaaaaaattgacctattaaaaaatcttcacgtatcttaattgcatatatatatatatatatattaatatatttttataacattaaatttagagaattgctaaaaggcactattggtgtctagcacccttctcggtgtcatactgctattagtgtaatgaagtatcgggtcctatataatttaaaaaaataatttttaaataatatcgttaccaaatcatgaggcaccactgatgcccaataacaatactcttaaatttatttgatctagtggtaagtagttccactgtcttgagtgaaactcgggaagcgaaattgttataagaaacacagatgccattatattagaatagctttgtgtttataaacataaatacttaattattacattaaatttataatagaatattatttttttcgggaccccgtagggttaggaccctaggcacgagactactttgtctactcctaaaacaggccctatgtaacttgggtctagctatttgggctgaaatctttaaaggctcatccaaaccatgtagaggagtaatccaagagcatgcttgtagttgtattgtatgagatggtgttggtgccggtctaattgatttgggggccttgggcgaaaaattaaaattatgcttttttaaaaaagaaaaattatcaattaatatttcataaattcaattttcaaaaaaaaaaaaaaaaaacttcataaattttaaaataggcaaaatttttagaa

SEQ ID NO: 96543 - DNA, 1259 bp, Cannabis sativa
tttgaaaataatttttaataaaaaaataaacaatatgaacaaatttattattaattacaaattaattatatttaggtttaactaactatatagatggtgactctgatttgttattttttttatttaacaaaaaaatcacccaataatttatcataaacgaataattttattatatacccacattttagatagaatagatatataaatttatgacttaaagaaatagaagaaacaaaaaaggatggaaaagagtttccatgcataatatgatttcgtaatattataaattagaggaaagaatgtgatgtacatgtacatcaattttagtactgaaaacattttattttaaatttcttgaacaaaccatttcaaaaaaaaaaaaaatcttaacaaataaataaaccatgcatatgatagagaacggaaataatctacacatatatcagaagaatctaataaacaaagggattagtagtaagaacacaaatattaattaatgctggctgaatgttatactatttaatttgagcaaaaaaaataaatgttatagcatttgaaggaaaggaaatagaaatctatactcattaatgttccataatcattgaagaatatacaatataacgatcgagaaaacttgtgcccactctagtttcaatcatatcgagtgacgaataaatatatattggaaaagccttaaaaaataataatagcttagtcagtctataataataacactagtaattaataataataataataataataaaagatccacagcttagcgatcaaggtacttaatggtatgctataatttataaaaatagtaatataagctttattgaagatgtgagaattaaaacacaaatgaatgcgaaatcaaatcttaggaaacgtcattattggtattattattctagtatatcttataagctatagaaccaatgatatcaggacaaagtaaataatgaattaaaatattaatttaagtaccatatccacacaagaaattttttaccgattaattaatggtgaatataattatttatctctgtagtactcctttaatgagcttctaagtccaactaacgtgctagctagctagtaattttggccaataatactaagtaaaatataattgaataatattatattttatgtaaagtttttcttggataaaaagcaatgttcagaagtgtttttttttttttttaaaaaaaaagattttttagttgtgcacaaatgtgtttccacttcatgca

SEQ ID NO: 96544 - DNA, 863 bp, Cannabis sativa
attttagaatgtcggtttaatggaattagaaaaattacaaaaatgccctaggttattttaaagtttattttttttcaatgggggtaaattaatctttttgcttttaggttttagtgtcccttttatttttgggctgataagaaaaaaaaatgaaatgaaatgaaatgaaatgcatgaaaaccttatttaaagggaagagcttccaaggcaagaaaataagtttcttcttcttctccccttcgtgtgaaccaagaccagccagcaagaggattaaaatttcaccattttgcttgaattgaagcagcttgtagaacctaagtccaacctagaagcaatcaagataagttctcaacaatttttggattgaaaatcctagttttaagttagttttgaagtagggttttacttctttgttgctgtaggacttaaactaggttttgggtgtgtttgtgttaggtttttgagcatgttgggaatggttttaagtggtctccatggctgcctgaattagttttggtttgttgaaaccaaagttgagtttttcttcactttgaagtgtgattttgagcaaattgatatattgcaatgaattggttgttgggttatgtcatgcttactatattatactgtttcggaaggtttgagcaggtttgttagaggttggattggtttttggggtcaaaaaccaaaaatcaccatggctgccaggaaaaaacggcagaccgtttttcaggcacccagaaaaacgttcgaccctttttgccagtaaagtgggatttagggtttttctcctcaagtccgatctgattcagggtgtcttttggagtggaattcagggtgttttagagatggttaagctagtt

SEQ ID NO: 96545 - DNA, 872 bp, Cannabis sativa
gtaaaataatttccaacaatgattgtttagatcaatctttaaatcaaatgcattcttctcccagttcgctcggattgattcttgtctctttttaactgtgttccttgcttgtcgttttagagagaagatcttagggccatggctttgaacatcctttggtggccttcccctgcgtttgagtgcaggtttctgctcttgaggattagagttgctacaagccttgccttgatctcgagtaaccggtccccctctcttctgccatggggtagtatcgcacgaaagaccaggagagaattggcattcatctcttgaagctgggggaggcttgtattgttaatgtccacaaccgctcgagatgtttggcccgaatcctcagaactaagagttgattcaggaaaagcatcattttttggttcaataactataccatccaaggcctttcttttctttggcccaaaatcatattccaaggatctacaatcttcaatccccagtatacggttaaagatagatggctccctcataaatttgtcaatagttcccaggcccgaaagactttgaacgcatggaccacagatcattagatgtccaaggtatcacttgggccttgctacccagcaacggagaataagaccctcggccttttaaggaatgaggccggcccaactcattttactcctttgaatagtccccatcaatctcaaaatggttatgcacgatcgacttggtagaatcatcttcagaggtcttcatgcgtgaaggactacccagtacggtggtaggtattgtccctcccgattgagcatcattggtaagcgccagcatgctttgggtattgtcactatcatttttgtttgttaatacatccaaag

SEQ ID NO: 96546 - DNA, 535 bp, Cannabis sativa
cacttagacttttgtaagctcttccttttagattgggtataataaaatatatgtattaaatttcatttttttttatcaagaagaaagcatcattaatcacaccaacaaataacaatacactctcaaggctcaaggctctcccaaggagatcccaccctcacttaattacaatcaacctctttagtaaatttatttttactttggagccattcctattcttaagaaataaaaatctatatttgaaattttttttttttaattttgctaactatacaattgatagtatttgagtaattcgaaaaaatacaattgttcctattcctccaaatataaatatgataaatagtggctgccaatataacaatcaacaacctcccaatcaagttagaatgacccaactgaaaccagttgttccagctcccaaagtcagtagaccaacaattgaatcccacccaagcaaagattgcttcaagaaccatctttgagtacctgcaagtgaagaatagatgccgatggtttttaaaatgtattaatt

SEQ ID NO: 96547 - DNA, 702 bp, Cannabis sativa
tggcgaggccagtattagtagctcgattgggataggtgcctggagcctcgagcatataaaggctggagcaattctccccctgagagattattttaaggagttcatcaaccatcttagagttgcttatttccaattggttcctatttcctacaaaatccttgcaagtctaaaggtttggtatcatattttaggatgggagtgtcccactccccaggaaattatttatctttattctgttaaggcagttcctgtgaggaagcattgtgcagggggtttttactatcttaggactcatacaaatgatcgtaggatcatcataggattaccaaacaagaccgcttttaaggaggatttcttcgggacaatttgtctttccccaattaacacaactgcatttcacattatacgtaagtaaaccttatctcaaaaacttggttttgaactatttcatatttgtaacctttgcctcgctgacttatcttatttattatgttgatagaagtctcaaaaaggctagttcccactcctgagatggccaagaggtgtaaagctttgctgggtctcccgttcgaactgcgatcggctgagtttcttttgaaataagccaatctgaagactattggccttctcgcttcgaacgagcatacttgtaattacaaatatcttaagtatacatcgtgggagtgttgggttttgtgccct

SEQ ID NO: 96548 - DNA, 736 bp, Cannabis sativa
tccatagaggggtaggtttccaaaggccctcaggaacaggaagactggaaaagcgtattcgtgcaccaagagctgggggagagaacggagaaaatccacaaagaccctcctcttgatttgagatagaaactcaatgccaaagacactgattttaaaaatcgcttggagtggaagaaacaagtaataccagtctcagaaagtgccctgaacgaggggatttcagctgaacttgccatcctccggaaagatatagccaaagtctcctggagacaaacgggagagcattggagtgtgattttgaggaacgcaaaccctgtactagaaacatccttaaagcgaagctcccaaagaatttaaaaatgcttgaaatgacactgtatgcaggagactcaaaccccagtgaccacttatccaggtttaactgcgtgatgacagtcagtaatgacgtgaagtatttatgtttcccgctgacattaagagggtccactaaggagtggcttagaaggttagaacctagatccatggactattggaacaagttacaagttagctttagaaggcagtttgtggtagccagaaagataaaccttaaagtcaacactttgaccaacatcaagcaacgaccagttgaaactcagaaaaattcataaaaagatttaaggaagaggcttacaagactaaaaagatggatgacggattgcaatcaggattgatacaagctagaatttgaacgaca

SEQ ID NO: 96549 - DNA, 571 bp, Cannabis sativa
aaacatgtctttaattaattttgtagaattttagaaaaatattttaattattttttttggtgggctaatataattgtaatatagctatagtatattttttctcaattcccacttggcttgtacaagagagttcaatttttttcttcttctcattaaaattttaaatttgaaattaaaaataaataaataaatatatcatacttatccgaataatggatgaaaaacatattataccacaataaattatcattaaatatagattattaatattatatgtactctcacagtgtataaaagataaaataaattattaggtgttaatttaaatttaaatttaattatattattaattgtgtgatttgtgtggtttgctttttgtagatatatagcttagctatattactttgtggaggaggttgttgctttacattaattataaatttaattgaaagatttttctggcatctctttcctccattcaaaggagaaatgtttttggaagaggtaagattgatggagataagatgaccagcggccatagagataaagaggtaaagcttatatatgattt

SEQ ID NO: 96550 - DNA, 692 bp, Cannabis sativa
gtgtattttttttattggcttatccagtgaattcgtcgttgcaataggtgagagctcaggtggttaaggaacatcaaggtccggtagcaatgatttgttgggctatttagtatatgctcgaaatgaatttgtatggaataaagaaatacctagtgtgagtaatgtggttacctcaataaaattgtatcttgaacaatagaagaatacataaatgaaggatgactatgcaccattacaagtggtatggtaccaaggtttgggtaaagtctcaagagattgagattaagataaatgttaattctgctgtgttcactgccactcatcaatttgggatcggtttggtagctcatgatcatttggtgaagcccgtaccattatttgtgctcatgatgtggaacttgagttagctaaagttttaggcatttgagaggcacttagttggatcaaggacaaagaatgatcagtggtggtacctaagtctattgtttagtgagagttgaggccattcttgatcacttaatcatgaatactctttttggtttcgttgttaacaattgctgacatttgattagttgtttaaccggagtctccttgtttgttcgtttatcattctattattaacaaagtgactcatagttttgctagatcttcctattattttttatattgaattctcaattggagtaatgttc

SEQ ID NO: 96551 - DNA, 894 bp, Cannabis sativa
tttttgaacccgaaacccgccaacccgaaacccgccaacccgaaacccgctaaacccgcccgatgttcagccctagtcccaatacaccaccgaactcccttcttcactatctcttgtgattcccagatactcctccaaacaaaacttggattagatccaatcgaagctgaaagaaagtcacaatgagggaaatatcttgccttgaacactctagtaaccaaagcattcagcctagtgaggagtctcgaaccttgtttgccaagcatggccaaattaaagtctcgtaagtttcagaaacccataccaccccctttcttgtgtttacacaatttctcccatgatatccaatgtatccctttgccactatccttattggattgccaccaataattcgccatcatgctttcttcaatactatggctaatttcctttgggagtaagaagacactcatagcataacttggtagcgcttgaaccacaaccttcactaaaatctccttgccagctcttgacagaaatttaccttcccaactttgaagctttttctgaactctttctttgagaaaaccaagtactatagtctttttacgagtcatagtacttggaaggcccaaataaaagttgtcttcagaagcaatggacattcggagttgctggctgattacattcctatcagtgaccgaggtattagtgctgaagaagatagatgactttgttagattaacctcctggccagatgccatttcaaactttctcaaaagttcttgtactcgatgagcctccgcttccgtagcttggcaatataagtagctgtcatccgtaaatagcatgtgagagactcgcggtgctgttggattttatgccctaaataaaactctttacaatctgattagt

SEQ ID NO: 96552 - DNA, 2348 bp, Cannabis sativa
tgtgctcatgaatccgccaagaaacccggccccattacaatctccacatagcatctcccttttccccctgcaaggaattacagttacaaaaatggtaagaacattgggagctcagaggacctcagtggtaaaagcaacaattgccatctgaccgggcagtgaaatgatagaaaaacgagactccgattgaaattacagtcttttaactgtttgagaattgtatctcagattatataaatatgaattttaagttgttctcctgctatattgagatcatgaccaacatgattaaaaatggtattgtagaaacatattttgtcaagtataaacaccaaaatcaaagcacaagaacattcaacataggtacctgcaaagccaacataatccacctgccttaaattgtccattaaagtggtccactgaattaactccctcacctttgcattgagaacagcttacagcacctgttggttttaaaaaaaaaaaaaacagatgagaaatatatatattacctgagaatttagctattcggataaccaaaaaagaaaaacatgtgacaatataacacttgcagagtaactagctcatagtaataaatatcagttaaataatacaattgaaatcagtaccccctagttgtgatgaaggccataataaaatgtgcccaaaagacaaattttacctaggaattttgataatttttattctatagtatcactttaacaaacattaacaacacctgaaattttaaaccatcataataattcgaagcatatgtatgggcgagttaaagttagttgggtacttcactaaccatttccttcacatttagtacacacaatgctatttactttggtggttggcttggtggattggtttttttctgcagcctgtaaaacaagatgaaagtgagttcaagggaagaattatcacaaggaaaataataggaatttcttatcaattaggtaagaacagtagcccatagaaggaaatatagctgatatactgatattggaaagtagtcgagagacccagctctctcccaaaagctaatgctcactttaaccaaacaaatctctccccctccccttcactactcactcatatatatagcacaaatcccccctttccaattacccaattaccctctttatttatcctaatgcctatcagaaaataacaatgaagataagaaaaccattgtacattagtgagttcctggcaaacatgatctctttttacctgtttgtaatttgtaggcactcaagtcttcttcctatgcttacatataatttatgtttcaaagcaacagtttttcttacattctcaatgaatggctacttcttaattcttttaactcaacattgttatgacttttgcaaaatggtctctccttagccaccaaaattatcagcctgaattgcctaaacaaaattctacctgaaaggtaacattggtattttcttagcccaattggccagaaagcttttagcttccttggatgcctaggggaaacaatttcagcaagaaagggactcaatttctcattatctggataagataaattggtttgtttcaatttctcacctttacttctaatgactgaaactttgaccctttcgaatgctgaaatacttcactggcccggagaaccttcccaggaaccgaatttccaacaaacaagtctgtgaaagaatattcagatcaatatataaacacacatcatcaattaaaaccatattagaaaaatctagacagagagacctggcttgtttgagggcttcaaggaacaaacatgagtgaagcaaactgagcttgccattgaatttgtatccttttttctctgtatatttggcaagtggtgagggaagtgatgacggttgtgactattgaaatatattaatatacgagtagaacaggataaggcccttttgaaactcactttgagaccatcaaattaatgtcattacccaaatgtcctctagtgaaaagtccattttatcccagcatggggatattttggccagacagaccattgttcctcacaaaaacccaaaactattatattaatacgcttaaatatatatttattatatcaaaaagaaaaaggaaatggcgagtaccctcttgtcatctccttgctttctctctttgccaagtaagtcttgacactttttgttttgggtcttcaattttatcagcttctatagttgttctataatcaagggcaattggctttttttggtgaaaataagtttattttatgtgtccatatttgggtgaaaggtctagatgatattgagttgtgtggcgtttaacatatgtcaagttgaaacagatggaaaagt

SEQ ID NO: 96553 - DNA, 828 bp, Cannabis sativa
agatgtttataatatatatatatagtactccttaatctgttattaatattatcctcaccatcttcttctgtttactccttcaaacaatacaaaattatcacaagttaatctgccattttttattattcacactatcttcttctattactccttcaaacaatacaaaattatcacagctttttcgttaaaattcaacatcgcatcgctctcttgtcgctgcaactttggttgctggctcatcagtcggacaaatacattacaattaaatttatttattaatgaatatatttattttttacaaataataattttattttatttataattatgttgaaagagatataataattattattttattttattattccaaaatagtatataagattcatgtgctcaaccaaacactataatttaattaacagtaatttaattaatattaccatgaataaccaaacacagtaataagtttacagataataatattctctttcttaatattcctcttaactagattatatcacttataccaaacaccccatgtgcaaaaatgaacatgtgttgcatccacctcaatgaaagttatcaaaggattctcaagttttgtatgttttacgatctcaggtataaatgctgagacttgattcttgatttggttgatatatcttttttgagcattgctgatcgttccacaaaaacacgttcttcagaaataactaataggctaattagtagttttttccctcgaacttaccaaatcatgtcccctgaacttttttggccgttaaaaattcccttaaactattgagattgttaaatttaagaatt

SEQ ID NO: 96554 - DNA, 813 bp, Cannabis sativa
atacttgtctccatgctccctttccgtttttgtcaccttcctttcacgggtcaaagccctctttgcctcttcccttctctgctcagtattggcatgctccgccctcagtacctccagatcataagcaagttcaatgattatggaacagttcctctccaccatcaagccaatctatgaaaaaaagaacataagtgattcaaaataatggaaagacacgaagcatttattcatttcagagaagttttaaacttacagcattagcctaggtcctcacagcgtcggccacatacatcggatccctacttgccatcatggcaaacctatcagccccgagcctacagcttgtagtagcactctgttctaataggtttgccaaaaatggtgacacatcagtcccaatgcaaggacaaagcttctatgtcaactcgattctgttcatgagaggagggcgagatttgttccacctgtcatagtcagcaagacattacgcctgaaggagatactagtggacaacttcttcatctcctcaaattcactaccatacctcttctggtagaattgattcacagcttccagacgagctttatcccctttcgtcaaccgaaaaggcatgacacgaagagtgaagggtgccagaggcagttcagtcctttccctagacagttgggtagaggtggcacgaataactttagatgctgggggtggcataggaggatcatgattatcctttgatgtctaggtgctttgcctaggtggtcttctaccatcaagagcgttagacccctttcaggactgagtatctattgcctgcct

SEQ ID NO: 96555 - DNA, 545 bp, Cannabis sativa
ccattcaattattattcaatatatgtatatggggatttgattttgttctgttattatacttttacagattgtaatccgtgacgtacggtaaccatcagatgagagagttatttaatctgacggtgagactgatctaggagtaattaggattaaaaagtagaaacgtactctgacactcatttaatgtactctgagacccctctaatgtatcacagaatacattccgtgaaagtacatcacagataaaatcatatcttatatatatatatataaaattaaagtgttaaaatatgtcattttatcgcgtttgtatcacattttatgtgatttgtttttatatttcgtattaaaaataattttctcaactttaatatgtaaaaaattgtatcatatttatgttgacctactttgacttattttattattatacaataatattattatttattatttattttaatttatttaaaaaatcgtattaaacaggtagtgtcgtgtcgatccgcgtttaatttcttgaacttaacccataaaattcatattgt

SEQ ID NO: 96556 - DNA, 1412 bp, Cannabis sativa
aaatttaaaaagtgaaaatagtttatagaatatgtttttgaaaaatattttcacttttctaattttaaaaataaaaaaatgattaaaaaatgttaccaaacgatacctaaatatataattttacacttatatttattaatctattttatttagaaaaaaaatgtgtcaaatatgtcaagttcttattaaggtaggtcgtgtcaacttatttttttttttatattcgtgcttaatttttataaccctaacttgtaatttgtggtgtttgtgttcatgtggctgtgttgaaatcccattttgccacctcaacctctatgagaaaagaattaaaatagtagagaaaattaattatcaaattatgaaattaataaaaaaaattaaggttagagaaaataccaattataacaataaagaaaccattttttttttttcacttaaatcatttttacatgaatctttgttgagttgtggaatcgactacaagtgaaaaatatgatggatgtgttatttatttaaatttagaattttattaggattaggaatatttataattttatataattttatgaaattttacgtgtatataatagtaatgttaatgatgtatttatgtaatttaattttttagctatttatatatacacgtgtatacatatttgtgtaatatttttattaaaaaaaatagtaaattaataaataaaagagaaaattatggagattaatgaattatatttataagttgaataaaaaatttcaaaaaggagagaattaaggacagaatatatagatgtatttgaagagattttaaagcatcatgccactgcttcatacttttcctatatatatatagattacactccacaaagtctctaaattaacaaataaaccctaaaatcctatttcttcacaatcaagtcatatcttagtaggggtggagccaagataagaagtttggggggccaaaatatataataaagaaatttacaaaatacacttaaaaattagatttttttttaatatatttttacggacatttttacaaattttttattttagggtttttttttctagaaaaaatattatttttatgttattttctcatgacagtaacgtcaaaataacattattctaaaacaatacaaaaacaacactctgtacagtaataaaaaaattgttgttttcttgcaacgtcaaacaacatttttaaaaacagcagaaaaataatgctctacaattttgtaaaaaaaaaatccatacaaatgtaaaagaaagaagtaaattcataaaaatataaaatttatcatttttgtaaatttatgaagtaatccccatataaaatgtgcatataatatatctttatatttattatatcgttaattatcacctgaaataaaaaaaattattagtagaat

SEQ ID NO: 96557 - DNA, 1227 bp, Cannabis sativa
aaattttactagtgttcataaatatttacaacataaaaataaaaaaaaaatggactaaaattttttgaaaatcaaaatagatagtaagtttaccaaaacatttttttttttggttattaagaggtgtattgtacaataaatttctgtaaagagttatttttgggaaatatcctaatagtaaccttaatttctaatatttcaaggttacttctcttatgtcattggaaaattataaaaatatataaagacaagtgtcatacatgcatatgtactagtcaaatgtttgaaaaaacttgttccaattaaagacagctttgtatcatcataaaatatagtaattaattgtaaaactaataatattcttagaaaatagaatataattaatataaatattttttattttttttgcacaaagaacataattaatatttaattgacttgtaacatccaagaaacaaatatagaaaattgagttgtaacgtatgttcatttctatacatatcaaaaatcaattaagctcaacattacaataatgaaatttagttctcttgtaacataaaattgtatataattatacaactaaaaatattctttttttttcatatataaaacttcattcattcattgataataacaaatcatagtcaacattacaattattgaaactctatcataacataccattttagctcgtttgttatgttgtattgtgttgtatagtattgtattggaatattgaattgtcactaacaaaattttttacttttagtcataacaaaacttgtgactaaaagtgaaaaagttgtaactaattataaatcattaatcttatattgtgactaaaaagtctgtagaaaaagatattagtcacaaaaattaccatttgctgtgactaaatatgttttttagtcacaatatttattgtgactaaactaaattagtgacaacttgtatctaaagactatgttttagtcatgagtaacattttgttgtaactaaaagtcacattccgtcacaaaaaaatatgttgtgactaaaaaattgtcactagaagtagtaattttttgaagtgtgtattagtattatttaatacaatactatatttggcattgatcacttgtattaatatagctttgtaaaatttatctttaccataaactcgaccccaactccgattcccgttcgggttggggtttgggtctggggtctgaggcccgaggtcagagt

SEQ ID NO: 96558 - DNA, 992 bp, Cannabis sativa
ggatgaggaggacggagggtttgatgggactagagtggtggtgaggaagcatcgaatggaggcagtagatttatcggatggttctgcttgtagggaattggctagggcgattttaaaatttggggagatttacgagaggatcgagagctcaaaacagcagaagatgatggagctagagaagcagagaatggagtttgctatggaccttgagtcacaaaggttgaacatgttcatggacgctcaattggagctggggaagatgaaacgagcgaagtacgcccctggttcgggtaaatttcgaaattctgaacaattatgcatttgatttgaattggtagttggaacgattgctttgatgatatgagtaaatttgattgaaaggttggattaaattggattgacttggagtaattcaggttaaagaattttttgtacataatacattatgctttaacaatcaagaaattgagttacctaagttgttggtaccttctgctaccttgttggaagcaagttttactttttgttttgagatacttgtttatgtaagtgcacttatcttggtataatatttcaggtttaggattatgtgcaggcaagaagatttgattaggtgcttgaacttttgattgatatgtccaaataatccatgctatgcagcatttttgacccatggtagttttggatccagagttatgctcacctcccagtttagcatgtgcccggtttgatttttgtgcctttaagagaactaaaacagcttaggattgatcacaggagatagtcaaattaaaccaaatgacacctgaggaggagttgcattgtttgtgatttgtttagtattttgggtagaagctttagctggggtttgattgttctacctgagtgtacccgggtttgatttaagtaaggagctgtcttgctgcatgttttttggcgtttactttactctgcatttgaatacttggttaagcttccaaagttgtaagtaa

SEQ ID NO: 96559 - DNA, 554 bp, Cannabis sativa
tcaagcttgaaatcagatgtgaatgtggaaaatcaatccaaaaaacaaagaaaacaaagccacaatttcaaaaccttgtttacaaagcaatctttgagggagatattttttgtgtcccaaaaaattaagagcatcattttgcttaatgttgccactctctttaatctgcctatttcataattgaattaataattatgatatagttagaattttatgggttatgagtaactcatcaaattcttagacgattactatagatatttaacttatatcagaaatttaaaatgtttgaaaatttcttgagtttctagcaaagacaattaagaatgtcataaaagatcttgcaaacttataggagtatagaaatatttgatatgtagttcaaagattatttaaataaacttcgaattgtaatcgaacttacctcctcagaatttcagagtcgtatattgatgaaatgattaggtatatgattagttactagcagctattaaagttcttctagggatataccttagagacaatgttttaaatgtcatcccatctaagactag

SEQ ID NO: 96560 - DNA, 1303 bp, Cannabis sativa
ttacatatatgtatttgtacaaataatgaattgttgtacaaagtttgtatagacatgagattgattgaaataaggcttaaatactaaaaaaatataatcatgatttgattatagtctggtatgtattttatgatgatttttaagtgtcatataaatgttgcaagaaaaagttatttatttggagctcataatttagtaagaatttgaaatatgccttatctaaaaattctagaagaattcgatacatgtcctaagtgatataaattcaaaatcgtgcgctatatgagaaagatctttgtataattaaagacatgtaagtcaattattagttaaaaaatacgtatggttgtctaatataaattcgtaatttatacgttgtgatagactcttgaagagtttttgagtatattataaatgattcaagaataaatttttacttctttttgtatattaaaaactattaaatgtatgtagtttgttcattagtatagaagtcctgaagtacttcatatgcatcaagaattatagatatattatcatttgatatggaaattaagatcatacaacaagaattgaacaaatatataatcttggagtaccatcattgtcacaaataaaaatttatattatcgttaatatgttatggtcatattacttaaaatttttcatgaatgattaaataagttggataaatactgatattctaggaactcctaatccataatttagaagtccacacatactctcgaaaagttatagaaaatatacagtttaaaagtgatagcaaaaatcttatgagatatattatcaccaaaataattatggagcatatgtgcataaggtagagacatattcatgtttcactctttttcccttagttcaggttttgtctcagtgggttttcctggcaaggtttttaacgaggaaccttgtaaatagttacaaatatgaaatatttatatcgcactctttttttcttagctcagtttttgtctcattgggttttcctgacaaagtgtttaacgaggcaactttaaatcatgttaacatacttgcactttatcaagcaagtagagaatgtgtgggagtgagatcatgacataacatatttgagaaacatgtgtcttatacacaatttttgcaaaaaaaagaaaaaattaaatggctactcttacacaagggccaacatgccaagtgatgtgatcaaaccgatcacaacatccaattatcaagaacaaacataattgatcaaagtctaaagatttgattagcaaaacttaacacaaaagaaatgcaattcaag

SEQ ID NO: 96561 - DNA, 765 bp, Cannabis sativa
  modified_base (476)..(479): a, c, t, g, unknown or other
  modified_base (506)..(507): a, c, t, g, unknown or other
ttaacctaatacaattattcaacaattattcaaataaggcaaatgtaccttcacaaggcaaatgtaccttcacaatcaaatgtaccttcacaattggggttgttcatgtgagggagggctgggtcctgtatgtcccactactactggccccctaactctcacacaaggcccaaaaaaagaggaatttaacctttaattaaataatcgtatgtcaagtacgaattgggcctaaataaaactattatggggatataccctattttattttatcaacctagtccattcaaatatatagaattaaatgggttttatatatgcatctaagcccaaaaacaaacatataggctaacacagacacactaatttggatgggccctatcatatttctaggtttatcacagatgaaagaaattacaaaatttacatgttgcaaattatttatttgatttattaacaattagactatgattaaaatnnnntcattagatctgtcaacaagttaatcnnagcaatttagatcaaataaataataggtttgttttaaaaaaaaattgaataaacaattttaataaataaacaatacccatggtcccatgtaacaatatgtgaagttgagatatttaatacttatataattaaattatcatttaaaaatcaactattttaaaaatttagagtttttgaaacaaccttaaatatcttttcaaaattcaaaattgaaactaatttaaaatatctaggttttatttgaattattttattaaa

SEQ ID NO: 96562 - DNA, 561 bp, Cannabis sativa
gctccaaattactagaactcaggcagagcttaatcatttgttaaatgataatctgccaactcctgactcctctcatcgtatcacccatcttcaatctgagcttaacattcttcttttaaaagaagaaattttttggaagcaacgatctcgggtcaactggcttcgggctggggataaaaacactagattttttcatcaaaaagcctctaaccgcaagcgcaataaccacattcgtggtttaaccctccctgatggttccatcactcatgattcccaaactatcttctctcaattcctctctttctacactgaccttttttcatctcatggtacctcctcctttgcaacatcgtccattctccaaggtgtcactaataccctttctcttgcccagtctgattaccttgctgaggatttcactatcgatgagattaaatctgcaatgttcagtctctctggtgacaaatctcttggtcctgatgggttgaactctttcttttatcagaaaaactgggacaccattggacctgacctgtgccagggccttctgcatatccttaa

SEQ ID NO: 96563 - DNA, 1447 bp, Cannabis sativa
tttaggatcaaaatatgaggctgtcattgtcaatctcacaacaagatctgaaaatctaaccattcaagaagtacaatttatgctccaaagtaaagaaatgagaatcaatcaacttaccttagattccctcacaagtgttcaagcaaatcttgcaaatttatccttcaacaacaacaatcgaggttcccgaaaccatggtggtagaggttatcgtggatcaaatcgagggggaagaacaaccaacactagctatagtggcagaggcagaggaactaacagacctatctgtcaactctgtggaagaatagggcacattgttgtgaaatgctttcacaattttgatatcaatttcattggaccacctacataaaatggaccttcaacatccttcaccctaactgaaacccctcaagctcacttctcacaaatctcgactgcaagttcatgaaggtctctaccaacttcaagtcacaaatcccaagctatttgtccaaccttcagctataccagattccacaatcgtcagtcctactgcctacaatcacaccactaccagcaatccagttcatgacaaacacgaaacattagatatttggcattgtaggtttggacacccctctttaaatgtcttaaccaaagttctttctcgtgtagcacctcatacaaagtgtaataaaactactttctgtgatgcttgtcaaataggcaagcaacaccatgtcaattttaaaagtactgtcaataaaacaacaatgtcttttgaattgattttatctgatgtatggggaccctcttttcacacatctagtgattgtcacaaattctatctcaggtttgtagatgattttacaaaatatgtctagttatttcctatgaaaacaaaatcataagtgaatagcttatttcttcaatttaatgcctatgttgaaaggctcttccaaataaaaattaaaagtgtgcaaactgatttgactaaagaatatgaacctcttcacaaactttcagtctctaggtatagtcaaaagaaattcctacccacacactcaccaacaacaagatagagttgaacgaaaacacaggcatgttgttgacacaggcctaactctcctagctcaaggcacaaataccattaactttctggtgggaagcatatacctcagctgcctacatcataaatagactccccaactatacattagactttctttcaccctatgaaaagctattcaaacaaaaaccagattacaacatgttcaaggtttttgggtgctcttgttttcccatgttaagaccttatgagactcacaaagtgtccttcagatcagctaaatgcttgtttgctggtaactatctcaactccaaagggtacaggtgcttacaccctagtggttgtgtctatgtatctcaaagtttgaccttcaatgaactggaatttccttacaataac

SEQ ID NO: 96564 - DNA, 560 bp, Cannabis sativa
ggcaggtaaggaccgatgaaccgcctcatattcatactcgaaagtactttcgagatgaaatgggtaaattgtgttgttactttgcacgtgaccctgatggccaatagtacgagtacttccctcgagtacatagggaggaattgaatctgagctcataatctgtgtttgagattaataattggtatctagagccaaattattgattttagagctccatttctttttaaaaaaaaaccccattttataaatcagaaatttattattttttttgcttttttgaattaatatggttaatgttgtgtaagtatgagatttactttttcaaatgggtttatatatttttggatggttatttttcattgttgtggaggtgttcattaatggtgaaacccatttttagatttgtattttatgggtaatgtttattttgtgaaaatagatgaaatagatgttagaaattgatagaggattgaaaatggaacaaaatccctcaaacggcgtcggttttggtggccggagatggtatatacaaccatgtcgcaccaatctgggttgtagac

SEQ ID NO: 96565 - DNA, 559 bp, Cannabis sativa
gttcaaataccataattttgttacctataattattgtagatatgaaagagtcaaatgttaatttctctactaaatgggggctacctcatacaagctctgaattgtgctcctccttgaatgatctctcctaccctttggaacaaaactttaaaatgccaaaatccttaagcgtcataacgtactttgatggtgtattttatttgaagcactttcagttcgtgcaaacgttgcctctagaatgattattgaaaattccatgtgtcttttatatggtgcttttgttaaattaatagaacatttctgtctgcattgtaatcttgcttaccacctttggaaatcatccccatgagaattgattcctttagacaatgtgggtactcattgttgggactcggggaaactcatttgaggtataaaggagagaggcatagatacaaatgaagtttttctttttttttttttacttttattgtagtggatactatttagaatgttaaaaatgataaaatatacaatgattgtgttcatagtattctccatcatattagctaaattgcct

SEQ ID NO: 96566 - DNA, 661 bp, Cannabis sativa
tatatacaactgacatttgcaaaaacacagttttacaaatgcatagaaactcttgattcatttgtggggaaaaacaataggaaaaagcacaaaacatcttttttttttctcatttttatgctgaagcttcattcattgcagtactgtatgaaagctccattatccaattgaagaagaaggcaataacatatatactaatacacggaatatagtttgaccagatttgaaacacaaaatgtatagtagcctcataaattttgatccgaaacaactttctttcaaaatttataaataagtaataatttgaatgaggaataatgaattaccgagaatatatggacgatgcacggaccgggccggagagggatgaccgagagtattattaattggtcttggcgaatagcgaatatcaatcaactagagataatagacaatatataggaaataagagaaaaaagagaacaagcttcaggtatccaatctcagccgaaaacaatatattgcaagaaaaaaataaagaaaacttaccaatgcgagaccaacggggttgtggtgccgtcgtcgtcgacagagaagaagagaaggggctgggtcacgtcatcttcgagagagaagaagagaaggggctgggttgtgctagagagagagggggctgcgaaga

SEQ ID NO: 96567 - DNA, 573 bp, Cannabis sativa
tcaagcgtaaaactgctccaaaagacaccaatagacgagataatgctaacctttaaagacccgaaatataggttaattataacctaacagtaacacgtgggtctatgccccatagacataaataggcgtgtgagcgtaccactcagtcgagagaatccaagtgtgaagacccactttgtgagagaggagctctcgtgttgattgtttcagtgtgtacatgcaaagaaaagaaagagagtcagtgagaaacaaagaaaagtacacagaaaagagagaagagagaaagaactgaaatactcacctgatgtaatattctccatttatagtgcagatctgagatcgttctttaaggcgagctcaaaagaggacgtacccctggatttagggcgaacctctataaaccttgtgtttgtttttcttacatctctttactgtttaatgcttgatcttttgtgtgtatgtgtttggggtaaatttctggggaaggttactggtaagatcgatctggtttgatcgagaaagggatctagcgttccttcgaggagaagaacagatagagagagagagagagag

SEQ ID NO: 96568 - DNA, 542 bp, Cannabis sativa
gttcatgaaaagttaatctcattgacaaatgaatcaactttgtgtttttcatgccaaatcaacttcaatcataaagaagatattatatatttgtcctgtgtcttcttttttatttaagcgtttatatattacatcaacataatttgggattcgaacccaggacttccaatacacacgcaccccctatggccacttaagctagcctcaagtggttccaaaaatgtgtcttcaatcttcatgatatgattgttaaatagagttgcatgttattgtcaatagcaaattaaatttacaagataattaactcttatacttttagccattaattattgatattataaatcttcatcatcaatacaatataagtaaccaatatatagatttaattgtaactgagattatattgttgggaggaataaaaataaataagaatagaatgagaatgagaatctataatgaaataaaatttaatttatatatatttatattaaaatgatatttcttccccttagttttatatgaagtagtttttttactttttt

SEQ ID NO: 96569 - DNA, 571 bp, Cannabis sativa
agactttttaaatggtgagggagaatgcagacttattattaatggcgaagcccataaattaaaaaagaagcaatatatgtaacaaattttaaaaattatttattttcattcttatttaaattttacatgtaatttaaaaaaaaatgggaggggtcatacactctctggcctccttagctctgttattgaattttcgtcatatgggtaatacaccctctcgcgttgttttgtctcctttttaggtggaatttaagtgattacttactatgtttagtttatttttattgtaggaaaaaattagtatgaatttttcttatattcatatacattctgatttttttattttatactcgtgttactgaattatatattgtaaattatttaaaattttaaaaaatatcttaaataattataatatataaaactatgaaaaaaaaataagtaataaattttgttaagtactaaaataattaagagttataatagtgtatcctattttaatagaatttaaatttattgtaaaagactcaatagtattttattaccttctccattatcactttaaatttag

SEQ ID NO: 96570 - DNA, 716 bp, Cannabis sativa
  modified_base (675)..(676): a, c, t, g, unknown or other
tagcggttctcttgtgagtgagggtgcctatgaccccaccaaatacgtaccgttggtcgagttggaaaatcgtcaactccggcgacatttggaggaggcaaaccaacgaaacgctgagttggaacgggaggcagccgcagcaagggcgtcataggaaaacaacacacaaaactaacctgatcttggagtgaggaggccacgaggcagacctcacaaagcacaaaccaggaggtaggaaacggcttaggaaaacccctagaacactcaagaggagcaacctggggaaactggggatgcacttgaagatgaataaccagatgaccaggcacctcgtcaagaagtgccacgtagaccccggggatttacaacccaagggattggaaaccgtgatttactagaatcatctcccaggaatgcgagcagaaggcaatcccggactagggaacaggaaatccctcgtggtaatgagagagatcctaggactcaacctgggataggtgggttgccactgaaacaccgtcaaaacgtctttcttaagctgataaggaaggggcacatacaaatcccagcaggggcatgtatcaacccgttcctaaaggagaaggccgatacgtgatgaggctgttggaatatattttaccaggatttaaatttactaccatgtatgttatttannatcctaaatatgaatctctaaaaaaatgtaaataaacaca

SEQ ID NO: 96571 - DNA, 900 bp, Cannabis sativa
tccggagatcatggctacccttccgttgggtctcggcggcaagccaggaagtttctgggtttctcctaggggagcgactggtgctaatgctccggctacaccccctggtgctccttggggcaaaggtcttgctgccggaaccggattgagatgaggcaaccagttcttgatccattcgttaagatgtccaaatcggatcaagttttcgatctcgtccttgaggtttttgcattcattggtgctatgcccaatgtcgttgtgatactcgcatcttttgttgggatccctccgggagctatccctgtacagaggaggtggtctccggtagtgcatgttttgcctggtagagaaatacacacgctcttgggagtccgttagttctgtgtactgggtatattggggagtatacccccttttctgtcgcttatcctccgtccgatggctaccttttgaggacctcttgccccgagagccttgagagggacctgctaagcttgcggtcggagcggagtgagatggggcttgtccgcttatcctagacgggttcccaaaatgagaagacgcaggggctaaggcctgaccctaactatatcccggggtagcggaaaattgtatgccgctcatcggtggagcggcggctggtaagattcctgggagcttagctccgggtacatattccgctatcccggtagggtggtagcccccgtaggccactatctgagcctcttctaggttgatgtatttttggactcttttctggaaatcttgaaggttggaggctccttcttgctgtaactcattccagaacggagtccctttacagattcttgcttgaagaagggcaagctgttgtccgtcatcaactttcttggtctttgaggcttcttccttgaacctctt

SEQ ID NO: 96572 - DNA, 661 bp, Cannabis sativa
aggctgcccaggctacccaagattgggaaaataggtttgcagaaatgcaagccaggattaataaacaagatgaagagatcaggaatttgagacaatagggtgctcctgcaatccctgctccaaaaataccaatagctcctgcccctactgtgcaggtaggaccagttcctgcagtaaactgaatggcacccctgtatgaaaggttggcacctccagttttcctgtgaggtcccgatgttattaaagtcgagaagtggctaacagtgattaccaaaattttgaactttatgggtgtcatcaacaatgatagagtggtctgtgccacattccaatttcaagaagacgctctagtgtggtgggacatgatgtccctgactcatgatgttacaacaatgacctaggaaatgttccgggaactgtttaatgcaaaattctacaacgaggcagtccaaagcgcgaaaagaaaagaattcacttagttgactcaaaaggaaaatatgagtgttactgaatacacgactcagtttgactgtttagcaagattagcctcgagaatcgtgccaatcaattttagcaagaaagagaaataccttgacgggttgaatgcaaagataagacatgatctaatgatcactagtgatgacaacaccacctatgctga

SEQ ID NO: 96573 - DNA, 538 bp, Cannabis sativa
ccccttattgttgaggggcccagtgaaagtcgaacctttgaccccaagcgagagaggagatcaataaaagcttccctaccactacaccacacaacccttttgttggtaaagtgtttccttacgtgaatagtcttgcaaattgtcgaccatttttcatgatagttataaatttaaatatgacactcatagaaggaaaggatagaaatagaacggataatacgcggtgactgctcccttatgcccattcacattaattattttaattgttatctcctcctccattcatgtatattgccaattaatagtagagtaaaaatattttatataattttattacgagttatttgcggcataacctccttaagtggtcaggtatttgtaactaactcccaattttaaaattttggtggtaaaacctcctaaaccaagcttctgttagcagttagccctgtccgtccatttttgggtgttaagtgacaggttggaatgtctacgtgtacacaatgtacacgtagcacaatttaattagtccacataa

SEQ ID NO: 96574 - DNA, 515 bp, Cannabis sativa
ttaattaaactcaaactaataacggattaagagttgatgactcacagtctaatagtagatgtaaattgcagcttaaatattaagttttaactcttaaaaggagtgttcccgttaattttttattataattttttagtctattttcatatttaaagacacatatcaattttttttaaatttttttttttatgacaatgtttattatagttacacaattattcttgaaaaattttatagcactgaaaaatatatttgaattttttttgaatatgcgtggtagactagaatattataaattttgttttcggtagcgtaagctatttagaatttttcaaaaattccaacattaattttaagaaattttcataagaggttctaattagcacccatttagaaataaatataagtaatgggaaactttgttaaatatgtgataaaaaaaagtaaatattattttgtactttgtgtttgtaaaagttattagttagaccatatgttttattaaataataaaat

SEQ ID NO: 96575 - DNA, 703 bp, Cannabis sativa
tgagctgtacctttgtgggaagacaattagagcaaactctccacaagaagtctttgactttagggggagttgtaagttccacagagctttccaaaaatcagaatggtggtcattgccagagttgcttttaagctgctggagtataagtgatatgcagtcttgacagagtaattccccattcgatccttataccagtaccaatgatcggtttcagagtgggaagggagtggaatttgtaggataaggttcttatctctctcggtgaaaagatcatttagaatatcaatatcccaggccataccatcagtttgcataagggtattgacagttgttccaataagagcagggtgagaggattgaataagaccatcagtatcattcggaagccaaggatcatttagaacattagcagatagacgagatccaatgcacaaccgactaccagaacgaagcagaggtttagcctcaaagatgcttctccaaatgaagctcgggttacttccaagctcagagttgaaaaaagaggtttttggatagtaacgagctttaaaaattcttcccacaagactgtcatgattaaccaggagcctccatccttgcttgccgagaagagcaaggttaaagtctcttaatcccgcctttgaacttgtgtttgctgagatttttccagcttttccaatgaattccttttgatgagtctttt

SEQ ID NO: 96576 - DNA, 837 bp, Cannabis sativa
  modified_base (796)..(806): a, c, t, g, unknown or other
ataagatcaattgtattgctcaacaaagcattatatcatcatatttacaactaaactaatgaaatctaaaactaaattaaaattgaagaaataaataactattagaaataaatagaacaaacccaaagagtttttacgtggttagagtgttaacaaactttagtcaacgagtcgatgttattatgtatttttagatagaaaagccttgggaatacaatatatgagtgtaagttctctatttttgcttgagcaagtattacaagaaaattcaacccttaatccaaataaattattgggtatttatagtgtttacataaattatatacttagtttttttttttttctaatagggagtttatattacatgaaaatacataaagttgggctgtcttcgtgaggcccaggccataaaaagatcgatgtgctgactaggcaaatgagatatgattaagctatcaataccgtgtcccataattgcagacaattatttatgaattaattgcttgatcttcattttaggtaatttttatttttagcttgatacgatcttctattcaagatttgaggagaatcaattcctaattcagtgtgctcagataaaaagaaaaaccgaattagtttccaaaaacatgttgtctggccctctgaaatcacgttgctggaactgcttccagatacaagctgtccttgacagaagcttgcctgatctatgaagtaagataccttcttggaatgtcttgtttaacttgagctaatatgaaaataaaatctaaataagtattgaaattaacataannnnnnnnnnnaaaaaaattaaaaaatattaagagtaatttt

SEQ ID NO: 96577 - DNA, 1988 bp, Cannabis sativa
catctcattgtttcttctcaaaaggaaaagaaagtgaattgtcgatttaaaatgtcgatgataatatgatgacatcttgtaagttaaacaaaaaatactacaaacaataaaaattaaataaatgaaatttaatattgataagatggaatgaagcgtcatgattattgtaagaagaaaagacaaataggaccaacattttttttttgagggaaaaataggaccaacattaaaggtaagtaaaacgtgtgattgatgttgaatactatataagcaaaaaagaggaatattattggtagattaaaatatgttctctaaaaggggtaatggtgttgagcaggagaataggtagagtaagatggggtcatgacaaaggaattgggctcactggaggcatgaagcccatttggggtccttggtgatattgggccttttgacattgaagccatcatggtggccgacatcattgcactgcgtccaagcgctctttcactgtgtcttctgggccctttttcggcccatttgagctctgcttgcctcatcacagtcggataccttgaacagcaacatcctgtctcccctgctctctgaatgtacctattaagattcatacaacatcatttcccttggctcaaattacattaatagaatagagtgaagatatgtgcacaaaaatatattattatatgccaaaacactatacaatatagttaagatttttttgaaactttgggtttgttttagtaggatgtgatcggctgaaaaaaaaaataccatacaatatagtataggaaatttctacaactcaccttttaagggtgcaccatgcactatctgcatacgagattttattaatctaatttttttttataattatttaaaacatcttttaaattttcacaaattttagaaaatatagtataccgaaaatatggttcaaataatctgttatacgcatgtaaaatagactatttcaatcttattttcggcgtgttaaatttttttatatttctcaaaattttacaagatttcataaatagctacaatatagatgactatgaaagaaaaattggactgaaaaatcatctaggatgccgtaaccaaagtgtatcgatgcactttagagagtgtattgtaaaattattttagtacatattttgtacagaaaccataaattattaggtgcttctacaatgcacttacttaaaaggaatgcactgatgcactttctacctgtttcggtattcagaaaaagtttttagtataatttatttttttcttttatatttgtgtacgttataattatttaagaacattctactaaattttaagaaattcagaataatttacaatataaaagtagtgttcaaatagtatatttcacttacgtataaaataaaataatcacacatgtaacactgttaaaatttttttttattttttttttaaattttacaatatgtctttaataattataatatttatgtatgattataaaaaagaaattgattaaaaaattattttgaatactaaaataaaaaatgttcattgacacatcgccatggtgcattgttttaataaaacagggtcgttgaggtccccgcagttgtgtttgtggtccactaataataatagtgtattaattaatttgtcagttaggaatactttcctagtatgagaacaaattaaaaaaggacggcaaagcaagtacaatttcttattccttctcacaaagtcccctttgtatttctcataaatcataataatatgccggccatcttataatacaaataatttttaatcccagattattttgtttagttgggagatgcatctcgtatacatttacaattgtcataattattaaaattatttaatatttttaatttgtatgaagaatttcgagtacatgaaattaagttttgttgtgttcaaaaaaaaaaaagaaattaagttttgttttctttaaaaaaggacgaaattcataaatg

SEQ ID NO: 96578 - DNA, 3688 bp, Cannabis sativa
aatactatgttttagtcacaagtcacatttagtcataaaaaattatattgtgactaaacaattatcacaaaaaataacagctttcgtagttatttccctttcattaaaaaaaaaaaaaacatccatcattgaatcatactataccataattatctcatttacacaagtgtgtcatactcacttaaacatggccatgcaatgggcatgacaaatttctaaataataataaaagttataataagatgcacattaaaaactcaaataattaatgtgtaatttgtttttttttaaaaaaaaaactaatcttactttaaagtatatagacatgtgcctaaaaagacatactacattattattgtatataaattgtttttgttctttttaggatgaattgtgtataaattctgactggctttaataattattatgcatgcataatttagttgaaaggttagaatttattgtttttggtagataaataaatccataaaggggatagaactataactacaactagtcggttcctataaaaaccaatcaaagcaaacaaattcatcaactcattattaattattgccaactttttatttttattaatttatttttcttagtttggtgaagtccaaacatgtgttgtctataactacaaaaagtgaaaaaaggcttctcctagttgtgttgtggtaggcaattctcatataatttcatttcaaccaattaaatcaaatcaacataattaactttaaacataattttgtttttcttctttctaattgtcttattatttttggcattgctattagacacaccctactatctattcctattagaatatatatagtgtgtattttgcaaataattatcaaatttttttataataattttattaatttaaaatatgtaaaatagaccgataaaatattatcaatttgtcaatttttatcgatgttaatttatttttgtttattgccgagctttataatgaactttgtccttaataaaaacttagatatttcccgaaaaaaaaatgtgtaaaatcatatacttattaataataataataaataaaacttcataatactttagtattttttttgtcatcaagatcagacaatttaaacaattagtaggtttgtctttggacatagacaggctaagcctgtgcttagggcccacctagccccggagcctgaaaaaaaaaattctattgaaaatatatatatatatttactaatttcaaaaattttatatttttttaaaataaaggttcaattttttttttcttatgacccactaaaatttagaacaagccctccaattaggttccatctccaatatataagccaataatatatagctaagaaactaatcattttctcactatttcaaaacttattatttttgaattttacaaaagattggtcggttgtgattagaggaaaaaggcatccaactacaatatagtgagtactactagtagtagttaagtgattatactacatatgcatgtattgaatttcaacattagcatgtgttgtgtgttgtgtgtgttgtattcatacacaaataactataagtgattgaaccctagcatattatttccacaaacttatccttaccaacatatctatgctgattaatgattgtgcctaactaattttagttgtgggtgtctcataactaatttggtttttaagattcttcatacacaaaaatatattgttcttcaccattattaattgagtattggtattaggcacctgtatattgaaaaatatttcttttttttatgttcattaataaaaaatattcttatattattttttatcaaaatatacctacttttttgagtgagttgtcaatataccctcactttctacttaagtctaccatataaattacattaacctaaagggtctaataagtgggtatatctacaaaaattataaaaatagaggtaaaaattaaaacaagtaaagtaaaatgggtatacaatgtaatttcttccaaaagaaataaggattatttcacaaatacagaaaaattacaaaaatacggtttcacgaaattttaaatatttttacgatttttttattttatttacagaaaatacgatcattttatgttgtattcttgttaatttattattgattttttgttatttatatgttttttttttttttgatgttattttcatgttacttttacgtagttttcttattgtttttatgttatttctatgaaaaactgtaaaaaaaaaaataaaaaaaaaaactttaaacgtaaaaatatattttttttacaaaaaatagtgttttatgtaattatcctaaaaaaataaaatggaaagagttttaaagagtattgatattacttactccatagaggaaattacattatatactcactttactttacatgttttaatttttactttcatttctatattctttaagatatacttactatgatgtctctattatatcccttagattaatgtaaattatatgctacacttaagtagaaggtgagagtatattggacaaccttctcacaaaagtagatatatttcaatgaaatttgatataagagtatttttaattaatggataaaaaaaaataaaaaaaaataaaaaccttcctttaatggataaagaaaaaatattcctctaactcatcccatttgttttgtatacattttagctactgaactatagttcatgaatgatgaacgttttttttacatgagaatatgggagatctatgtgggcctcaattgggcttcacttcattaggcccataagaactcagtgattaagaatgagcacctcaatagttgggcttcaatggactgacccagttcttcagcagcagccagcccatggtattggaataaatacaagaatatgaatatgaattgtttcatggccaaaataaaagattttaaatgacataatctctcattaaactaaatataacttagctattactaagtattgaaaagaagagctttgtcaagaaaaatgtggcaaattgatacatacataaatacataagagcatccaaattaataaattagatgtacaaattgaatctcttagaactaaaatatgtaacatttagcaactaaattcaaatatataagcatcctaaaaagtcatagaattaaatactaataaaacttggaaagtactgtaattatttcaaaataaaagatgtctatctaccaagaaaaaaaaaatatttgaagatttagatactaattcgacattagtaatctgttattttaagaaaaaatgatatgatactaacgagtaactagttactactattaattttttaaaaattgaatggaaaaaaatcccttaaaaatttaagaaaaagaaaggctaaatacacagttttttttttttttttaataaaccaaatacacaaagttaaaaatcctatacttattaaattcatattatatatataaaaaatataaaacatatttaatgtaatttctaatcattccataacacatccgaccaattatggttgtcaaaagtgacatttgcatatggtcaatgtataaaaagattggaaattatagtaaatgaccccaaatcataagactatgttagtttatgtcctcatttcaaaaaaaatatagcaaatgaccctaaatcataagattatgttagtaa

SEQ ID NO: 96579 - DNA, 588 bp, Cannabis sativa
aacaaaaattgaacaaaaaacatgaaaaaaaaaaaacatattacaaaaaaactataagttaaaacatgaaaaatcccgagacaatatataaaccaaaaatcaaccaaaaaaaaatacatataaaacttcacatatgaaagaaatttgaacaaaattattaataaacaaataaacaaagaacattgaacatacaaaaataatttgaaaaattaagattgaaacccacaacatcaaatcaacaaaggaaaaaaaaccctaagcccgaaaaattaattaaataaacaaaatacaaatagataaaaaatcattttaataaaaaaatgaacaacaaaaagaaaacaacagaacaacaaaaaaaaaaaaaatacttttctaggacgaacagcaacgaaattattgtcattgtcatttctcttcctcttagctttcctagcatcaccagatgatggctcaccaacatcaacaacaactttggatttctaattaggaggtttcgaaattttttgagcaactgatttgggtttagattgtttaataggctttttttgggtttctttagagaaggggacaataaactcgaacgagatc

SEQ ID NO: 96580 - DNA, 736 bp, Cannabis sativa
tccgtatttttgttgtttttgtgcacgtgaaattaaccctttttttttttccaattaggtgtctttgagaaaaatggtttttgtaagaaaattgccttttctcaaaatttacttctatggacatttgatttgaactctacccaagtcctattattttatgaggataagttgaggaataccttttttttgtatttattaatcaaaaatatccttatattatatttcattaaaatctacccacttttatgagtgggttgtctcatatatctttgtcctccacttaagtgtagcacatgatttatattaatctaaggggtataatggggacatcatttataaaagtaggtatattttaaagaatatagaaatgaaggtaaaaataaaaactaatagataaaatgggtaagcaatacaatttccactattctattattatattactcgattttttgttcttaaaagtagtctatggctaaatgtgtggataaataaagagggctaatcttccagtaaggaacaattaagaaaagtgacatttttgtaattagtaaaactttagatatgtgatcttgtaatgaacttgtctccttacctatttgataactaaacaagaatgagaatgtgtccaattttaggcatagcattcttgtgagattcttatcatgcttaaaattggtatttttgtaaaaaggaccaataaaatcattttgatagggcacaacccaaaaccttaaaa

SEQ ID NO: 96581 - DNA, 546 bp, Cannabis sativa
atgaaactttgctataaaatttatgacgatactacgagcatctccatcaaataagtgatgcaaaactaaaatatatctcacttagaaaaaaatgtgctccaattgatgttttaaaaggtgatgcaaatttgagacatagtgatctaatttagcactacttttgtgatgatgcaaaatttgcatcaccattaatacactactttttttgtttacttatgtatcatttttattattttattaatatatttagctataatattaaattatgaactatttatattcttttctgttgtttatataataaaataagaataaaattaataagagttattatttcttttatatttttattaaaaacattaaattttgcatcaagctatccaattgtacgttggagcacaatgttaaaaattggtgcaagtataaaacaattttattttttgtgccaaatataactttatttttatttacatctccgattgggtaatttttcttttggtgttaatttttttgttgtcttaatcatatctttttctttttctcctt

SEQ ID NO: 96582 - DNA, 646 bp, Cannabis sativa
ttaatatataaatcacataattttaataacattgtactaattgtctatttgatatagacctgcgtgttacgctcatacgcctattgatgtctatgtggcataaactcacgtgttacgcttacacgtctatttacaataaggtcatagaacgatttatctcggttttaattttcgagtctaaccaaattataccttgaacgcataattctttacttcaacatataaagcaggcattgtattcagaattattatattactagggtaataaccctagaccatataaccgctcactttagggtaataacccctagttctcatttaatcacaattataatattaaacatgagcaccaccacgcttaactctatgtgctaactacagtcttgttagatgtcctaagtacgtggagattccaaatccccgggtgctcttgaacaagtgctggtaatcctagtcacaattcttgggattcacaaatagggttaatccataaataaacatataaagctcggaacgagctttctaacgataatcataacaccccaaacagagtttggatttaaaagttatggacaatataagttcaacatgcaatccgcccaaataaacccaggcgggccgcagcactccccaggcatgccgtggc

SEQ ID NO: 96583 - DNA, 567 bp, Cannabis sativa
gaagaccaattttgttatgaatcactgtgtttggtattatatatatacaagttaaaatttatttgaccttattgaaaatttaacgaaattcttatactcgtgggattcacgtgattttcatgtgacacttcatataaaaatccaaaaagacaattaaactaaatgataagttagtcttttatttggacgatatatatatatatatatatatatatatgttcacttcacatatatacatagactcaaataatcgacacttttattttcatcgttttcctaaaatatttatgacataaatagttgatatattttagtttcggacacttatataattgtttttttatggacttttatatatttaatttttcttacaatcattaattactaccaattccattataaattaatttggttgaataaaataacgcatgttaatatattagtggttcatttattttttattttttaaaatatctcattaaattattttaaaataaattacaataaatattaaaaggtcgagcagaaaaataatagaaaaaccccaatatatttttatttatttat

SEQ ID NO: 96584 - DNA, 1238 bp, Cannabis sativa
  modified_base (286)..(299): a, c, t, g, unknown or other
atcaaatccttagcttcaatccagaaaaactccaagatttgagggtgattccctttggttttgccccagccgaaagagaaagagagggagcttcaagggtaatgtctttattttctatttttcttgattttcttcaaatgggaaaaggattactaatcaatccttgcagcccttaggaattgctaggtgtcactaaaataaccagccacctaaccctcaaataaaccaaaagactaaattgccctttaacccaaaactaaagttttcaaaagctaggggtaaaatnnnnnnnnnnnnnnaccccgcttaatcccgatattttattttctctaaaatatttcccattaagaaataaggttctaaacttacccatatgatcaaactagccatccattgcattttccgttatcgccgagcaaacatcacaaaaataacatatttcacacataagctagataatacccccagagtttaataaaatctccgaaattgagaaattataactctaatatttacttctaaatattggggtccacaaataattaatttcataaaataacagaaattagtgctaattgccttttctaatctaatttactaaagcggtcattacagttaatcttgatagcgagctggatctcgtcatatgtctttccaaggtggataatacttttactttaaatctgacaactgcagtttctggtgacgagatgatctttttcacgtgcatgccttcctacagcgagggggatgcctcgctatctctcgctttggttcacccatctattatacttagtttgtataccgtacattatatgctaagtgtctccattgtcattatatctcctccacgtaatgagattagtacctcgtcttgtacacctgaagctacatggtttctcattgaggcacaagacaacagtttgtatacttttatcttgcataagactattcagtcaagcgagttgtaaacatactctgttaattatgcttttaacgagttattccatttcaagtgtgattatgattacgtgtctgagttcttattcttcgcagcttgacacgcgtcttcctctgatgtgctagccgaattcgggtataacacacgttgtagcttaaattaattagctagttagagatattttttaaacttcaaataacaaaaaatttcatagatttgttataaggtttggtgtttaattaattattaattttgagttaaaaaaaataaaaaaaaa

SEQ ID NO: 96585 - DNA, 529 bp, Cannabis sativa
atcaaaacccacacggacccaaaacccaaaaagttcacacaaacgcgcaggttcggtatgctaattctatacatccaaaaacccgaaacccgtcaaaactcagccgatgtgcacccatcatatacaacaaaatatagcttatagaattggtattcgtacaaaaatgcacttttctttttctgcactttaaattgttggataattaagtaagttgtatttttataaaataattttttatgatacgtacataaactctatttcgttaccaatcttgtatttgtagtaaactcagtcaagtttatctagtcttacttaagtggaagttgattattattaatttcattggtcaaagttttttttacttattatcgtgtttgtttaactcgatagtcaatataaattttcttttctactttgtaacattttttttattttggctaattagtaattttttccttcgaattttgacatgtactaaatagtgctcctgaatttttttagccgttaaaaattcccctcgaactattga

SEQ ID NO: 96586 - DNA, 573 bp, Cannabis sativa
attacattgttcctcatctcctcccctcaacatactaagagtagggcactcttgtagttgatgatctgtccatccacaaatgaagtctggttctctcttttctgcttttgcagccatctggagtgctttaccttcttgagttttgaaagcctcaaattgttttttgaaagctttcagttgagctttcacactgtcctcctccttcaattggtagacaccggctgtttgtggcttgtccgtaagacttcgctcactccatgtgtaggatttttcagagatttcttcaagatattccaaagcttcttcgagatctttctgaaagaagtcgccattgcacatcatttgtacgaattgtcttttgtcgactgtaagatcgtagtagaaatagctgacaagatgccaactttcatatccatgatgcgggcactgacccatcaaatctttaaacctctcccagacctgataaaacatttcgtggtccttttaggtgaaggtagagattttcctcttaaggctactagtcttatggggtggaaaaattttagagaaaaatacttttgtcatttcatccca

SEQ ID NO: 96587 - DNA, 642 bp, Cannabis sativa
ttttgaaccgtcgcctattcttcccgttttacgacggtcgtataggcgacagttataaaaatcgacgggaatactttaaatgactgtttaaaaacgtcggaagagcctatttttgtagtagtgattctagatagttatggagttatgcttgcttcagtcatttggcatatatggctcactattttcttcttaaagtagttgaagctcttgccctttgtaatgtgggtgtttgatgctagtagcttcgtttcaagatgttcactttgagaatgactaccttagtgtggttctcaaatttaataatcaaacatcgttggactcttctttagtattagttttttgtgatttctgtcgtaattttgtttgtctcattattctagaacagataatgttgttgcccatacctttactaagtatgctttattagttgttattaacttaacactgtttggtggccgaattattctaattgtatccataactttattttggctaaagtcattgatcaatgaatgatctttgctctccttccttccctttagggttatttgctgtggttgggggtactgtgtgtttcttctcaaataataataataaaatttaggctaattaggattttttcccccgaattttgatatgtac

SEQ ID NO: 96588 - DNA, 591 bp, Cannabis sativa
gaagccagggttcaactcggagccatccgaatagaactgggtgaagtcaacaaaaagcttcttgctgccgagaagaaagtggccgagctggccaaggatttggaggcttccgactaacttgaggctgccatgacctccttgtccaaagaagtgactgacctccaggaagaaagggaggttctttgaactattttccgcatgttagaagtagagaagaagtccaaggaagaggagcttaatgctgaggtagagaggctcaaagggaaggtgaacgccttagagacagccggtctcgagattttttatgacttttggaaggctaaccctcaggcaaattttgattacctgggcaaggccaaagacatgtatctcgagtactacgcttcccaagtggcatatggagagtccgaggcaaccccttctacctccggtctgaatgctgacatgcctcctgcctagacaacagatcctccaactcctaacggcccagaggacctgtacaaggagtctgggactctagctgtctgaacatttatctttctttttatatatatgtccggccataaggccttttttaagacatcatgatcg

SEQ ID NO: 96589 - DNA, 711 bp, Cannabis sativa
aataatttttcataattaatcatgattaactgctaattcccaaattaaactaagcgggctttacaaatgatgtccattttgaaatctttttataacttctctttctcttttaccacataatataatataacccactattttttgggtaattatatgggcaacacatattggggttgacctgagagcatctctaatagaagacaatagttatagttatcaaaatacacacattatcttaaatattatttttttttattttctcttacatccacataagatttatcttgatctcttaaaaaaaaatattctaataattgacaactctaaaagttaccaaccatatcccacatcacattgaattaataactttttaggtaaaaataactttttttctaataaaaaaaaaatgccatgtggtcattctatattgagcaaacacttgacataaaattactcttgaaaattagatcacattacatatgtagcaagaccattctaatagagattcttccattggagttgacctaacaatcaaatagttaagatataaaaaatgcttaaaagtactgtctaccaccctcctaagtgtcatattgttattagtgtaattaagtattgggtctcatataacttgaagaaatagcttttaaggaatatcgataaccaatcaaaaaacgacacttattgaaagtgctaggcactattagtgtc

SEQ ID NO: 96590 - DNA, 587 bp, Cannabis sativa
acaacaaaggttgtttggacacaaggcaccacttgcacttgttccacatctaggaataactgcagcgactatcccaaaccaaacagaaacgcagaatagtgagaagaaaataagtacaagaggaatgtttaacttcattattatgattttactttgttttaatgaagagaactagtgataggtccttatttatagtgtaatttttggtgttattgaattttaagtgtatgtgtttaaatattattatattattaatattatgataaattagctgtttcttgtgtcaaataataacaaaccattatatgaaatttcattgtgtatgtgttttgtttttgactatttctcataaatattactacaatgatgagaactaggatgagaaaagcaatttcctttttatttttgtaagtttctatatggactcatatatagctatgcatttatttatgtagtaagaaagaacatgaagcacattttttttttcaagtgagctatatttctttttatcggtttacttaattattgttctaaaactgttaagcatagctaacattttattgttaagtttactttgtctattgcta

SEQ ID NO: 96591 - DNA, 506 bp, Cannabis sativa
ccaaaccgaactgtgtaacctgaaatccattcatagttgtcaagtaatgaccatgcaaaatatcccttcactttgactccatccctacacacaattaaattcataataaatttaattttactcaaaaagaatatatattaattaattatataaaatatatagttaaatgtaattaagagataattaattacttgatggcctttttgaggtaactaagatgtttgaagtaataatcaactctttgcttgtcgttgagtgcttcttctagagataacttgggattattgaactcatcaatgcctataggtaatcaattaattaattatatatactacaaaaaatattatttttatttacaacaaaatttatgacaaaataaaaaaaaaaatatatgattgtaaggttcgtaattaaagatattattagtcacaaaagttacaatttgttgtgactaaatgtgtttttaattataatatttgttgggactaaaaatcatatttagtcac

SEQ ID NO: 96592 - DNA, 608 bp, Cannabis sativa
cgtgcacggcacacgcacactcttgcactttattcaaactttttgttgtaataaaatatcaacattttattaaaaaataaaataaaataaaagatcaacattttataaattataaaccatttatttaaatggaaaatgtttcgtaataaaaaaaataaaaaagaaggtatctctatctattctaacaagtagtcacaatcgactttctatctcaaattctcaatacatggtttagatgcgttacataatcaaatggggttgtaattattccattgttatataaatatagtggttattttgttaaaaatatatatagtggttattattattattattattatgttattgacaataagcaataaccacttagactatttttaatgtaaattttggtataaagtgtaactaaatattatctttgacctattatttatgtaaatatttaattaaaatttaaagctattaaaaaaatggttttaattaaacaaatataaaataatttaatccactagtttgaataattatttgttaaaattctaccatattttctaaaataatttatttgtggcatagaaaaattcaatatatagtatttctgtacggatttt

SEQ ID NO: 96593 - DNA, 555 bp, Cannabis sativa
taaagcaaactgcagagataccgatgttatattataagaagcgatgtcggtgtattatgatttagaaataagattacacccattattgctgtcttgtgaaatggtgtagggttgcaagagcccccatcataccaataaaaggactggcaaagacattaccttcgttttgggccgtcatctctgatgcttatgtgagttgctatgtccacatcaatctgaggaattacaaggtggtaattagagtatagacaataatggaacataatcatgctcgtttcagcaattgatatacatccatactattgcttgtgaaatattatcaaacaattctgctacaatttgtagacaaacaagatttaatgcattacacttaaagaatacaaaaggattaggatttttttcgtgaattgatggaaaaacaacatatgtttctacaaatcaatgtgatagataacaacatgcctagcttgaacagttgaatttatgccaaagtgttgtgatttgagctcgtaaatacacatgaacacacagcattaccaaacaaaaacacgatag

SEQ ID NO: 96594 - DNA, 507 bp, Cannabis sativa
tatagtgacgcgccaagcgtgacaacacaaatatatccccactcgcttggcgtgtcactatatcaagtaatatattaaaaaagtattttaattatataaaaaaacagacagcacattaattagaaaaaaaaagaaaaagaaaaagctggtgccgcacaaaagctctagtaatatatatgtaaaattaatgcatttaaattttaatatgtgaaaaaccctaacaaagtaattctagttttagtcttctttctctcccatttttccttctcgggcaccgcacgaagaggccctgatctttctctccctgttttccttctcatctcaggtgcataaagaggaccccgaccatcttcttcggtcgagtagtagcggctcgccttaagtgtacccttctctccacttaccttcttttttttttcagatcaagttttcttcttctcctcttttcttttctttttctctgtaaatatttctttattattgaaccttgatgtccctctcttttct

SEQ ID NO: 96595 - DNA, 1193 bp, Cannabis sativa
ctttctttaaaccttttcagtctaactggagatgacctcacatatctcaccgcatttcgaatacttgaaattgcttcatttaactctttcaaaccatcacttactatgagattcaaggtatgagctgaacacctcatatgaaacatttcaccatttaatggaactgtattgtccttttccaacaagtgccccttcaattttcttagtgcaacatcatttgaagaagcattgtcaactgtcactaaaatactttggagataccccactcattaagacaatttatcaactctttccccacaagctcccctttatggctaggaacctggatgaagttgataatccttttttgtattttctaattatcatcaacccaatgtgcagtcaagcacaaataagaaatattttggattgttgtccaacaatcggttgtcaacgatactctatgttgtgccaaaattgccttcaattctttctttcaatccaaaaacaattgataaatatccctcgctacagtgaaccttgatgggaactggaaatcatcaaagaaaagtctgataagcttttgaaatccttttccaccaatgtgtcgaaaaggtagctcatccatgattatatattcagctattcctttccgaacaaggttttgattaaatcttaatggcaacccacttaaagcaacttcttcatcattgcaagttgttgttctctttttgataaatctatctatagtagattgttgtcttttatttttctcaacccagtcattaaaaggacattttttacattttctctccacatgtgcccataatgtgctagtcccattcaactttgtatctatcgcataatcggtaccacaataattgcaagtagcccttggcttcatgggatcacaatctggcaacatagtataatgatcccaaacactagatgttttctttccaatcctttgcttcttttccgatcttgcactctctttttccttttcacaaccctcgttttcgttgttgttgttgttgttgttgtccttgttcttttctttgtccttgtccttgtcttgacgatcatttctcttcttcgtttcattcccttttcttctttctttcattgactcatccctattagaactagacaaattagtttctgtagtggtaaagtcattgatgatcttgttggaatttattttaccacgatct

SEQ ID NO: 96596 - DNA, 1821 bp, Cannabis sativa
agaggcatgagaactagatatggggaaaggttgtttgtggctttttcctaattggcatgctttgcaaaatgaaagctggtttatggtgcctgtgtggggaacatcatgtaagattttggtcaagatggcattggagggatgccccagcttattgtgccaattagtaacattagacatatagcagacactattagcagtaggagtgcaattagacaaatcaagagtattgcatttattcataggaacatttgtacatgatgaattactgattacattgtcaaaaatagattgactagagcagattaaagcagaaggtgtacaaacatagccaagaggattttgaatgggaggtcttgagtactcttcaagcacgtacagtccatctttaagtgttcccttgagcagcactttcccagtgtgtttgtccttgacaaagcaacatgttttatgaaattcaagaaacacaaagttgtcatgagtaagttgtgacacacttactaaattcttggtaattgagggaacatgaagaactgaatttaatttgagaggtaaagagttgaaagactgtaaagaagttgatccaacattagagatggatagtttcttaccgtctccaacaactaagccttcatgacccgtgtaaggagcagcagattccagattttgagtgacagaggtgacatgatttgtggcacctgtgtcgacaaaccagccagagtcatctccaaagtcaggcagaaatgtggaagcgtaggcttgaggatcatactcaacttcttgtttagtaagatagactcgaggggcagactaagaagtattggattgctgatttgtggctcctggttttgggggaacccagttcttttcgaatcgataacgacatactggtgcagtatgtccaaatcgaagacagagttgacacagcggtctattgttctgagttggggcacgataacctcctcttgtgtaattcttgtttgcaggtgggcgatatggattgtgtcatgagccagagacagccatactcgcctgaagcttcatattgagatcaacagcagtattgtgatgatctaagcgactttcatgagcaagaagaagtgattgaacttcttcatatgtgagatcatcactgcgcgcagtgataccggagacaacgaagtcgtatttaggaccaagaccgttgagaagttgtaggatcaaatcttgatcttgaatcggagagccagctatagccaatgaatcagcaatgttctgaactttgtcactgaagtgagatattgattgtccgcctttgcgaagcgtggagaattgacttttcagttgaaggagacgagccttcgactaacttgagaatcgctgttctaaggcacgccaaacagagtgcgaggaggtgaaattggctactgaggcaagcacagcttctgtcatggatgcacgcagccaagatagaagtaattgatcttgacgtttccattgatgaaacagaggattagtttcgccagaaaccagttgagcaggtgggggaattcctacaagaagtatttcgtcaagatcgtgtccaatcacagtgggaagaacctgtgatttccacgacaaaaagttagtaagatcaagtttaacagtaagagtagatgtgagggagtgagaaaacagattgttcatctgttaaggacgatcaacgactgcctgagtaaggaccgtgttgttcgaaggagctttgggagggatcggatggcctgtagacgaagactccattgaagacgttagtcagaggcgagtgataccatgtaagatttcaagagagatcttgaaatcagagag

SEQ ID NO: 96597 - DNA, 638 bp, Cannabis sativa
aactaatctatttacaacaattcattccacattttatcctccttactaactttttttgtcaaaaacaatctacttctatatttgacatcattcttcactctttttataattgtatcaactatataacactttgaattccaccggtttttatttcgtttttgccataattggtagactaacgctgcaatggcagcagccatcaccctccttcggctctttgagagctttgatcgggccaaccacctgaagagatgtgaaatgctacctgcccttgtattccatgctagccaatttttgatttctgttagacattttaagctgaaactacactcaaaaaataagtgttcagttgattcctcatacatctcacatattacacattttgtatccatcacaacattaaacttttttagtctagtctttgtttggagacggtttagcaccgaaatccatagaattaaactatgcttcggtacattaagtttattccaaacaacatttgcccaatggacctttagttggtttccaaccagcattaataaagtctatcaaatgttgtatgcacctgttataagtggttgaaagttggtgtctttgagatgatctttgacaaccccaatacgcttccgataccaact

SEQ ID NO: 96598 - DNA, 886 bp, Cannabis sativa
tattattattttatgtctctaacaataaattaaaataaataaaataacaaataaaaaattcaaaagaaaaaagatatatatgtataaagaaatgtttaattttgtgtttaaattatatgtaaaaaaaaaattatatataagaatgaaatatacatttgatctattaaattttcaaatataattgtattatatgtttagattactattttctttacattaaaatattatttgcatctataatttcttttatttttttataaatatgtgtgaattggattggatcagttacttttacatgtcaatcaacatccaatttgcccaagtgcggattttgaattttccaatccgtacaagtgcggatattcgcactttgcggattggattggatcaactattttatgaacacccctagttgaatttggggtagttttgagcaagttttcaaagttggagtgttttctgcagagaaaaatatcgtttttccaaaaaccggtgaaccaattttctagcaaaagcccaaaaagcaataaactgattggggttttggttcaccggattttttcaaattcgggagcctagttttcacgttttattgatatttaggtacgctatctatcggtaggaaaacttttagtttttagtctaagtctcgagaaaatgatttagcgggtcacttaccaattttatgtaaattgtgacttagggccttaaatcaccgagcagtaatttccactcagttgactggcacacccgaatttggaattgaggtaagattagtataataatatgcatgtttacatgtttagcgtacatattttatgattgcctagtagatagcatatcggtaagagtggtattagtgtacatagagctgtactaataccaa

SEQ ID NO: 96599 - DNA, 505 bp, Cannabis sativa
  modified_base (389)..(396): a, c, t, g, unknown or other
atggtaataaataaacaagtgtaatataatagttaatatttgagttgcatagattatttatcatatttttttaataatattaaataaataaatatttatttatttttaaaaaataattaaataatattttccctcttcacttctcttttctcatttctttccgttaattattattgacacttttcttactataggtattttcttcccatgaacaatattaatatttaatttttaaaatgtataattaacattcttaataagtgtatcaacaacaaatcaactaaactattattattatactaaatacaaataaaataaaggtcactcgaaaaaattaatacttttagtgataactttttaatcacaatataattttttgtaactaaatnnnnnnnntagtcacaacaaaatgttacttgtaactaaatcatagtatttagttacaagttgtgactatttagttacaagttttaactaatttagttttagtcacaacaagtattgt

SEQ ID NO: 96600 - DNA, 969 bp, Cannabis sativa
ttaggtgtgcgccttgggtccccaaacgcttagggactcgaaattataaaaaaaattattaatatataaataaaatattaaataagaaaaaaatataacgaaaattgtgtggtgtaataataaaatattttactttaaattaagaggtcataggatcaattctcaatctctacttttttaattttttacttcaccattacactaagtactagaattatcatttttataatagataaactatatatatagggatcccaaaatttaatttcgatcaactataaaatctaccttgggttacatactcttttaaaatataaaaatatgtaattgtcctactttaattttatttctaacttcgtcaattaaaatttgttttgttaaatcgttaaataattatattttatatataatgatataatcatttatttttatcaataaagaaaatctattatctctaatacatgcagtgttagagatgcatatggcccctttggttttttttaagtaaatgttaatgtattacttgtatgtacttaaagaaattaaataaaataaaatctttttttttttattttgtattttgaagtacgaatgaaagataaagtgaaagtgtttatatttaaactaattaaagttattttttttttttgaataattaaaatagttaaagtttaattaaacaaaaaagtctaatgactgaaaaaggttaacttttatttggtgcttcagctttccaactactaaattcgttttttttttatttcctttttcgaatcttcaaacaaactttaataaagattcaatcacttttttttatatatattttctatcattatttatttttattttaaatacatacaaaattgctaatattacaatgttagtgtataattcaaacttgtagccatctcttttcagtattattaagcttatgtatcatcacacaaaattaataaataaaatgaaata

SEQ ID NO: 96601 - DNA, 762 bp, Cannabis sativa
ataagttcaagcatacattactaaaaagcaagagataaaagattgaaccacttattcatcattattgggtcggaagtatttcatgatgctgtccatcttccatgataattatagatgtatctatttacatagaactttattaaagaataaagtgtctatttatatgatcattacattcatcgtaatcctttattaatggttcataattaaaggaaataaaattactattttaccattttaattatatatattttgttcttagtgttgactgagattttcaataacttaactaataattataaaataaagaaaaatagagcttaaaatgaaatgagatgaaattttttacatgattcggacattaatgaatcctaatccatgaatcaatattatttagagttgttgtatcagcacaacaatagtggttctctcacaatcgttcccgcgtcttggcttaagaacaaaattagggatccttttacaaggtgttgctttattcataagaaaaggcacccttgggccttgattagcaaggggccacttaattaaaaagcttagtgaaacaagatttttccttctaatgagactattataataataaataaagtatttccattgggcccaattggggagaggaccaactagggtggtaagtaaatgggcaattttcaaaaatatgggaaaaattattaaggttatgataaatatagcataaaaagtaaatgccactaaatatgacattatctaacaaatcaaactaaa

SEQ ID NO: 96602 - DNA, 673 bp, Cannabis sativa
aaattgccataaaaaattaattaataattagtagtaatttaattttaattaagtttattgaggaaataaagtatcaagttacaggttatttattattattttttttttaatttctaaattgatcacaaccattcaacaatgatctaatggttaaaaataaatgtagccattaatgcagatcttcgttaacgataatgagcctattttcatgataggtttagcacagaaattatagaaattcaagaaagaataacaaaagcagaaataacaccaggttttttatgtggttttacagttaactctgcatagtccacgagtcaatcttattaagacttttttgatacaaaactagggttctttacaatcagagtattttctttttttctctcaaggattttctgtcctttcttctgtatattctgcccctatttataataacataggttggcagttaattacattcaaattcgaatcccacaacaatatttccccaaaattatgggcttccattacactcataaataaatgcagttattagttgaaaatcacacaactataatttaacctgatttttgaagggtcaatgctgacgtggactcagacatgctgcaaagcatatctcgctgaggcatctcgcttggtgcacgaacaacttgatatattcataagtctt

SEQ ID NO: 96603 - DNA, 1187 bp, Cannabis sativa
  modified_base (43)..(45): a, c, t, g, unknown or other
  modified_base (716)..(729): a, c, t, g, unknown or other
  modified_base (888)..(898): a, c, t, g, unknown or other
tattttagctacaatttaagttaatttcattaaaaaatatatnnntatatatatatatataagaaaaacataatttaaaacttaattaatgatccatcacatataataaacattaatttagtccagcctaattctcataatctcataataaaactgttaaaaaataaaatttattcaatacgtgttaacaattttattagcgcttaggatgatattttaaatctaatttttttttctttgatctcatgagtcaaatgtatattaaatcaattaatatatatttttaaataaaatatattaaatttataaatttgtaaatgtattttaaaaatatataaatataattggatgataattggatcagtttggtcggttattcattggatcagatgtccaatccaacaaccgatccaatctgattagattttcaaaatttacatccgatccgatccaactataattggatatctaattctattggatcgatcagttgtaattggattgaatgactttttgcacacacctatttagtggtattagattgccttgcctttcctcttattataataaccacatataccaacttctctccatgccaacttgtacaatacgtacgccaaaatatatctatatataaatatggttaattatgatttttaccccctgaatttttaaggtcgttaaaaatacttcataaactattaagattgttggannnnnnnnnnnnnntctaattttagtaaaaaaaatctaacatagatgaaagttcagagggcacgatttaatatatgttaaagttcgatgagcatgatttggtaggtgtcaaagtctggggagcatgatttagtacataaataattactacaatagtaaaattgaatgaaattnnnnnnnnnnnctgaaatctaacaatctcaataggttcagggagaatttttaacggcccaaaaagtccagaaagcatgatttgacacatatcaaagttcgggggtaaaatctctaattagcctataaatattattgtaagtatgattttgactactatggtaccacttaatatatatacatgatccctagcttcatcagtctttacccttattatatttgagaaatttgatattatatgcttaaaattaatttatccactaaaaatatgctagcatattttgcatcatgcaaaatatact

SEQ ID NO: 96604 - DNA, 1111 bp, Cannabis sativa
  modified_base (403)..(404): a, c, t, g, unknown or other
aaatattaattctaattatttaatatttattttattacatttctctattaatttattttaattttgaatacttgtgattaacttattaatatatacctccaaataatagattttcttttttttttgaaaatactccatataatagatttgaaagtgcttatgtagtaactatgattagacctccactacaaatatgagacatgatttcgcatattaaaatattatgcgttggttttgtttatttatgtactaaaaatataaagatcattgatattgtcatggggaaatattatcgtgttcgtgtgtatttatatctataaatattaggctgtcttaatgagtattaccatgggtaatattaaaaaattttaagttgttataattaatttttctatttaattannaaaatttctcatttttacattatacggttgagattggtccatcagctatatattttatttttttcttataaacatatttttaatatagtgtaaaaagaggtatttttttatattttatttaattaagtagctaaattgagtataaaaattcaaaattttcttttattattctctattggaccaaaatctaatgtttaatatttttaaaattaatatttatagttaaatttattttttatccattaataattaatacccattaaaaatatatatattttgatggatggtgtgtgtatatagttattatgatttttgtcattgttttattttattttatcgagtttttgtaagtaataattaatataaagaagattttaatagttatattaaatatataattatttatattttttttagacattaattaataaattagctgtaacttaatattaacttaattttatttattttttattaataaaaaataaaatatttataaatattaattgtaaaaaagttatcattaaatattttatttgaagtatatagttaattataattaatttgagtttaaaaatagaatttttacctattactaatatgttatagtagattgtaaaaaatgtaaccaataattttaatgtaaccattgaatagttaccaaaatcaaaatattaaagaatgaactcttacatttataaaaacat

SEQ ID NO: 96605 - DNA, 693 bp, Cannabis sativa
acgacgggaagactggaataaaaccagtcgacggagccacagttgcagccgaagaagagaccaatgacaccaacgactgcctggcattgatagtgcaactgcttgaaacagatgacttagcaccgaaaacacatcgacataggttgagaacgagaataaccaaggtccatagagagggaatggatttccattggtgctcaacacagtatcaggtgaagataacgagcatccacgcctttgatgccccaaacaaccacaatgaaaatagaaaatccctattttctcatatttgaactctatccaacgtttaacaccttttctcaactcaaaaaaaacacctcgagaataaagggtgctcaatctggatttcaatctgaattctaagccaattagtctaggacgctggcttttcctcattaaaatcaactaaaagcacttttccagctagagctctcaatgtatattcatgagggagaaggtgtatatgcacccacaatcgcatagaggagatcgaaatgacaccatcagctcttggagaatggccctttacgcaccaagggccattctctagagtccaacttctgtcatcagtactctcaaaaccaaacacaaaatagttctcataattattgccctcaaccaaagctcccattgtgacaggtctcttctaggctttagacacaaaatcatgca

SEQ ID NO: 96606 - DNA, 1415 bp, Cannabis sativa
tgcggtgacgaacttaattaataaaagataccttgatcatactgacaccagaaccaatattaacaagtagatatgggtataaatcatcttggtcaatctgtacaaattcctttcgaccatttgtgtaagtaaaagcttcttcatgaactgcctactcaaggtagaaaattcctcatcagtcaaacaacatcaaatatgtacaatatacatcacaatatctagtatgtgtagcaggatctaccttaagtagaaaatttgctccagccacaagacaatccatttcatcttctttgtcaaggcaaacaccaagcttttctttaatgaggtctgcatatttgtatgcccctccacctgtggccttctcattaaaagaaaagacactagtttaattgatttgcaaacaagaaatttccatgaaaccaagtgggctgttgtaaaggaaacagagagattgatgtttacatgctcatacataaaaggcttttgatatacttgtatactcaaaatcataattttgaaagcacaatttttttttaccttaacagtgtaattgtcaggggatcccccatgctggcaacctgcaatgaaccacaactataagcactaaacaaacactagtagactttactatatacaaataaagcaagttcatttgaaagcatctgaatcagagtaagagaagctaatatgagtacgagccatatttgaaaggggacgaaaacacactaaattgaactacttacagaccaagaaattcaataagtacctgtaaagactaaagaattacaacttctccaaatataaagaaattgcagtggcctatattcatttactaagagccaaggaaacatggggaaacactgtgtttggaggaacggttcaccaccaacctataacccgagacacatgcaccaaattgaactacttacagaccaagaaattcaacaattacctgaagcttgattgtataaacaatgcattagtctaattaatgacgacacagaataatagaatatgcatgcatgcagcgtgaaactttaatacatagcttagaaaacaatcattcagctcccaattgagctcaatacaaattcaatcaaaccatagagcaattaaactgatcatggttataaataatcattactgttcaaataagagattccacgtaccaccaagatgaagtttattgcgcattataaactctaaacaatcattaatcttgctcgtttcaaattttgcaaaatgaagtgtcccctgaagaacaggacactttttagaaaccaccagactctcattcgaagaattgccctcgttatcatcgatcaaacactcatcacttctcgagaaataaaccaacttaattaaagaacctgtcaaaaacagtacagaattttactcaatgcatggcctctatt

SEQ ID NO: 96607 - DNA, 656 bp, Cannabis sativa
taatttatttattttatgaaattggtttttaacttgtctattttttattttaagtttgtcttattatttttttatatggtcaaaactggatttacgggttttgttaattttgtatgagttcacaagttttgttatggtttcacaggtttattatgatttttcatagaatcgaaactggtttcacagggttcataagttcgaaactggtttcacaggtatgaaactagtttcacagggttcataggtttgaaattagttttacagggttcataggtttgaaactagtttttatacagttcacaggttttaagggttttgtaatggttttgctccattttatgatgttatagtaaattttgattttatgtttctttttattattttgtttctagatttaaaaatagtcttctcacttatattttgtttttagaatattgttgtgcattatttaacgttttgattatatttgtagattttgtgtgtgtgtgtggggagggtttcttttttcatttggttgcctgatgaaaccggtttaagttaactttattgtttagaatttatattttgttattatttttcttagtgtcaaaattagttttataggggttcacatgttcaaaactggtttcatgtaatggggttgcttcattttatga

SEQ ID NO: 96608 - DNA, 799 bp, Cannabis sativa
tacatgaccatgagtaaaaatttgactaaaaaactatttcagatgctaaaatagataggggtgcattgtaaaaattttcaaaatctttttaccactacactataatactataatttgtttttggtagtacacttaccctgactgagacccaaatccttggaacgaataacttttcgcatttaacgtctggcgttcccaaaacattgaaatactcttggcagagtcttgttttgccgacgccacgttccccgacgataccgaccacctttaatcgattgtcgttgttgatttcaagccgcttgaaaatctcgttcatggccagaatgtcgttctccaacccccgaaccatgagactgtcttgtaattgaggcgtccactcaatttcaacgtcgtatttttctttgttgccatgggactggacgttttcagaacctattttggaatttccctctgtttctgggtgtgaatttgttttagttttgccagtgacgccctttctcttcaatttgataattgattttattataactgctggaaacattattggattagattgggaaatgggttgatgattatttaggcatgtgagagagttttattaatagttcatttttaaaggagaatctcttttttccgttttgaggttgtgtaaggcattgtttggattccacccccagctacaaggagggaagaattaattaataatttattctttgagtcatttctctttttggattagaatgataccttttactattttccaaagttgaaccatggataattggatatcttggaccaa

SEQ ID NO: 96609 - DNA, 1284 bp, Cannabis sativa
taggagggtgctaggcaccactggcatcctttagcatttctcttatttttatagtgtttaggatttgaaattcaaatcacaaactcccatgactattaggaggtctttaatgagtgctaatagaattaattaaggtgaattaggtgttacatgatgagagctagaaacgatcaagcaaacaacgttcaaaatggtgtgttaatgaacctaactaattctgttattttagttagtttatttttcatctttgttacttcaattatttagttagtttgactattgttttggttattgtctttagtcattgtaattaagttttgaatttcatataacttatgacaataactattagggaatatcactaatcaatcataatgtgtcacctataaaaggtactaaatactactgatgcctaataactatgctcttacctaggctcgaccttggacataggtatattaagtctgtgcctagagtctacctaccttaaagtcaccaaaaaaaaattattcctttttaaaaatagatatttttttaggggctttttaaaaaaattattcctttttaaataagggcttaaacatatattttttttttataacccactaaatttcaaggtcgcgagtgaatgtttaatttaagctttgttgagctaaacattttcactcaagaatttacacacaaaatctctgttatgttattatggttgtgtaaatctcatttgaaataaggtttagtgatgagccttaattgtatagtgattgatgggtagtggagtgaggcctcgtgggattcctaatcgaatagtagacagtacacattgatactagtaaatggattaaatacaagatgagataagacaagttttaaaaggggagtgcttgtttcttagatgagatgttattatcatactgtgccactctgtatgtatagaaagaaaatctgtattagtgtcttcactttataagtttaattttcccattttgcaaaagcaaaaacatttaattagtgttttaacattttagcattttcataagttttcacattcgattcaactacaattttcatgtttttttttcttttatttttgaattgtgtatgctctattaattactgttttgttgttagttgataaaatagttgtaaataagtgtgcgcgtcgaggttagctcggactatatgttaaaaaatctacaataatatagatcgtatcgtgctaatattttaaaagtagcctgacatggcccgtaaattcatattttcatgtcgtgttttattagggcc

SEQ ID NO: 96610 - DNA, 711 bp, Cannabis sativa
agaaggttttgccaagattgctactcttttgaccgagctaacccgaaagagttgtaagtttatgtggactgataaatgcgagaataactttcaagaattaaagaagacattgattaataccccagttctaagcctgtcagtcagtgatgaaaagtttgtgatatactgtgatgactcaacacaaggtttgggttgtgtgttaatgcaatcagggaaggtcattgtctatacctctaggcagttgaaggattttgagcagtgttaccccactcatgatttagaactggcagctatggtttttgccctaaaggtttggcgtcactatttatatggtgaaaagtgtgagatttacactcgaccacaaaagtttgaaatactttttaactcaaaaagatctaaatatgagacaacaacgatggctagagttagtcaaagattacgactgtgaaatcctctaccatcccggaaaagcaaacgcagttgcagatgcacttagctggaaaggcccagggcaggtctatgagttgaaagaaatctctccaagattttcttaggatatggccaaggctgacattgagtttgtagtcgggaagttggcaaatatttcactgcagtctcatttactggaaagaataaagattggccaacaaaatgatctcgaattgattgagctcagaaagaaagttgagattggtgctacaaaggatttca

SEQ ID NO: 96611 - DNA, 501 bp, Cannabis sativa
ggagacttagtactgcgaagggtcattttttcttattttttctactatgaccctccactataatttaaggccacaaaccattttttctctcttgtgagtatttaaattattttcattgtaattaaattatttattttccatacaaataatttatttatttccctttttaaatgcttagattatttctcagttaaagaatttaatttgttcttcctggaaatttttttttacttgtaaagagaaaactataattaggatatgctgtaaaaatatgaaaagtataatgatttggaaaaatattttttaggttttgaaatgtaattctagtataagcatgacattctcaggaccgtaccactaagtcgtcaatagccaaagtgaagtgcggactacataagaaagtttctaccatatagtcttctaaaaacttgggagtaaatgtttacccaaaatttaacgatggtgacatggcaagaataacaacacgtggcacgaggatac

SEQ ID NO: 96612 - DNA, 504 bp, Cannabis sativa
tattagtgcaatttaatataaaattttgcttattacattttaataaaattatagaaaattgttaataaaatatatatgacaatatcttatagtagtgttaggtatcttgttgtctataaatatttaatatatatacataaagagtattgttattgagaactattggtgcctagcaccttttagaagcgcgtcctgtgattggttagttagcgatattctctataatattattatattaaattatgtgatacccgacatacttaatagcaccaataacgaaatatgacaagaacaaaaaaaaagagaaatactaaaaggcactatttagcgtttttctatatgttaatattgctattggtacgttgcaactatcgagtcacatataatttaatgtaataacttttaagaaatattattagtcaatcgaaaaacgacatgtctagaagatactagacaccaccagtgccctataacaatagtgttagatagtaccttttctatttc

SEQ ID NO: 96613 - DNA, 1073 bp, Cannabis sativa
  modified_base (1023)..(1025): a, c, t, g, unknown or other
taatctcttttgcaaagtagcgaatcaattttgtagaccttgttagttgtttgagaaatgactttgattatgaatgcttgatttgtattttgtatttgtttgtgaacaaggcttttttgttcgttattaatggtttttttttttattattttttaagaaatattggagttgtgattttgaatcctagagaagtaaatttatagtttcgttttggtgtttgtgtttcacgcgttgtcgagatcaaactccgtaatttgttgaacgatatggcgtgttcatagatcgagatggcatgtttcatttttagactatgttatgcaattttttctttattagggtaggaatattgatgtgtcacaatattacatgcctatttaattaattaacatctttcatgtaatttttatatgttatacatataataataaaaattttccaatgtaatattcatcattgttgttcttaattaattgtttgaggtagagaataatttttaggaaaattatagtaaatggccccaaatcataggagtatgttagtttatgtaggggtgtacgtcggtcggtttagtcgggttataacatatttttattagcccaatataaatattgggttacaaatatttaatcgtaacccgcccaattaaaaattagaaaaagttcaacccgcccaatgatttcgtcggtttggtcgggttaacccgtctaaaccgttcttaacttttttttataataattattcttagtttctactattgaaataattttatttaaaaaaataataatatattatttatatttcaagctaaaaaatactatagtttaaattaattctaagaactttaatataagataaatataattgagtaaacataaaataataaaataataaaaaaaaaagtaataatatagtataaattttaaacttcaacttcaatgttcaaatacaataaaaattattacctataatatctaagttttaagttaaacactaaaatatccaaactttaaatacaaaatagtnnnactaataaatgtaatttatgtaatataatatatacactttcattaaaa

SEQ ID NO: 96614 - DNA, 3646 bp, Cannabis sativa
ttttttatattttgttaataaaaaataataaaattttaaacttaatagtattcaacatatcaaccatatatcataaattactgtaattttttttatattgtttaagcttcacaatagtttactcaatgattaaaaggaactaaaatgttactatattgtaaccaaccgaattttaccacttaaatactaatttctatattgtaaattcttctaaaataattaaaatttcataaaatgccttaaataactacaacatataccaccataaaaaaaatagattaaaaaattattatagatactgaaacaataaaagttgctttagtaaattaatataataataataataataatattatttaaaaaataatataataatagagtaattttttttgttgtggtagaaatgaaagagattataacactatatttagtgttagtagtagtacatcaccaaatttgaggtatatggttggagatggccttacctgacttaagatgtcataagtataatagttggcaaagttttgtttgaaatgtgagaaaggatgctatacagtatgagcaatgacatgtagtttctattttttacaaaaattactgaaatcaatggcaacaattggcttcaagtatttctattgactaaataggtaccattcacaaaagctgaagggcaaatgacatggcagctcactcttcttatttacagcctgctgaggcatccattgccatgtcgatttctttctaagaatcatagatacgcactgaagagcggatttcctgacgacaaaggggacattttggtgtggctgcatgttcaactgatatggcacaactttggcaacatactagatgcccacacggaacaaatgctgatcgccttctcctagtcaggcagatgacacacaactgtccatctggaacatctgttgtatcgtcctcttctgagatatgaaattcattatcatcattggcaggagggtttgattgctgatgccgccttcgctgtctccactctttcaatttattccagttcctgttagtgatggccaacatgtaggattacatattctagctcaaatatagttaccgagatcatcaagacccttgatatttcatttcaaacctttttaacagaccaagctagcaaataacttacaaattaggaagtaaaaaaggggaaggagttaatcagaagggaaaggtaaacctcgtgttagtttgtaattgaagaaaaattagaaaaaggtgtgtaagtgaaacaaataaagaaattgtgaaatctaccaagtttaaaaagagtaagaagaggcaatgcttatcaagtggaaggtattacctcacaacagcatagccaagaattccatctgatagagaaccaaggacagcaccactcaacaacagaattttggaacggaaagcaagatccacaaccatctcatccttggtcatttcagtcctggaaaagaaacaacaacacttattccactaaatacaggatgcatctcaagtcgaaacaaatcgtatattgaggccaattagaaaaatcaaactccaatccttttacagcaaggagtagcagtttgctagaaatgaagagaataagtgagttagtgaatgttacaaaggatcttcaaaccaatgtcttgaagcaaatcctcttacagaaaatagggaagatccttgcacgaattgatttctggagttccatctttaatactgcacactccaacagcagtgatatcttttcccaatggaagaattttctcttcatcaagtagcccgaccttcaataaatatacaaataactctaatgagaaattaacaagatatatcaagaaatttcaaaacaaaaaataaaaatataaggggagacttgagaatttacaagcaaaatttatgtttagcaacaaactcacagggaattcatgaccaaaaagtgcctgtaggaatgtgtaaggagatgcattaacaggctgcaattgatgataaactgttgtgagaggtaagggatgctttaatttatcaatgttcactactatgaagtctgaagctggccattttccaccttcaacaagaacgaaaggaacctgcagggataaaattaaaaacagataaaactcctaacagttcataaacaagattttatgctgctaaattcaatgaacaaactagattaaatatatcaacaactataaaacttccccggcttgggtaacaacctagataaaatctagaagtaaaacatattgacaaaccgttcgtaataaggtggattcttgttccctccaggatctcgcaaatatggaacgcaaatctgaagtccatccaaagaaacctttccattcattgtatatgcactgcacagcataaaaaacataattttagtatacaacatagagttgaaaatctttagctcattgatcgaatcataatgccaaagtacatcgagagagtgggggataatgatcatttcctcctttgtaaactcaaaataaacttgttaagccttgttttggaataattaaaacaaaaaaagtgctagaaaatagtacataacagcaattatgggataactttgtccttctaattttgtatatgtgattgatatgcatttaaatccagtaaattctagcattaaagctgaacagtttgcataagcgttactttcacagcgcaacaaaatgggcgggtggcttagtgtaaaaacggaaaaataatattgctaatttcactttgtcaatttgacaaacatattcagggcaacccattttgcagtacacgattaaaaccaccagttcaaatagaatgttattcctcttttatgatattatgaaactcaggaaaactgctcgtcattcttgctacgtttcagaaactattcaaatacttctctattcaacaagaatcagtaaatgtcctagttgacttgtcaataagcatgaaagaatagtcaaagttaacttggcactcctactcttatcctgttcttacttccttaaggtataaaagaaaaatcctaatatatgtgctagttccattctcagcaaagaaattacatagatatgaaaaaggaaaataagttcagcgaaagtgtaattcaagacaaattcagccacttacagtttgagttctctgaatgataacggctttttctccagattcttgtgaaaccaagacgcttggtctcagactcttccagcttccgtctatgaccgattttgcctctacagtaccgcggacgatcaagatttttccatcagatgattgcgattcgttggaagtatcggaattgtcgatggccatgacggagcgaaggtcggatactttgaccgaaggtgctttgcggagctttttgagagcagaggaggtagttctgtatttgaggatagaacggacggcggcgtaggctaaggctaggcccaaaacggcaccgtcgccggagaaggcgaggtgggagagtaaggacaatagggcttgctcttgcgacgacattgggttggttgtcgttctctctttacattaaagaggagagacagcggtttctagctgaagtggaagagaagcaaagactcgcaaatgaaagaaacaaaattcctatctgtctcgccgatgtttggaaatagtttccgtatggagggtttttttt

SEQ ID NO: 96615 - DNA, 539 bp, Cannabis sativa
gggaggcgttaattgtatgaaataggaggggcataattggaataataattaaaaaagatggcataaattaatgagttttaagaaagaggtaaaaatgagatggacttccttaaaaagggtataccatctatttttttttttcagaccaattccagtccatataatataaaaatgagaaatttttctaattaaatataaaaattaatcataaaaactcaaatttttttaatattacccattcatagataatacccattaagtacacccataattaaatatagtatcaagcaaagaacttttgtaagaattagaaagattagtcatgctgataaagaatagtttggcaatctagaatgtacatagaattaaatcaagactctttggtgcttaaatatattgtaggagactaaaatttgattgaattaatacaacataactgatttatatataaaaaaaatagctaaaagttataaatttagcaaaaattttcaaaatgacactacatcaagtgaggtataataccttaactcaccactttt

SEQ ID NO: 96616 - DNA, 927 bp, Cannabis sativa
tgcttggaattcccactctttacaccacctccaaaatttggaacactcatatcatttttgcttcaaattttcagatgacaatgatgttgttagctttgaattgagctttgggctcacactactcattggttactttcatctattaatggaaatagtatatgtataaagagaatctatgatagtctctaatagattgcttttgcttccaaaattgaagcatctcatgagtttcacaactatggtagagagagtttagagttgtttttccatgtatactattggctgcaatactgaaatctaagcataaatatactagtgaaaaatgagtactatcatggcaatggcaatcataaagaataaatacttctaactaaggttgtaaaactcatacacctgaattcgtcttgtttctgctataattatatttttattcatttttaagtaatttcaagctttaagatagtgatttcatgagaacttagctgtttttgtcagttatggtaagaaagaaaagaaccacacatttggagaaatgagcttttcaggttaagtttgattgaatcttagtggaatgaaattaaatttatttggaaaaatattcatgttctcatatacataaaacactatttaacacatagcagatagcttggattgtttgtaatggtctttagttgacttgcataaaataaatgaatcactttctaagcctcttttaatttggggtgacatgatcagtatattaagaagccttgctttctcccacattgattacaagctatattatcagctcataatgacttataaaacccaagtccattgtttaaacaaatcatacctttctcggccttttggctaagatcaagtgtagtatctgttcttatcagtttaatatctgatatgtgggccaatggctcacacgatattaaa

SEQ ID NO: 96617 - DNA, 782 bp, Cannabis sativa
ttcaagatttactgtatatgactcctgcaaaaaaataaatatgttaataataaaagtataatttaattaataaatttaaaaataaaaacaattaccatattcagatttacatcattattttgatcatttatggtgattagtttagttcttgtgcctgtaaaaaaaattatcaaaataatataacaaaatattattaattgatgtatagacttatgtaataagagattaatttttataccttgtttgttaatcgccaaccaactttgagtacagacaaatacctccaaagtagtaggatgaagtcttgctcaatgtggacttaggtgtctaccaccagtactgaatgagaactctaaagcaacaatgctaaccgacacaacaaatatgtctctagcaatcatgttcaacacacgatatttggatcccgttatcttccaatagttgcatatatcaaagaattcatcagtcttgtgtaacacttgatcatctaaatagagatttaactctcacttttcattcattgcaccaggtgaagctctaacatataagtcagaggtagatagatgatcttgtattgaagaagatgatgacgcatccacttgtgaattgctttcactcaaagtaggacatttagatttgtactcattgaaagatgatcacaaagcctgcgcacctttctaatttcaacctcctattaatcatctccatagagttgaggaaaataaaattggagcaacaaaaatttgtatctaggatccaaaatcatttcaatagtcataatc

SEQ ID NO: 96618 - DNA, 671 bp, Cannabis sativa
acaacggtaagagatgacaaatacattgtaagcaaatcacttttagagagattctctcaacaagagttgttagagtggatcatgtatgcactaatgataacttagctgatcttttgacaaaaagtttagctagaaagaaagtccttaaacatcgaaaggaatgagactattgctcttagattgattaatcacttgtaatgaaacccaacctatagactggagatcccaaaaaataggttcaacgggtaataataagttaagaagtgataaaagtgagatcatgctataattatttgataagagaagcatgaattcctgaagcgatttaaggccgagttaatagaagctcttaatgagttctatactccaagtggagtagagtactgagctacaggagtactcttaatagactcacctatgtgaatgtgtgagtgggactgcttcttatgaatgggcgaaatttctagagcgttcactatactgagatagacgtgcatggtcattaacgcacgagtttttgactacacacttgaaaaggctattgtgtggtacgatattaaagatagagtttaagactacaggtcactctagtaaaatctaaatcatattcactacgcaaaggtttaaattgaaagatacctttgtttatgctcaatcttattgttgaatga

SEQ ID NO: 96619 - DNA, 751 bp, Cannabis sativa
agacatggtcattgtcttttttgagtaacactaaatattcatattctcaaaacttatgatatagagataggttgaaaaatacttctttttttatccattaatcaaaaatactcttattttgtttttatattaaaatatacacacttttttgaggagattgcctaatatacttttactttttacttaagtctagcatataatttatataacataaggagtttaatggagacatcatccataaaagtgagtatatctaaaaaaatataaaaataaaaataaaaataaaaataaataaagtaaaatagatatacaacataattcttcatttatatatggccaatgctcccaaatattcaacctaaacaagaaagtttattatttttagagaaattttcatgaggcacctaaatttagaaattatttacaaaaataactttatttttgtgagtaaaagggatttttacatatcatacccttttttctatcttaatatcaaatataccttactcagtctaataagctatttctttgccttatatacatatttaataatgtttttttttttaaatgtagtatttgaaattttcaaaatagagaagtttgaatatatatatatatatatagttagtattaagtaattgtttgtgtaaggttatttttgtaaatagtttgataataatgtatattattaaaaaaatcccttatttttatgggttagtccaatggacttccattcatattgacaaaaaaa

SEQ ID NO: 96620 - DNA, 620 bp, Cannabis sativa
taacactccagtctgcccaagtacccagccttatccaagaccctcatgcgcgcctcacttattttggatggagggctcacccatctggcaccaaaggcactttgcctcttctgaggaactgcttcagtaagctcctcggtgacatagtcctccccttcaaccaagacttcaccctccacaaaaccggctctccgacctcattatacctccaaaatttggaggttcagccactccttcctcctcgacctcggaagggctaccaggatggacgtcgtcctgctcatctatctcatagacctcaatgtccccctcatggtcttccacctccatggcgggcagatcctgctcggaacttggcaatgtggcgagtagggtcccatgatgatcagatgcgttgacttttcgcatcgtctgcattgtgcgggccatcatcctcctcccgaacgggtactaatatgtgtgtcgtgcagcagtgacggcatggacagtaattggaatgccaaagttaccagcacttggacggccaacaggaagggtatcaacaacacttggccagaaaatatatgtccagttggacggaagataatgttgggttttgtgccctaaataaaacccattac

SEQ ID NO: 96621 - DNA, 646 bp, Cannabis sativa
aaggtgatcctctatcaccttacttatttcttatttgtgctgagggcttctcatctttgatacgaaagtttgagcgggatggtaagcttacaggttgcaaggttgctaatggtgctctggttatatcccatatgctttttgaggatgataattatgtctattgtcgtgcaaatgaagagaggcttcaaatatattacatctgcttctgctatttgagattacttctggtcaacaagttaatttcagtaaatcctttgtctttttcagtactaatgtgcatattgctactcgagaccgattgtgtgggatccttaggatgagaattgcagatgaacatagtacttatcttggcctcccttgtgtcatgggaagaaataaggatgccattttagggttttcgaaagaaaaaatgcagaagcacattcaaagctgggaggctcgtttcttgtctaccgctgggcgtgaagttctataaaaaactgtagcacaagctttgtcaagttttgctatgtctgtgttcttattgcctttgataatttgttcacatctggagagccttatgtctaagtattggtggagttcgagtagtcggaaatgtgtgagctggtttagttggaggaagctatgcaaaaataagaaatctggt

SEQ ID NO: 96622 - DNA, 531 bp, Cannabis sativa
  modified_base (312)..(316): a, c, t, g, unknown or other
tataatttattattaaaagaaaaagagagagagggagagaaagcttatatatatgccattcaaaataaataataataaaaaaaatttatattaaaaatagagatatttagtttaaaagcaatttgatttacatattattatattaatgcattttaattttactatatatgcattaagctattgaataacaaaaaccacaaaaaagacaaaataataatagacacaaaaagacaaaatattgaatcaaaaccaaaaaattaaaagagaaaaacttaattattaaataaatattaaatgtttaaaaatttaaannnnnagtattatttttttaaaggtagaaagtttataaatatattaagtcaaaaaaaaaaagattaaaaaaataaatattaaattatttaaatttaaaatactaatattatgagaagagtcaaaaaaaaaaaaataaaaaaagaataattgaaccacaaaaagacaaaatagttgaaccaaaaccaaaagattaaaagagaaaaaaagggttatttgcga

SEQ ID NO: 96623 - DNA, 634 bp, Cannabis sativa
accaaactacttattatttgtgtaaaaatatatgtttgtagtatggagggaggtggtgattgggaatgctcaaaggaaaacaagccacgtggaggggaagaagatgatgggttctttggaaatcttggaactacacaggtaagtactattactactactaatctaaatggtacatgtgttttggcattagatgatcataattctgaggtcagtgaaattggtgtttctactgatcaaattcaaaggtgcagaaagaagagaggttgtttgtccaaatcacctcgttcatctgtttggggaacattggcaaacctaacacaaatctttgggaatactaaggaagggacaaaatcatctgctgcttcaaataataacaataatattcgtttcaaggttaaaatagggaaagatgaatgtcaaagttctgttatgactgccaatggttgtgaagaagaaaaattacttcatccattaacaatgaacaaatctaaaccattaaagctatataataatggcattagttcatcaagtgagaatcttatttcatcagctactgctactgtttttgctgagacattccaagttgaaagtggtacaaaagttgaaataccaagttctgttgttggttctaata

SEQ ID NO: 96624 - DNA, 509 bp, Cannabis sativa
gccacggagaaatggcaaggctcgccccaagaaaggttttcacgagcggtggtatttccatatcgctcaactcgacacccttcagtatattggccataactgacttaattctttcgaaatgacgcggttcatgtggcaatggaaggctcttttgaagacagaattaagcttgtctaatagactactcaagatttcaatgttttcaaccccaaaattgggcaacaagttaaggcttcatggcaatgcttgcgaattgaagggtttcaccaaagaggagcctcatgggacttgaaacacgagcagagcaactttcctagtcccaaggcttgcccaaatgagcccctacacgagttatgacatgtcccataccattctcaaaagggagaatgtcatcaacacatgttcaacttgtattttagaagaagggcttctagagacatttaaatgcctctatgaatagttagatatttatggatatttgttttaaatgtaatttacaaccattattt

SEQ ID NO: 96625 - DNA, 2163 bp, Cannabis sativa
acttgtttccttattttggatgaaaacaaagaaatcttcgagaaacatctttagaaaagtggttggaagctccccaattgacaacatgtcaacctgggcattgggtgcatcaccatgtcattctggcggggtgccgaggtgcctcaaacgagaagtatttggattgtaattctagtgcctttatcatgtttgtgactggtcttattcatgtctaagtacaaattttgagccatttgcactaagacggacccaaaaactgaaaaccctagcccaggatgtcaacctaggcactcgggttgacttcgaagaggctgatttgactatttttagttctcaagcttcgaacttgggctcttcttgaatttttggttcagaatactaaatgatggtgagatgaaaataacctggcgggatctaaacacccattttggagctctcaaagtcaacttggtgcagggctaacgacccttcccagagttaactgctatgactcgaggcactcaactccataaatattttccttcttgtcacgtatcaaacattgatattcacgtcaccaggatcagtctccaagtaaacaagtatatataatatttttatatatctctccgtctatatatacaccttcgcatcacccacatccaatttgattttaaaaccagttatgatcactattaatagacaaaatatgtgaataatttgtgagatttatttttgtcggttcacaaaaccaacagctatatgggcgccttagccgtcagtttagaaccaacaatatcattttttttgcgttagtttatcacctacagtttaaatctatatatatcatatatgagctacacgagcccagatctcaccacaaaagatgccaaaaatacaaaatcaaatctttgaaactccatcaccgagagagacaaaataaaatctctgaaacaccatctccaagaatttggaagtgtgtagttaagctgcatgaggttccatctcaaagctaattagcaataacaagagtagctcatggattatttattgtattatctttccacacattaacaatataggactagttctaatacaccctgctcacgtttgggcctgaaagtgtaagtttaatgaacgagctttaagagatcacaaggcaaaacatgacatttgaaagaatctcacttgaccaattgaaaattttttgaaacatatcaaagaccataatacaaaattggcacacattggctgaatggtttcaaatagaggtcaaagttagagagagcaaaatctttttgatttctttgataccatgttagaatttggaagtgtgtggttaaggtgcattaggttcaatctaaaagttaatttgtaatgagatgagtagcccatggatcttatatatcatattatgtttgtaagagtatttctaataccaccacttagagtgacgaaacccaaaaactacaatacacctgaaacaaaggaaaaacaaaatgcaaataaaaagtggagaaaggaagagagagagagagagacaaaaggagatcgagggagagagagacaaaaggagatcgagggagagagagatggagagattgctggctgagaagttcataaaaaaggagagagagggattgcatggttgagagagagagagagaggtacctacctaggatgagggtgtgcggctgtcgttatcgtcattgtcgtcaccacagagagagagagagagagagagagagagagagtattagggttatagtaaaaatattagggtttttgtatgttaaattgttgaatataaaaggctttgacccattttcctttcttcttcttcttcttaatttattttaatttatttttaaaaaaattaagtttctttgtcgtcaattaccgacgaaataattggttcttgtgcttcgttggaaaaccaacggcaaaaatatttgctaatctattctgacagttccaaattttgagtatccaatcgacgaaaatactcttttttttttttttgttttttatgtagtagtgatagctaccaaactctaactttacaataggtgattaaaatcaataaaaaaaagggttatttgcggcaaaacctcttaaagtgggcaggtttttgcaactaacctcctaatctaaaattttggtggtaaaactacctaaaccact

SEQ ID NO: 96626 - DNA, 1721 bp, Cannabis sativa
  modified_base (547)..(547): a, c, t, g, unknown or other
aaaattcgttttgttaaacgatcagcaaaccgtctagtacatgttgttgctaggatgtcacggtcctgatctagtcgtagtatttctgtgtctaatgctctaactgctattctagatattttatactcagaatattaatttaataaagttgatatttcataaaaaaaaaaaaaaaaaaaaatttactaaacaacaatagcaattctcttaatttaaacatttttttaatgcctataatttgattagttgagaataatcaatgccttccacgttgtgatatggaccacacgtttatatactatggacctaacctgacctaatctgacatcacctcatctcttttcgaaaaataaaatgtgaaaattttatttacactcaaaaaattctaaaaataccttattttaataatttttattttatatcaaatttatatttttaattgtactaagttttttttaatttttttatctaattcatattcttaaaaatatacctataaataaaaataaattatactgtaaatattataacaaaaaaattaaaatanaaaattatatgaaatttttttagaaaaaaaataaaaataaatgtatatatgagtttgaaaataattatgaaaatgaaatcaaaataaatattaaaattaacataaaataatgtgaataatttttttttttaaaaaaaaaaatcaagagtaatttttttaaattatttaacttttttttttaaataatggagtgtatttattattttatggggtacaaataaaactcccctaaaataaaataaaataaaaacttggcttctaaaaatacccttttttttgttcaataaaaagattctggtaatgtaaaaaatgagaaatttaaggaaaaaaaaattaattcattttgtaatggttaattaagatttttatccccgaattttcacatgtgacaaatcatactcttaaacttttctggtcgttaaaattctcactgaacttattatattttcactgttgttttaggattattttttggttgttacaatgcaaattaatttatatgtttcacatgcattattaattatctataccaattttaaggttaaatttttgtaacataataatcatttaaaacattttcttataacacaaacttcaatcaatttacattttttaacccataagctatcattagccattaatttttataaaattaatagtattagcatcatctttttgacgaatgtttctcaagaaaaatcaccacttcttcaaaaatataaatgtaatttttttttgttatttatttttacagtaactacatagtcttgtatacgaaatcaaaataatttactctattattagtcacataaaataagaataaaattttctctaatagataaatattgatttaatgtggtaagtgatggtagctctgggtatgttaggttagggcttaggggcttgggttcgattggggttagtgttggtggattcaatccgcccttccttcttttggtgatggtttagagaggtctatccttgcctgagtttggagttcgggtggcgcttcttttctttttctttttctttttatttttttttacatttggtcctggtggttctttttggcgttctagctctggtgcactggggttaccttgagctcaaggagtgttgacgttgagagggggacatgggatattcacaggttcggtcataggtataagtagac

SEQ ID NO: 96627 - DNA, 1790 bp, Cannabis sativa
  modified_base (312)..(337): a, c, t, g, unknown or other
  modified_base (404)..(432): a, c, t, g, unknown or other
  modified_base (540)..(555): a, c, t, g, unknown or other
  modified_base (872)..(872): a, c, t, g, unknown or other
tatatatgaaaaataggtaaaatagttgggaaaaatgacaaaacccaaacttgagtggggcccatttagtggccagccatcaagtttatttttaccctacttttatcatttttttttattcctaataattcaacccgaaccttaagataagcagtataaaaggaaggctatgcctcttcatccccactaatgcctccaaagctaaaaacctagctttctaatgagacctcttccttcttctttcttcttgaattttcgaaacactaagcatctcttcacaaatattgttcagccattagtgattgagtaagnnnnnnnnnnnnnnnnnnnnnnnnnnaatcatagtatgtaagactataatgaatccaaacacaaggaaggagaatcaggctcagatcttggtnnnnnnnnnnnnnnnnnnnnnnnnnnnnnttagagatctgagcggaaggagtcttttaattccgctgcacccactgtaaggtttctcataacttttatatgtttatatacattgttttagagattcatatttaggannnnnnnnnnnnnnnntggtagtaaatctaaatcctggtaaaatagttccaacaatttgctcatcattccattacttctttggaatagctgtccaaggactttaaaaagtagttccaagctgcaagggataggcgacccgagatgtccttgctaaccaatagaaagcaacaaccaagtgagacacttaaggcataagtaagtcgttttagcacagctgctacaagagttagaaatctaaatgatagtacacaacttactgcccttcatgttgggatcactactgatctatccactgttaggggcgaattgtgggacgacttacagggtcgtcnagtgaagaacatcactgagttcaacgagagggctcaggtgttccttcaaaaagatgaagctcaaaaagagatgaacttgttaataactggctcgggagccaaacccaacaatgtttcaacaagtactgtctcaactagagttgataactcaggggccttcggctcaaagagaaaagacgattctaaggggtcgtccaaagacaaaaagaagcaaaagaagcacgataagtacgtgccagtttatactatttataccaagcttaatgaaactcgggaaaatatttacctcgcgcatgagcacaaggttgccttcagcaagcccgagcctatgaggcatgcgaggcacaaaagagatcctaccaagtattgcaagtaccataaggacattgggcacacaacatacgagtgtcgtcagttgaaagatttgaaagaaagtctcatcgccctgtgcaacttcaagcagtatgtgaagagatagggtaatggacaaaaccagcccaatttgcccagcaacccaaacaaccaggattacaacctcctcctatgaaaggaggggacatcctggttatttcgggaggattgcatattgcaggagagagcaacaacgcccaaaataggtatgtgaaggaaataaaaaatgagcagtcagtatttgctccaaaaccttccaagaaggtaagaactgaagaacctccaatcatattcttggaggaagatgagaagaacgtgaggtatcatcacgtcgatccattcgtgataactatccagctcgccaataaaaggataaagagggtgtttatagatagcaagagttcagtgaacatcctttacagggaaacactgaagaagatggggcttaaaaaggacaagttgaggccttgcatggtaaatatgtgcggattcactggcgacagtatc

SEQ ID NO: 96628 - DNA, 579 bp, Cannabis sativa
aaacaatatttttcaaaaaatagagtaaaaaaatatacttatatctaaattttaaatttcaacttcaatattaaaatacaattaaaattatcaactataaattctagattgtaaattaaatactataaaaaaataaattttaaatgtaaaatagtttaactattaaacttaatttatatattatattatagataattttagtaaaaaatatataaatcggtttattcggtttgttcgggttatttaggcgagttagaataatattcaacccactcaatatattcattaggcggtttgaattttcgtaaagttattcgagttataggtttatttggtttggtttggacggtttattcgggttagatggtttgtaattttttttgaacaaccttaagcaaaatagtacggattgaattaaatgaacacccctactgcaaatacctcaatgtttgaaaataatttaacagaatggtaataacggaagtaacaaaaaatgtaactttaaatatttaatccatataaaagtatatgaaattgaaaacatattatgccgcattaattgattactgaatttcctta

SEQ ID NO: 96629 - DNA, 561 bp, Cannabis sativa
tctctctctctctctctccattagtatataagttttttattttatttcttattcagttcttcttcttcatcttcttcttcttcatttttttgtagtttttttaatttttagtcacgcttttgggaaaaaaaataagagtgtggttttttttattctgattttccagaactgttcttgcaaatatagccgctgttacatttgcaatgagttatttatttgatgtcaattttactgttcttgctccatctcgccaaaattaatggttgtttttcaagtgttctcgtgttgctgtggtagtactatctgtgagtgtaaaagacggagactataaatacatttcttcttccttctctatgactgtttttgtgttttttttattctgattctcctataaatacatttgacgagctcactggtaaaataattttgaggggtgtggttcttttatattttttaagtggttatatctgatttattgttttacattttgtttttgtgttgttctagtcgtctttttattttcatttttaaggattgggcttgcaaatatagccgctattg

SEQ ID NO: 96630 - DNA, 533 bp, Cannabis sativa
tgtcaatgcctaaatcggtcctctcgttcaaccatggccgattctagctctgataccatgttgaatgagagaaacaagagcaagaaaaaccaaaagaacaaaatcagtggattgtattgttacactgattgttaagatgagctttaatatacaaagctaagagaagagaagttagttacaagggaaagttagttataacaagagtgagagtgagctgaagtgataactcactgtaacagaaactaattaatttcttcatctaacattaccattgaagtttccctaacaagtttgtaaattgggtaataaaataccattacaatatttttacaattttttagcaatataaatttcattagaactattaataacatagtccagagtccagagaacagagtttgcacaccttgattacaaattaaaggtttgctcctttttgtgaatactgctcatcacataatgttgagtagcacttttggagatatattattattggtatgttttaatcaagtctcctatattttaatttaaaa

SEQ ID NO: 96631 - DNA, 1127 bp, Cannabis sativa
tagggataagacaaaaaatttccaagattggaattagatatacaatcccatatatcaccgaagtttcctaaccaaataaaaaacatgaaaatatgaggatatttgtccttaaaccattggaaatacctttgtacccattggagatttggccatggagaataccgatgaacagtaacatttctccctctatcaaaaacccatctcagatatatgagcttttgtcctttccatctctcctgcctcatgactgagaaattccacccaatactaaagccaatcatatgcttcatccatttacacaaagaagttagggataatggaaccttccctggatcccatatcacaagcacgtgaccttttatatatttattacttgagtgggtccactcaattatgggatttaatgaagaagtgggcttgggcctaacctggtacgagtgtaaggttccatttgaaacataaagtgttaaggggtcatttacatcaatttgactcttttgggccggatccgaatagtaagaattgggctttatacaaacatcacatatggacttaggtctgaattcatcatctccagacgccgactccgattgtaatagaatccatcgacacccacgttcttcttcttcttcttcgatgttcatgaccttctccgacgacatctctttcttccccagcggctgtaacagcgactctaccttcgctagtgatgtcgatttctccaaaaggaagccacgcgactgagaattgcgatcaccactgatgggcataataggaggttcattcctattcgacgccgatgatggaatcgtctccagtaatcgtttctcctccggcgcccactccttcgatgtcaaatcctgcatatatttctttgccagcgacgttttcctctgctggctcttttctggcgacgtgtccttcacaccgatgccttccataagttgatcggatacccttaatggaatgttgaagctccgatcgcaaggactatctggcacatcaatggacgaggatgatccatagcgagactccgtcttctccggcgttttctccggtgaaatcattgttgcaggcagcgatggcatctcttccttcagctcatctctaacaatattgcaagtctg

SEQ ID NO: 96632 - DNA, 1691 bp, Cannabis sativa
ggttactatgaatgaagcttgcactttttgttgttcccaagagttaatgaactatgcgaagtatttgatattctgagttttgtactaaatcatgagtgtgaccttttttcccatccccaatttgcaggaggagccctatatctattgcagcagctgttatctacatcataactcagctctcagacgataagaagcctcttaaaggttcaaatatcctcactcttgttaatcaaaattgaaaatggatagaattctcttgtactgatttaaatctttgaaagatgggtagtcatgaatcatttgatagtttctgtttcaagtgattacattgttaaaatgtaatataaactatcttgggtagttcttagttttctcaatatatagtttttgcaagtaaagggaattcgggtgccataacaaacatattgttgcaagcaactgcctagcaaatttatgcatttgatttgagaaatgtgcatgcagatatctctgttgctaccggggtggccgaaggaacaatcagaaattcgtacaaagatctgtaccctcatgtatcgaagattataccgaactggtatgccaaggaagaggatctcaagaacctctgcagcccttgaatgatgtaatagagagctcgaagaagaggcgggaaatatacagatgactctgaatagtttttgagagttgaactgtttttgattgtagtgaaacgttcaacatacagtggccaaatatttttatcttactgtttttttgtcatagtaattttacagctgaaaattttattatctgcttaaaactagcaacaataattcaatatatttctatttttttatttgatgcaccaaattttaatatgactgcatatgcttttcacttctctaaaaaccatcttctgtacacttttgatagattagattgcttgtatgaagagcactttaactcatcactttcacttgtgatatttacatgtagcctgtttatgttgaaactttcaactctccaactgtcttgatagacattctaattttagtaaaagttagatattctatatcatattttgctaattaaattagatccaataataatcaaatatggctccaaattttaggaagacaaaactcaagtgtcataattttggagccaaaaagtttttttttgagttatatcgtgttatttgatcttatagaatcagttttatttcaattataattagtttgagttattttgtgttatttatttttatttattatgttacagaatcggttatattttaattataattaatttgaattattttgtattatttgtttttattcgttatgttatagaattgattctatttttgtttataaatgagacatctacttttggtgattttttcagtaatttttttcggcgatggtaactttttcagcaattattctgtcgagagtgattttttcaataactttttcagtaactttttcggtgacattaacttatttattatttatttatgccataaaaaaaataaactctaataattttttcaatatattctgtaatttcttatgaaagacctttcttcttgttgtatttcaatttctttttctattttatgtttaatgtaaagtgtggttcatacaaaataaaaatgggctccacataagttcaagctttttccaaattaaaaaaaagcccaacaacaa

SEQ ID NO: 96633 - DNA, 1283 bp, Cannabis sativa
ccctctaatccatccaaagaacccaccaccctcaactcatctggtcctccgtggaagcccaaacatccgccatatcacattataattgaaagtcgtagctcgtgggttaatgggtaaatatttttaaaatattttattaaatgattgtaaagtatagcatatttttggtagatctttgttttttcgttgcgaaatttatgctatgcaagtgcacacagtcacaatttgtaaaaaatcttggtaagaccaaatatcgtcccacaaggactgattattagttaccaaataattaatcttttctttctatttgatttaataaaatattagagaaaaatgaataaaacaaaataataattaaaatttagagaaataaacaatgaggaaaaacaggaattacccaaccatcttttcttttacttcttaaagaaattacccaatttctcttcttcatattcaatcgaaaaattgaattaaatagttcataatctgattaagatttacaaattccatctatgtgaaaactccctatatttctatggaaaaatttaatcatatagaaagtattaaatacatcaactcataaaattatacaaataatctaaatactttcgttctaaatcaatttgcatccataacaattaaagtatattcaaatcacttttaagaattttgattcgaattcataaaaattatatgtgatcaatcaataattgcacaatttaaatcagatttcatgtaatcgaaacaataaaaaaagatgaaattgaatatctactttaatctatataaaaaaaaatgaaaatagttcacataataatcctaaaaggattttgccaatgacaatcatcttaaacatccaaggattaaattaaaaacataaaagatgaagaaaatgagagagaacactaattggagtcctccaatggtgattcctatgctttcagccatcattcattatctcctaatgtcctgaaaagggaaatttgaatttttatgcttacattaccataaaattttcccctaaacttatacttaccaacatttctaatatatgacaactttattattttgtccaaaataccctcccaagttacatcaactcttctcttcccatcatcttcccctaaatgtacatcggactcattggccaaggcatcgggcccaagcacccaaaaatcggaccttatatcgggtcatcgggcccatcgggcagttatcttcaacctccaaccaagcccccatcggacgggcatcgggcccgatctaaaaaatccaaatttcga

SEQ ID NO: 96634 - DNA, 631 bp, Cannabis sativa
tttttacattcccgacagtttaaaaccgtcgggaaattcacattagcgacggtttttaaccatcacctatttttcctgttttatgacggtcgtataagcgactgtctgttatagaaaccgatagaaacactttaaacgactgtttaaaaacgtcaagaaaaactattttcgtagtagtgtataaattatatactactaatattggtacggttgaggtaccaaccaagtgtatgtgagtacaatatattattaaagggtatgatatagtgttactatgatatccaaattaagaatagcatttaaaatttactgaaataacaattttataaaaattattctaatttatttctatagatagtgtgagtggagaaaattattatagttgctatttattttaaaataagtataaagttgtgttagttgctaaaataaaagattttggtattctttaccgttaagaaaattatttaattagttaagagctgaaatataatttaagactcattagcgcaataaggtagaatgagtcagaactagcctatcggactagaactgagccatttaaattgacttgggttatatttaagagtgagttggtgatattattcttaagtatgggtacttatggtat

SEQ ID NO: 96635 - DNA, 616 bp, Cannabis sativa
ttcaatgagcatgataaattagtattataataaaagcctgtacctccgagacactttaaagagataagccatgcaaagttccattgccaaataagaaaagttttccgtttcaaggaaatcctcagggcagtttagcacaatctattgaaatataaaaatatgattcagaatttttatttcaaaccataacaaatttatacataagcacataaatcaagtttataaccaacatcatgcatgcattatatatttttctttaaaaaggggtatctaaaaactatagtcttaaatcactttagaaaaccaaaatgaaagggctcgtatcaaagacaaggacgccgtaccaatatgcagtacatcttagttagcaaggtaagtcaatttcactaaaataccatatcagtaaaacgtcataaatacatcatgtaagcctaatatcaaattaattttagggacccttaattatataacttaactactgatgatttggctacttaattttcaattttggcttgtttgatcccttaattattaaattatcattagatctccgaacttctacttcctaaaaaaactgatcaaattaatgacgaatgaagtcacaacttacatagtc

SEQ ID NO: 96636 - DNA, 774 bp, Cannabis sativa
ctgccgataattgttttttcataaacttttttatatcttttctaatttttctaaaaaagttatattttttttgaaatttttttcatcaattttattaacggtaatcatttaagattacatcactatttgtagattacttaataaaaattatagtgccgtttgataacacttttgtttttaaatttttttaaccacaaaatgaaaataaaattttaatttttaaaaaataaaaatttaaaaataaaaaaatgcgttttgtaactgtttttgtttttcaattttaaaaatcgaaaataaaagtttgttctgtaattttattttcatttttatttgttgattttatttaagtctggtgtagattcggggtcggattcgaggtcgggttagagaccgggtttagcaccaaggctgtgggagatttgggttcgggtttggtcggaatccaaaatattaattataaaaaaaaaactgtttaaaaaatattaaaaataacttcttttttttttttttgttttcaaaattttaattcttaattaaaaaattgaaaagtgataacagttttatcaaacatgtttttaaaaaatattttcactttttcgattttaaaaatagattactgattcaaaaagtattaccaaacactatctatatttttgtacacattttacttaaaaccccataaaaactaaaattctgaaaaattgcccaaggaggacccacggtcggtatatagttgtagtgtgggtgaatgcgttgtttttttttttttttttt

SEQ ID NO: 96637 - DNA, 546 bp, Cannabis sativa
cttgatgaacttcacagaaaactaaaactttcaattattatatgaaaacaaacacaaacatatttggaactacattcatttctttcttttaagcttatatgtcaaaatttaaagaacaaaaatcttgttctctaaacttttccggttgataaaaaattttctccaactatttctattatagagttttgtctctttatttacacgtgttttaaaaaactaattatgtagtattttttgagctgaggtagtattcagtatgtaattatattgaatagaaaaagtatttattaagattttatttttaaaaatgatattttttaaatttaataaatattttttattttatttaattacacacgtgatactgagatgatgatattgttactaaattctaaaaatgctacacaagtagctttttagccgcatatgacttaagaggcaaaattctataatgagtttggaaggtattttcattaagagaaaaagtttagatggcaaaatttaaatacgataatagttgagggaaaaaagatcctatgtattcaa

SEQ ID NO: 96638 - DNA, 542 bp, Cannabis sativa
gtgtgtatctgtggtttaatataatacgacaatacgtatgctgtcgtttgtttatgttccgtttagatagagtagtaaataactattttaaaagagcactcttaataaataaggtataattgctacaaatttgaattatatctcttttctttttttcttttttttttttttttttttaaagaaaagcgtcattcaataaataaacacagttagatcttacggtcattacataatatgtttataagaatagttgatatcagaataaaaccaaacctctagtgagtaaacgccaactttaccacattataggcatcaaaattacaagtcctactaatattagagaaaaaacaactagtaaacaatggagaataactattataaaatgagacatagttttcaattgcctagtgagactcctcctcattaagagcattaataactaccctcgagtcactctccataataataaacttggaaccaatatccttgcaaccgataaagccaaacagctagtaaagtccaaccgagacgtttgaacctaa

SEQ ID NO: 96639 - DNA, 1588 bp, Cannabis sativa
tggaggcttgaagcggggacgttacactgggtcccgggtctgggttaagtctgggtttgggtctaggtcccgggtctgggtgtcgggaacgggtccgagtatcgagtcctggtctgggtccaggtcccaagtcccgatttcaggtctcaggtgcgaatctcaagaccggtctgggtttgggtcaaggtttgggtacggggttcgggatctgggtccggggtcagggtttggggttcggaatccaggtttgagtccaggtccgcgtccggggtctcgagttcgagttcaggttcgtgtctcaggtcgggtctgagtccggggtccatgtctgggatccgggtcctggtctaggtcccaagtttgggttcagattcaagtcgggtcctgagttcaatttcgggttagagattggtgttgatcatgaatcctttataaatattataatacaagctaatacggaccatttgttatgcattaaataatacaatatgcattgtattaaaaaaattggtcgtaatcattaatacaatatattgctttatccaaacatggtgctatttattatttaatataatacgacccttatatggcgtaccaaacaaaccctttcagtataattttacttataacaatgttcttttattttatctttcattggaaaaagaatatctatgcattcccattataattaaattgccatttttatttttatttacatatagattaagatttaataaatattgtggtattattgtaggtgttcaattaatatttgataatgtgcatgatgaacaaaagtcatctctctttaacctaacaaaatcatgtccatctttcctttttaataacacttataaaaaactattaattactcataattaagtagcatcttatgacactcgtaatggtattgtcactggtctctataactgatgcatatttaactgtgacaaaattaggtaaaatagatgttatgggaaaatagttaggtatgcctattctcgacagtttaaagccgttaacaataagtggcactataaccgacgattttaaaccatcacattaaaaaaaaaaactatcacagttttaaactgtcacatttaaaaaatcattacagttttaaacagacacattaaaaaagaccagagatatatatctcaagctccgacaaccctgaccagttgtgatgcttaaccacaacgcaactccaacaatttttaaggcccgactaacacagatcctccatcaatttgtagagaaaaaagttagacacaaagattcaataagacataaagagagaacactataatgatctatacacagagaaaaagaaaatgggagaaaaaaatctatgatatgattaaaaaaattagacgaagaatataaggcgctgtactcgaacattttagtggcaaaaatctcatatttgtgctccattaagatcgtcggtcgtcaaaaatagcacctcgcttgggccaacaacgacggatggagagagagagtgcggacgacaagagaggatgaagagaggaggggtggcgatggttgctcgttgttcgaaggagagagcgaggacgaagagaggagg

SEQ ID NO: 96640 - DNA, 503 bp, Cannabis sativa
tgagaaatgatgtactttttttttttatcgtacccatgaaattgtgagactaaatgtaatatcctttccaaaggtttaagaacaagattaggaaccttaattaagttaattatatattaataaaaaattatattataatataatttaataggtgaaactattatgatttgatggaattattatccatattttcatagaatttgatctaatagatagagaaaattagtattcctattttcatagaatttgatctaatagatagagaaaattaggggattcacattcaaacccttctttatttatctcttattttttttgagttatttatgtattcattctcccctataaatagtgaaggccaattcactatttagggatttttattaggtgctaagaatagagagaacactatgaaatatttgtaacctttctgagagatattgagaaattcacttggccggaacttgtgatcttcatatactttcataaaagcaatacaacaa

SEQ ID NO: 96641 - DNA, 1254 bp, Cannabis sativa
agtaaagaaagaagaacaaaagaagtgggggaaaaaatagaagtttcttctcagtccaagctcataacattccctatcaccgtacaatgacagaccataacagcctccaataaaagcaggaccagtaccagcatatatgaagcaattcacctggaatacaaaagagcaatgaagaatagtgactattgctgactaccaaatttggaatgactgaaaatattgaaaagggaatcaagaagagaaattttctgattattgagaaaattaattacagacaacaatataaatataaaagaccgaaatcatgtaaaacaggttttaattttgtatgagaatctattagactgatagctatatcccataaccatatttggttacacaggaaaatgctcatatgtgtacgtgatttctgcatatttataaagcaagaacatctgagccccacacatttagatggatttaatattaccctcttgaagagtaaagtaaatactatttttctgggcttgaaaaaaaggcctaattttataatgaaaaaccaatatttttttgatattactataccaaacagccgtaaaagggtgcatagaagatggaggaggaggaggagctgacagctccatatctattggtgaccaacaatacatattatgctatatcagattcactattcttctaatagcttaactggttcatttacattacctttatctaaaattcaaaacttttcttttagaatagttttgaaaacaaaacttcacatctttatccaaaaaataaaaaactacacatgatctcatctaatttactcatcaaatggtacttttggaagtagctaagatttgtagcttctcataaaaagacttttacgaagctatttttaaaattaaaataatttacatgattcttaatttacttccaaatttttttttttgatgatatccaaacactttgaaaaataatttttcactcaaaaaaaaagattttcatataatagttatctaacggtaaaaataagtcaaaatgtatgcttattttatacttttagctacaagtaaaagtaaaaacttagctaaatggaaccaattgtgtcaaaaaatagttaattaatacatgtaaatatttgacacttggccaagttgcttaacatatattttttttgagcattgctataaggcatcagtggtgcctagcaccttctcgacatgtcacgttacgatgggctagcgatactcctaaaagctattatattaa

SEQ ID NO: 96642 - DNA, 682 bp, Cannabis sativa
tggagcaaggtgtagctatttaggtttttagggtttgtttgtttttctttctttctttctttatcattatcttttttttttttttttgcttaattacttttttagattttctgcgtaggatagtgggatgggacgagaaagaaagtggagatgaatgacacttgttggcgataagcctccactgagaagggtgggtggcaaatagtagaagattgtttatctatatataatgtttttaataaaagaaatggaaaaaaattattgaagtttttaataattttttgttatttaaataatttttatgttgtgaaccaataaatttttgacacgtggaaattttaaaaactacaaacagagctattaaatctggtattcacagactaacgagaatgttgagcttagagattgtaaccacaattttttgagattaggacttacctgcatcaaagtaaattttttagggatttatctgcataaaaataaatttttagagacttatgctgcaatttaatattatcacttgacattttagagaggaattaacgaatctgttaaaaagaagaccaacagacttataagaatctcaaacttggggactattactgttattttttgaaattgggaactaatttgtatgaaagttaatttttttgaataattttatattaacgtatataattaa

SEQ ID NO: 96643 - DNA, 748 bp, Cannabis sativa
tttttatgttttattaatattgatgattgttttctttcattgaatgtgacaatagttttctttaaactttttttctataaaattaattcttgattatattctgtagtggtagaagttaaagttgtttatagattgcttcttaaagtctgattttatcttcacttttagaaacaagagctgctaataataatatcttgcatttgtattttgttatctatttttgctaatgacaactattattattattattattattattattattattattagtgtgttagattgggaagaaagactagctaacacctacctgcgactgttacagttttttatttttgttcaaatttattatgcactatttaactacttcaaatcatctgtagcattcaacaaaatttcttgtattaatattttcatataattatcaagtttaaattcatgtataataaattgtgaaataatgttactatcaaaatattgaaacaaatataaaatttgtccgcttaaaaaaatataaaatataaaatttcaaaataaaaataaaattaaaatattataaatatgaacattaactttgcatgcgcaaatgcaagcactgataaatttattctattaacgatatgattgaattgtgctcaattatagcaaaattaaaaaataacatttatatattaatctaatagaaaaaataaagaatatctaaagtaagcctctaatgcatcccctagggatagtttgatactttgaa

SEQ ID NO: 96644 - DNA, 811 bp, Cannabis sativa
  modified_base (742)..(776): a, c, t, g, unknown or other
ttgattaattatggaaattatgaaagtgttttttctaaatattatacctaaaattaaaattttatttacaaaaatacctttaagaaaattatttgcacaaattttgttgtgccacatcagcatacataccaaaattcaaaacaattactgaaaatagaaaaactcgaaaaatctcgtttccataaatttttgttttttgggagttttaaaaaaagcaatcatttagatacttttgatgtgaataagacattaattggttacttttctattaaaaaattatttcaaaattttacacatatataaataataaaatgaccattttagtatgtgagaaatatataattttcggtcttcagaaaaagatgactaatattaggggtaaaaatgttaaattttaatagttaagaaaacataacctaacaaaagcaatataattatgtaactgttatattttatgtaaaatttctaacaaaatatatattttaagaggcatgattaaataatatggaatgttcaagagataaaaatacaaattatttattattctaattattcttattattatgtatgtctatgtgataagaataaatatgtaatattatatatcataattaataaagcattaattattggagtctagtctacattattatttttggcttttggagagctacacttttatttatttagtctatttagatacacgtgagaaaagactaaattaaattattattattattannnnnnnnnnnnnnnnnnnnnnnnnnnnnnnnnnnattattattattatgttatatatgttatgatttct

SEQ ID NO: 96645 - DNA, 521 bp, Cannabis sativa
caaagaaggaagatgagttacctgacatcccaaccaccattaacaaatcagactcatctgagaagagacaggttccaactggacccactaagctcaagtttgaaggaaagagaactgctgctgaaaatctgttacagaatgacaatttcattcccacatgtcatttctgcaataggagaggtcacattcgtcccaattgctacaaattgcagaattacttaaaagcaatgatcaatcgaccagatagtttccctcaaccaagaaagtcacatggacgcaaacctcgtcgagaatggaaaataaagtccaaaccaaatcccggtgttggattcgttgtaaagttatccctgtctgcatttgttgaagggtagtggtattttgacagtggatgctctcgtcacatgactggaaataagaaacttttagttaactacaaagacgaaaaagggggatccgtgacttttggcgatggtaacaaagggcagattgctgggagaggtgatgtgaacgtgaatggagtg

SEQ ID NO: 96646 - DNA, 607 bp, Cannabis sativa
tttcaatctattttcacaagccaccaagttgatgatcatgctattaattcaattttagaagttgtcccaaccatgcttgatgagaatgcaagagatatcatttctgcgccatttactgcatctgaagtttatactgctctccactcaatgagtgatgacaaaagccctgggaaagatggtatgtcagtcatgttctttaccaactattggaatattgtgggaagtttagtcacagaatcggtgttggaagttctcaacaatggtgctgatcctactctcttcaatagcactataatcactcttattccaaaggttaagaagccacagtttataactcagtatcgaccaatcagtttgtgcaacgtactctataaattggtttctaagtcaattgtgctgcgattgcaacctttcttgccattggtgatctctgaatatcaaagtgccttcatgtctcaacgattgataattgataatgttctcattgcttttgagttgttgcactcgctgaagaatcgaaaacggggttcacaagggtatgctgcaatcaagctcgacatgtccaaagcgtttgatcgcgtggaatggaattatattgctcagatca

SEQ ID NO: 96647 - DNA, 632 bp, Cannabis sativa
tattgttttaagtgaaaaagaagtgtatgatgatgatgatgatgtattgtattttatgaagttgattttgtactttgcggaaaggaagttttttaagaaaagggcaatgaaacttttaattggcttttggctttgttttctattacatgttactcttttccttgaatagaaaaagtgacatagttatctatagagtatagacgtattgtttgagcatgttgtcggactcacgggttgggagcctttaatcattatgcagttgcagccttgtgaataacatggatgatgggctaatcacgggttgatccttatcctaatttactaatatatttatatataaatattaaaatttaaataaatatttgataaatataatgtatttttgtttgtatgtacacatttacaatagacactattagacagtacataaataaataatttttttgataaacatatatatatatatacatatatatgtatctttattttgtaaagaacatacctatacacatttgatgtagttatttgtttttttggttgaaaacattttcttgaaattactcatcaagatttttaacattatagatttgaattgtgaatgaaggaagccctagatagaaattatgaggaaa

SEQ ID NO: 96648 - DNA, 881 bp, Cannabis sativa
ttttttgttcctccacaatagttgtttgttcctaacaaacaaagaaatcatagtaattttttatatgtaataaaattaaattgttggtatatatatttaaattctattagatataacatattacatatatactacacttaaaatcaatatctcaaagattggagctctcattgcactctaaaacaatgcacagttaaattgaattgtcaaaactaaattaaatgattaaacactctaaattattttttggtgttaatttttttgttaggtaactattataaaataaaattatagtgttaattttattttttagtgttaaatttattattttagtgttaattagtctattatgaaataaaatattgtcacactataaattcaggggttgtgcactgaccattctcaagtaaaaaagaaagaaagaaaaaagaagacaatatggaaggagggtggtcataagatgaggcatctcagagtcactttcattaaacaagtaagaaagagagtaagaatagttcaaaaattctgacataaacaaagcttaataatagcaacaaggctattattaacacagagaaaatatagaaaatataatgaaaacaactccttcacaatccagtcacaccaaatagaaaatataatatagcattgaacttttttcttaatttttaaaaaataacctataatgagaatgtaaaagtacaaatgttatataaaactgaagaaaatgtagcaaatacaaaggtagaaatctacaatggtaactggcaaggggcggtgacgatctgcggtggtaatactcaaggggtggcggtcggactggtagaggcgagatgatctagacttggtgctgagggaaaaaaagagacgagtggtctgga

SEQ ID NO: 96649 - DNA, 1537 bp, Cannabis sativa
agtttgggtctgggtttgggtctgcgtctgagtcctgaccctgatcccattctagtgtcccagttctagttccaattccaattcctattctagttttagctattgggttcgggttaaggtttgggcccaggtccatgtttggggttgggttcaggtccttgttcgattcctaaatccagacaccgactacgggttgggtctaagccctatttcctaagtcctgggatgagatctgaatcctatttaaggtcctagtttggttccaattcgagtcccgagtcctggtataggtcccaagtgcgggttgaggttcaggtcctagtctgggtttaggatagagtttgagtctgggtccccaatctaggtttgggtgatgggtttggatctacgtattattagtctaggtatgggtttgggtccgtgtcccaagtcttggtacaggttttgaccaaggtctgggccttagttcgagcctttattagggtgtgagtccgggtcctagtccggttttggttctgattttgggtctgagtttgttttctggtcctgatcctattcctgggtctcagtctatttctggttcccatttcgtttgaagaggtacgggtctgggtctgggtccgtgtttgggtgtgggtcctagtttaggttcgagttttggtctaatgactggtctgggtcccagatccaaacaccgaatacgagtcgggtccaagcctgggtctagatctggatcctaaacttgggtccctgtctagttcttgtttgggtctcgggtccctgtctgggtcctaggtttgagctcgggtctatggttgggtctcgctcctagttttgaggcctaggtcctaactttggatcccctatcttggaccaaaaactgggtctcggtctgattccaaattcgggttcaggtccgaagtcctagtttaagtctaggtccttgttcgggttcgtgttcaggtttgggttcgggtcccagtctcagcctgagtccttgtccactttggtttctagattcagttttggttctcggggtacgggttcaggtttgggtctgggttcgggtccgggttcaggtctggtcctggtccatgtttgggttcaggtttgggtttgggtttgggtctggctcttggtcccaaatccaaacactgactatgggtcgagtccaagcttggggtcttgatccatatctcggtctcaggacccgggtctcaagtttggtcctacgtccgggtttaggtctggggttgtgtcccaattcctagtcttaattcttgggcccaattccctttcccggttctggggcccaagtcccgagtcctagtttttgggccatagtctcgggtctaggtccctcatccatgtatggctcctaggtcctagttttgttcaaggttcaggttcaggttcgggacccaggttcctatccgactctaggtcctggtttgggtttgggtttgggtatgggtccgggtccaagtcctagtccaggttcgaatcccagtccgaggtcctgggtctgagtctaggt

SEQ ID NO: 96650 - DNA, 565 bp, Cannabis sativa
acggcaccaaagtccactaaagtcgaccgacctagtatggcattataggcagtgggacagtcaactaccatgaaggtcaaatgtttaaacgcacttgcttcgttatctcccttgagggtgattggcaattggattttacccatgggcattagatcatcaccattgaaaccttgcaattggataggacatgaagttaaatctgcttcaataagtttgatcgcttggaatgcgaacttgaataaaatgttaacagaactttcgttgtcaaccaagactctggaaactcgcttgttggcgatctatgcatcaattactaaagggtcattgtcaggggaacgcacattcttagcatcttcctctgtgaaagtgatcaagagattcatcatccttggacgttgtgcgagagattgtactagtgcacacacttctccgtcctccacctctagatatctcttttgtgcgttacgggtacttccaactaggtggggtctacctaaaattgttgctacatgcccgtctacaggtggcgaagcaattctaagaggatatggagtttctggtcctg

SEQ ID NO: 96651 - DNA, 516 bp, Cannabis sativa
gtgatgttttagtataataaatttttatgtatatatcatgctaattttagttaataaattttatagagagaaatttaagtggggtgatcacgataccatttaaattacgaaaatgtgatatttcattattctaaataccattagttcttaaattattttgtgaaaggtaatgatttgagagttcataatcaactccactcacgtcgctcccttttctttcttttttttttctccattttttatttattacatatggaacgtacataccaattataatttcctttaatatttaaaaaactctctctcctttttttttaaaaaaaaaaattatttttttcttctagttataccgttgaataagggtctttatataattcaattagtactattttacttataatgtatctaatccgcactaattttaaatttcattttttggatctaatccaattcgtacaatagctcaaattcaatttgcaaaagtacaaattaaatcagttattttaaatttattac

SEQ ID NO: 96652 - DNA, 829 bp, Cannabis sativa
  modified_base (784)..(790): a, c, t, g, unknown or other
ggcataaaacccaacacaacgcacctccgcctgagacagctcaggcctctacttcctcgagccaggccattgaaacattgtcggccgcagcgggagaagctggttccgaatttgcccaggcatttaggattccctactggggaaaactcaatgctctccttcccccagattgggatctaatcaatcttgcgagtcccgaagagacgcttgcgaggaacctggactatactcttatggtaagtcgatcatattgttattattttttttctttgttcctcatattcatttgctcgtaattttccaagcttttttttctttcttttacctctaatcgacgactcttggagcgacttagatacctggaaggcgaggtcaaaaaattattagctcaatgcggggttgtgattaagcaacgggacgatgcccaacaggaaatcagtcatctcaaacaggaggccgagaagttgaagaaagatcttgaagaagccgagaagaccaacaagacccaggctgatgaatttgagaagaagctcgctgagaaggatgccgaactcgcagggaaagaagccgaaactataaaacggtgcaacaaggttggcctccatactttatattgagcctggatggcgaatcccaacatggacagaagcttcttggaggagaaggaagaggaaactttggctttttgcgagaaggccaggaaggaggaggaagaggccgaggcagaggaagacgaagaaggtccatccaagtctcccaccatgtgttggaaatttattttacnnnnnnnttagatctactcacaagtatgtagatcggaagagcggtt

SEQ ID NO: 96653 - DNA, 531 bp, Cannabis sativa
ataattttctttctactctatacaataatggaaacattgtttttcttttacattgaatatcgtaacacaataattttacatgattcctaagtggctgatatcaatccatatacttgattaatttgaaaatcagttagaccataaatcacatggatttcttatggataagagccactcatagtttttagaataacatatggccacctctttcatggcctaccaaccatgtgatgttgttttgtaatattaacacagcaacaaataacatccctctgtttggtagatctagaaaatttataattatagcaataaattgcaataattatagaaaatttgattagtgatttctgtgtatgtaaagaacatctgtggattagctccatagtccgaaagtgattgaattttcaagtaaagaaagatattattgccaaattactgcagcattttacgagtcctgagaattaaaacatgttgacatatgaatgaaagtgaatagggcagaaatttataacaaaatcttgaaagaaatag

SEQ ID NO: 96654 - DNA, 582 bp, Cannabis sativa
ctaacgaatgcctaattagacgattgtctatatgtatcaaatcatacaactcaaattttgacatgtactaaatcgtgtttcttgaactaacgtccacatcgggggcttgttagtaaaattgaacgaaagttgttaaattcaaagatttcaatagtccaaaaagaatttttaacagcttaaaacgtttagagaacacaatttaatacataaaatttagaatagaggaaaatcctaattagcctatattacttttgactggttcaaaagaattacatttaaaatatacatcttacttattatataaatatctatttaagagattttattgtgctttaacatattattgtgcgctttaacagaatttttttggacttgttagacttagcatatactgttaactcctcaatcgtaaatacaggggcggattcacatataatcgaggcgggatagtcgccctcttgaaaaaagaaacggaaaaaagatatatatgcaatttaattagttacaatatgtatttataataaaagatgatatttataaacataatattaactttggtgtgttataaatattattaattat

SEQ ID NO: 96655 - DNA, 660 bp, Cannabis sativa
gagtgatgcttaggtaaatcagtagatataaagcagtagtataacaacaggagtaacaataggattaagaccagagataatttgattggtaaaaaaaattgagcaataggatatgaaacaggcgaagaatgtacatgaggtgatgaggaggggatgaatttgggaaatgagagttcattaaacaccacgttttgagctataaagagtcatatatgttaaaaattaaactgatatatttatctgcagcagagagttaaacttagtatttacgctgtaatttattattaattttttttaagaaaatatttatatatattataataataatatgaaaaaattatcaataacgttggttaaacttagtatttaagctgtaaattattatgattattattattttaaaaatatatattataattataataatataaaataataataacttgtaataagtccaagagtgggtgtgagtgtggggctgtcattggctgttgcatgtgataaattaaacagttcttttagtatttgtttcacgtaaaataataaaaataattttttaacatttacataacattaattaataattagtctttgatttttgttcccttatagtaattaataatgaataaaaaattctcacagaaccgtgttgaaattaaa

SEQ ID NO: 96656 - DNA, 544 bp, Cannabis sativa
tttgtaactcgatctttacattggattaaataaaatgtaacataaaccgaccaaactgaccgacataaacccctagctcaacctgggcccagtacaagtactggacgcccagattgacaccctaagtgcaactcgcatcagtttcaatagctaacaacttcctacgtggaattttcttagccattgtactaggatacgtgagagacatgtcctagccaagtttcacaatttggagacgagtttggaagaaactgcacccaggctcctcaggaccctactaggcgcccaagttgacatatagtcaacctgggggatatgaaggctagggtttaggttttcgagaacttctttggatatcaattcctcaaatctaacaaggaacaatgttgtgacatcggtttttatcaacaataacccgaagaagcacttcccaggtagattgttgtaaaaattattgtacggaagtatacatagtcacccaagtaatataatgataattagtaagatcgtctccacaagaattgtatatcaaattttatgtaaa

SEQ ID NO: 96657 - DNA, 816 bp, Cannabis sativa
tttaatatgaagatgttgtcaagattaatttcccgcacaacggtctgttggtcgtggaagtccagatagcctacaaaatggttgcccgaactatgatagataattcgagcctctgcaaatatcttgttcaaaacaccatatgaaaaaatggggctccaactcaaagacttaactccctatcttcagcccctatatggtttctccggtcagaatgttacacctctagggcaaattcgcttacccctcactgttggacaagctccaaagagtataactgtaatggcacaatttttgatattggatgttccatcagcctttaatgtcatgttaggccgaccaactttatatgacctaaaggctgttacatcgatatttcattcatgccttaagtttccaatgaaaaatggggttagatacttgagaggaaatcaacaagtttcccggaaatgttataaccttgccctaaccaaggctaaaaagggaactgcacaaggcggggatggagatgtggatccccgacttagagaaccaaatacaaatgttggcccagtggaagaactataagaaattagaatcgacccaaattttccgactaggaaactcaaaattggaaaaggtttgctgctcgaagtaaaatcaacattgataaaattcctaagagcaaactgttgggttttgtgccctaaataaaacccataacaatctgattagctatcaatcaaagaaaattgaagtgatttatgtttgcatgaatttctcatgcttatggtttaatatatttaatatatgcataaaatcagttaagtccagaacata

SEQ ID NO: 96658 - DNA, 636 bp, Cannabis sativa
ttaattaatattgtttactgtcatgatatcatatcatcattgcttaattttaaagatatatttgcgatatcaacacgtgttaatttaaagtattatatattttgatgattgatgtttaatttagatattatgtccaagggtctacatcggtcaatttaatcagatactgctgtgaatatggattgagctttataatacgatacgaaactaatattaacacgattcaacataaaaaaaaaagtacttagacacaatacggcatgcataaaaaaaaaatataaactaacaaacgacacgacatcacacgaaaatatgaacttaggtacgacacaacataacgagcttaaatatattttagtatttaactcatcaattataataaaaatttaaaaatatgatatactataataacaagagtaaatattattttggaccctgtattttataaaagttactaattagacattctgttttgttaaatgacaaaataaaccctgtattttctaaaattagacaaataggaccctaaacagtttttttgtcaaaataaaacttaataataatccgatctagagatgtttatgacaaaacttgttatattttctatatctattcatattaaaaattgtcttaaag

SEQ ID NO: 96659 - DNA, 786 bp, Cannabis sativa
  modified_base (280)..(281): a, c, t, g, unknown or other
tgcggatcggattggatccaaaatatgaaatccgcacttagtgcggattggatgttgtttgaccaaaaaagtgcggattagatcggatgaacaccctattgtggactaatattttcttcctttatcttatcgactaaaaaatgttaattgactataccatactaaacattttaattttacaactttttaattaatatctaacactaaatattatgaacgcacttttaaattatgatttactaattatagtgactacaaaaatttaaaatataaaaatatnnatttataatttaataaaattgttgctaattctctcccactcattaaacctttttattttttttttcattttcttaatcattttttagttaataattattttttgaaaaatcatatgttaaaaaaatcttctaactataaagttgttttcaaataataatttacagttattttttttatgaatcaaatcaattttaatttataattatttatcattaaaaaaatgctatacgattaataattatttaaaattaaaaaaattataaaatataaaatcaaaactaggatggaggagaacaaatttgcttctattgtcattcatattttttttatttaacattgtaaaatttttatctattttatcttattattaatatatgtatacatctctatttatgtatcattccaaatatttttcaaggaaaatgagaatatataaatatatgaatactccatgatatctttatatattaaaagtgtctatctaacggcatttcttggtttaac

SEQ ID NO: 96660 - DNA, 1287 bp, Cannabis sativa
caagtaattttttgttgtgactaaaagtcgatgacttttagtcacaaaaaatttatgttgtgatcactaaaagtaattattttttgtagtgtgtctacattaaattcttccgtgatcagctatttttatttgcatagtagaaatatttattaagttttggtactcaattttttcatttagtacaaaaagaggtatataattaatcatttaatttagagatttttcctcactcaaaagcaaaacacaattttttgatatcatggctagaggtttcatattttttgataagaaactcatagtcatgaaagcttaagattccacagttgatttgaaaaatttaagaaaatgtttgttctgctcctacttgggtccaaattcatgaattagatttcaaatattagagtgagcgggcgttgttcaagatcataggacaagtgggtaagctgataatgttggatgatttcacgaaaaacaaagagagacttaactttgcaacagttttgatagaagtggagttatctcaagagttccttgagcatatttcttttcgaaatgaatgggatgaagagacctttgtcaagttgatttttgaatggaagccgatcctttgtaagcattgtaaaaggatgggacaattagttacaaaaatgtaggaaaaagaaaattattactaatattggtgtaattaaatatcagatcttatatataatttaatatagatcagaattgctaaaaggcattattggtgcctatcatcctcctccgtgtcatactactattggtataattaagtatcgggtcccatataattttaaaaaataacttttagggaatattgctaatcaatcgcgaggcgtcacctctagatgatgctaagcatcatttgtacttaatagcaatgctctttttttttttttgaataaaaatgaaaacttcatcaaaataaatcaccccaaactaaagatgcaattacagtatgcaaagagtgactactaaaaatacaatcagcctcaacaagagaggatcaggccagacaatgcgccagcctattagcagatcgcttaacaacacataacaaaactttgtcaatatcggcaatcaacgccttacaatcaaaaataatatggccataaggagaagctataattttatcattttgtaaatttgaaattacttgaagacaatctgactccacgatcaaatcataccaatcattggctttaatccaactcaaggcttctttcattcccattgcagatcggaagagcgtcgtgtagggaaagagtg

SEQ ID NO: 96661 - DNA, 2673 bp, Cannabis sativa
ctcaattgaattagtgattattttagacattttcccatttctatcccatgtttttttattatttttcaatttatatttatagaaaaaaaaatccattacattctcattcttcatcaaataagatagattgatatagtaataataaaatttttatactatttattgctgaatcatatgaaattttacttaattccatatataatataaatagatagaacaatacgtatgaacagagaaacaaagagaattttttttttaagtcggaatttgcaatgggtaccaaaggaaaggggtggttgataaatgaagatttttggtgtttttttctctttagaaacaccttgtgtgaaatattaataaacatatttataaggggaaaaaaatatgtatgggcatttgagtttggaaaataaaattgggcaaagtaatagcttctctgttttggtaaatattttgcaatgtgagtttgtcatttttctttctttctttctttcataatgcagctattatttttggtggaattggtacacttgtgattatgctaatatgttgttggaggacattttgttggaagaaacataatcatgttcatcaaagtattgaggcattcataaaaaattgtgatcctcttcaagttagaagatacacttattccaacatcaaaaaaatgacaaactcattcaaagaaaagttaggccaaggaggttttggtagtgtctacaaaggaaaattacttgatgggcatcttgttgcagtgaagatgttaaatgaattcaaagccaatgatggagaagatttcatgaatgaagttgaagcaataagcagaacttcccatgtcaatgttgtccgattgttagggttttgcttcgagggcgcgaaaaaggctctcatttatgagttcatgcctaatggctctcttgaaaaattcatttatcatgaaaatgaaagtgaagagaattttaagttggattgggaaacatgttatggaatctcacttggcattgctagaggacttgagtatttgcatagaggttgcaacaagagaattttacatttcgatattaagcctcataacattcttcttgacgcagaatttgtgcccaaaatctctgatttcggccttgccaaagtttgcacccgaaaagatagtttactctcaatgttgggtccaagaggtacaattgggtacatagctcctgaagttatctatagaaacttcggagcggtttctcacaagtctgatgtgtatagttttggaatgatgattttagaaatggttggtgggagaaaaaacatgaatgtttcaattgataatagtagcgaaatatatttcccgcaatggatctataagagacttgaggccgaagaactcggcctcaagaggattatgaatagagaagagaatgtaaaagtgaggaagatgattatgacaagcttgtggtgcatacaaaccgatccatcgagccgaccagcaatgagtagagtcatagaaatgttggaaggtagccttgaatcattgcaagtaccaccgaagcctttcttgtgttcttcaccaagcttaccaagctcatcaccatcttgttcttctaacacatttgtatctctacaaatctcaaacatatgaatgaaagcacttggtagttatttaaattttaaactcactattaataaaagttcaatgaaagacaaagggaaaggtattttctattttttattttttttataaaccgtcctaacaaaaccgaaaaaactaaccaaatcaaaccaaaattcaaaccgtccaattaatatatcaacatctccaatatcctagaatatactctaccaacaaattcaaattttggagctccatagtgaggcctcgacaatctcataatctctcaagaaattgaagttgcttaccatctagttgagcctattcaattccaaacacgaaaccaaagaacccatacataaagctaagaacagcatcttgagaattaaaagaacacactgttaagaatctttattgaacttgattatatttagtacattatgagctttaagtatttaatgaatgaaagtaagggatatttatagcaaacataccccttagtacactagaactaaccaattaactaactcagttagtcaattaacaatattaactaactgatccttattaacaatttattataaaagcctacctagactaattgcaaaggcatacaaatacaacaattctccaccttgcctttgtaattacttgacttaggcacataaacttttgtcaatcagtaagggcccgtttggtatgtaggaccggattagattagacagactcatttgtccagtccagtatttgaacatgtagaaactctggataattaattaaattactgaagttttttttataattaattttaatattgtgtatataattaaaaattctccaatataattttgtgttttttagttggattgatattaaaaagacaaatagttaattagtgtatatatgataacgtaatgtaaattattaactataatatttttggttgtagtgattttaaaaaaaataaataatatctttagtagttgtattaatttagatttatcttaagatcaagggctcaagttcccataatgtcatttttccttttaaacatatgcaattttttttttttcaaaaaa

SEQ ID NO: 96662 - DNA, 627 bp, Cannabis sativa
gaaagactagaaatacttaccaacaagagagacttcttagcctttcaccacacaaagctctcctccacaccacttgaaaattaaagaagacaactgacaaataaaaattagtggtcctacttatatagtacatttataaaggagggaaaataagtatttcaatgaagcaacatattttttaaacccacagctctatacacgggttgcaatagttttacaattgatgaatgtatatatgtacacactcatgtgatcttccaccaactaaaaaatcactacaaatataaattgtctacatcaatagaagtcactccaagtaaaataaaaaaaaaaaaaaaaggcattacattaccttatatgtgtactatgagcataatatatatatatatatgtgtggaatagtcagctgaagactagtgtaatagacacactcccacatatacatatatatagtacttatttagaccaccacacattcctagggtgatattttcaaatcattaaaatatattgtttattcacatttcacatcaagtttaagacatgaagtaacaatacacactcatttaaatatttgttgtgtgcttttttacttcttccactacacaatgatcttatatccttata

SEQ ID NO: 96663 - DNA, 563 bp, Cannabis sativa
  modified_base (256)..(257): a, c, t, g, unknown or other
ccatttgttgatatgtatatatatgagtgttaattataacctcctattacaatctcttattcaacctccacgtccaaaatcacatgtatttttttataacagtatcatttctgtaaatttttgaaaagttccgaatagtttactgtaccgaaaacagaatttctgatatttcagtctaccgcgcgcgctcaaaaaacttcaaacgtattttccacactgtaaattattcgaaatttttcaaaaatttacaaggatnntgttgtaagcataacgaacacctcgtgaaaaaaaaatttgaaaaaaaatattccgacatatgttttcgggcataaaggttgactaatagattgtaacagaaagtcatctttatttatattttcattaactctgtaagcataacaaaatttcttatttaaacaaaaaagaagtttatttatggaattgacatttggtagtttcttatcaaaaatacaaaaacactcattaattgtttaaatcataattacaccatacaatctgttatttttttgattgaagttattaatctcgtaatgatgtgctta

SEQ ID NO: 96664 - DNA, 706 bp, Cannabis sativa
ttgatgggagacagaccagttatcaaaattaatgcatccttgaattcaaacttatttggcagcacacaatgatccttcaatcattcgtgtggctcccgagatagtaaaaaccacctaatctttgtctccttgagggaacgacctacacgaattaaaaatataaaatttctaggggagttggacactcccacctcataacttggtataaaaccttcaagcaggctagaattctgtcagaactcagaattaactaaaaaaggaaaattctgagataattacaaaattccttataataatccctcagagggagtattgcttcagctcttatatgattgaggctccaagtgcctatcctagacgagctaccggtactagtaccaccacactcgtctcggatcactctttcaggggaaaacaactaaactcccccagagctacaaacgtaacacgacatccttttttgtatgtaatgccgcaagatcttagtatatctcccacatatgctcctatagatttaacctttgattcaatcagttcagcctcgaatgttattgtgggatcctaagggtcttggattttcgagcttgtgcagtcataattttgaaatctaagtcacctagtgtaaaagcaacagtgactcgaggtaaaaacaaagttctcgctaaaggaatagaagataaaatctgaggttcgagccaagctgcat

SEQ ID NO: 96665 - DNA, 1300 bp, Cannabis sativa
ctctccataattggttgttgtttcttgttctatcagttggccaaatgtaaagaaaaaacacttcaaatgggcctgaatcatgccgacccaaagtgcatagatgcctataaatagagtcattgggaaaggggttggaatcccttgtttccagagtcaaaactctggagatttgtaaattccattgttacacaaagcttaaaaatttaatacaaagactcgtggactaaggtttatacttgaaccacgtaaaatactcatctctaatgcttatatcattattttctaccctttaataatatttattattggtttttaaaaaacttcagaaataatttgacgaaaattggcttcaaggttcatttgatctattttgtgaaacgaagtactgagacaaaaaaaggggttaaattagtattttatcttttttcttacactgagccacatccatggactaaacattaaacttgcattccataactctttgattaaatatttaatgatagatggaatgattacatttgaaatttagagtaactattccaccaaacttattatggaaattttattttttaaatgagcaatatgctaggtagctagctatatcatataaagagtttacattatgttgcaggattagaaaaatagtatgtataagaaatgcaagttcttgctacaaaatataaaaggagaaagtcaagtactctaataaaatgcttacccattcacagctgtattggggcttgttattataggtttatagttctcggatcgccgctatataacattgtcaagggtaaggatactactacaaaactgagtttttccaattattttaaacagccggataaagtattcatgtcagtctctaagactgatgcctattcaaccgtcgggaaaactaggtagaataggcgattgtggaaaaatgtcagaaaaacttttccttgattacactgaattgtcgcctgtacccttaaaagaaatcacaaatcttgaaccgtacctcaccgctgaaaccagatctacaccactaaaaccagatctcaccacatttcagttcaatacagtatatatacattcattagaaatattttaacttttgcacacggagaaggcaaattccaataatttttcttcgaagtactcaaccatattgttcctctgtcatggatgttcaagagattaataagattttcacaacgaaaatactaatacaaaatgaaaaggtatatcaaactctcacctctggttcactatgaacaagaagagacggggagcagcgagggagagagagcaaggt

SEQ ID NO: 96666 - DNA, 514 bp, Cannabis sativa
tggatttaaaacgatgtttgtgttgatttgcatggtatcatgatggtgtatgtgcttatttgatgattgtatgaaaatcacaatgtatattgtaaaatatgttttatttcattatgaaaatatttctactggaaagtagacgaaaacacccatcctgaaattactccaggtcaagcgtgatgaatttaggcttttatagaatccaatttacattttttatgaattagttataatttttttaatttggatgaaaatatttgaaattggatgcacacgtgtgcgagcgtgggtcctaggcaccggtcggacagcacgcatcttcagatacgagctgaccgagatttctcggacacagccctgtctgaagggctgctcacaccgagcatcattggcatcaaaggctgcatgcagcctccttcatccgcgcgcgtaggggtatgcattgcatacccctgtgcaccagttttattttcgtcataacttttgattccaaaatcgtttttcattgaaacaa

SEQ ID NO: 96667 - DNA, 806 bp, Cannabis sativa
catcaaaatcattactctaaatatcatttacccgccgcttccttaatagatatggatcatcagttaaatgtttgctctgccaataccatgtagtgtaagttctattgaagcctcttaaatacacatgatccttaatcatcataatatttacttttgatctattacaaatctacgcatgtacaacgaatacgttcgacatttttagaattctttagggcaaacttcataaatgcctcgaatcctacttgaaatcgtcgtgtgtctctctccttgtgcatcaatgatttatgcataacgaaaatcctaacaaaaaaatgtcaatgtttagtactgaattactaactagtgactcaatttcaaactctaaatatatttttatgtgtttattaattgagataaccctaaaatgatagcaattgagacaatggtttattcatattactaactagttactagttatatgagttgtaactaattagtttctcacaactagttatattgatggtggtgatgatgagaggaatttacacaacaattcgtcaagtgatgacgacttaaatgatttctaattatcattgcatttgccattaatattttactttgagttttatgagtcaagtgtgtttatggcatgtaatttttatgagatatttatagtatgtttgaaatttatgtggtattttatttattcttagatgttctaaaatattaattcaatataattttttaggcttatgcctcaaggcttatttgcgttatttttaacattgaaccaactagtaactaatcttactctaaattactaa

SEQ ID NO: 96668 - DNA, 1094 bp, Cannabis sativa
ttttggatgcaacgtcctgcttccggagagcctattgtaaatgatgatgctgttcgtttttttttttgtgattcaaggaggaacacttgcactagcactttagattgataaactcggttgttatattcttgtgtgacctcaaacgtttatactgtaatagtgctcatttttggtgtgtagatagtctgtatgtgcagttattcaacttaatgaacttaccagcactcgcactagcacttcaagattaagaaactcaattactagggataacgtcaacatttcattaaaccaaagaaatactaactcaggtgtgcggaatttttgaatgccactgcaacccttgctcccgtataccagggtaacactaggctctcgtataccaaagtgtatgtgacatacatgactctcgtgtaccatgatttttgtgaatgttcatataacgtacataactctcatatactatgttttatttgccccccaagtgatcgaataaatacctccattggtcacttgtcatgccgaatcccgttgggctttgttgatcatgtgtctcagagagttattacatgtgtaagcatctgtccacttatttggagatttatgggttggcagtgtttaactcactaaagaaataactgtagttacctcaagaccaactctacaagctttgtttagcgcttgagagtgtcgtcagcagttgcagactctcgtttttcatcaacacttagcttaagtgatccccactacactaatgtcttgttcgaataatattgtaggggtcataccttagcgatggacctcccaaataaaagatgactttgtcgcatcttatcggctcgagaggcgatcgtttcacttgcacaaggtaaagtaaatctcattgtgaagcgtactgtttagggaacaaattgctttattgatgatatcgtcttagatgctccctgttccaataccttggtaccaacactggattcaagtggcagtcatagaaaattcaaacctgtttgtcccgggttctaacgtttcagtggcgatataaggtccttccctctttcagtgggagtcttcagtgtcactttcttgatctatatctt

SEQ ID NO: 96669 - DNA, 841 bp, Cannabis sativa
ttttcttttcttttattattcatcttcttcaaccagccatgaagttcaaccggagcaccaccacgaccccaaccacatttcgactgctagcattcccagccgaccccagccaaccctagccccccaactccaattcccccatcgatagggtcttcattttagccatcgatagggatctgaaaataaacaagactagatcgaaaaataaatcaataaaaccaaatctgaaaataaaataataaaactaagaaaaaatcaagaataataagaaatctcagatcagttggtcttcattttggccttcggacaccgggagaacgagaacggcaatcatgttaacggtggccattgttggtgttttgcccggagtctaccgtgtgtagacaacacaactctgaacctccatcaaccacaaactcagagccacaactgcgtaaaattgactcgccgttaaacaaattttgacacttccacgaattaggtatcgtcttcgccctactcctccacagtcaatggaccattgacctactcgaactaggtatcgtcttcgccctactcgaagttcggtgaggcaaaatggacgacctactccaaacccccatgcaccattgacctgcaaagaaatcgaggaagaagagaagaactgtggtgatagacgattgggcataggtctgactgggaatggcagagtgcgaaatcaacgtttcaaggggtgctacatctagtggtggttctcgtttgggcgttacgatgccgaagatgcccacaatctggcttggagatctgatgatcttagagaatgtagagggaagaagaggcggaagaagatgacgtctgtagg

SEQ ID NO: 96670 - DNA, 554 bp, Cannabis sativa
gctttattatctttgcctaatgtctatttgtattttgttaaacgatcagtaaatcgtactgcacattatgttgctaggcagtctcgattttatgctagtggtagcatttctgtttctccaattttctatgaacttcagaatatcatgtattcagaatactaatttatttcattcaaaaaaaagtcattaaccacgagtcacgaggtctaattttctctatttatccaaacatggaactaggcctagtaatccaaacccaaggactagttaataccacgaaacaaacaaacaggcccttaaactagtgaagccaaatctttgggcattggcaaaggcgggagttttaatggagagtgaaatagaaacaaaccacgcgggagttcgtaaaacaaaagcgcgcctattcaaaacataaaacgacgtcgtaattctttaccgcgcccaaaaataacatcaaagccccacgtgtccccaccatcatttttccaggaaagaatctcaatcgtacacgtgtccacccctgtctttctttacggatctcgttaaattccccc

SEQ ID NO: 96671 - DNA, 1912 bp, Cannabis sativa
gggtgattttacaactggactgaaggtttcctgaaagtcaaggccatattcttggtgaaatcctttggccactaaccgggcctttagtttggaaactgacccatctgtgttttctttgactcgtaaaacccatctgcaaccaattactttcttaccaggaggaagcctaacaagtgtccaagttttattctttttgagggccacaacctctgtacccattgttgcattccatttgggatcagctagagcatctgcaagtgtgagaggttctttggaattgatgtaaaccttcggtttataaaaacctgcttttgctctagttgtcatgggatgaacatttgtagtagaagggggaacagaggaagcagatataggtgaagacagaggacatgatgagggcaagggtgaagaatcagatggagaagatgtggtggtggagaggggaggtgcaggtggatgaaatacagtaggttgaagaggaacagggacagaggtgtgggattgagaactggggttggggtgaacaggtgggatgaattgagtgattttagcataagggaattggtactcattaaaaagaacatctcgagagataaaaattctaccagaggcagattgacacttgtatcctttatgtttcaagctatagccaaggaatgtacattcctcagatcgaaaagcaagtttgtgtctgttgtatggtcgagtgttaggatagcatgagcaaccaaatacctgtagttgagagtagtcaggttcgattttgaataatttatggagaggagtatcccctttgagaacagaggagggaagacgattaattaagaatgctgaggctctcacagcttcatcccagaaggacaaaagaagggaggcatgagcaagtaaagtgagggcagtctcaatgagatgcctgtgttttctctctgccacaccattttgttcatgagtggtggggcaagagagcctatgatgtatgccatgctcagtgagatatggagagaatgcttgaaactctcctccccagtcagattggagcattttgatgggtaaattgaattctttttcaaccagatttttaaagttgatgaatgtctgaatagcatcagacttgtttttgagaagataaacccatgtaaatctggaaaaggcatctgtaaaatgaacatagtagtgataaccatttgaggaaatcattggggagggactccataggtcagaatgtattaattgcaaggttttaatatattcagtagtagatctgggaaaaggtagcttgtgtattttgcctagacagcaagatgaacaaaaataaaaaacatttttattgctatttgtgatattacacttatgcattatttgctgaactgttttaatggcagggtggccaagacgagaatgccacaaatgaaataacgaactgttaacagtagtgttattagtggactgaacattattacaagaaatgcttgaaagagagtgagttacaggaacagaagcctgttgagacttgactgtgggtagaagagggggaaacacatatagaccagcttcaagagtagcctccagcaacacttgctgtgtctcccgatcctttgacaagacaaaagtcagggtgaaactcaaaaaagacgttattatcagaagcaaattttgagacactgataagatttttggttatctttggaacatacaaaagattattgagagttaaaatcttggatttatcaatagatagaaagagtttcttaccaatgttctcaatgtttaaccctgcaccattgcccatgtaaacttgatcttgaccattaaagtcagatttttgagagagattgctgtcatttcaagtacagtgatgtgttgctcctgagtcaggatatcaggcattatcacagacagtttcagcagtggc

SEQ ID NO: 96672 - DNA, 680 bp, Cannabis sativa
aagtactcttcaaaacttgggatgagtcctctatgcaaacatcgagcttcatccaaatgagatcggactaatcccttaaactgttaattcaattaattaattatttaaataaataaccgcttaacaatataattaacaaaataattaaaacaaataatattgacgtataccgcttcttttgcataatgaactttgtattgttcttctttttctagcacttgctcaaactcttcataacaattcaaaacatccttataaaatgtttgcatatattcttgattcagtgtatccacacaatttatatcccacctacaaattaaacatataaacttaattatttcataaatacaaaaaaaaaaaaaagtttatacgtttttaaagatttatagtttttcttttcttacaatttttaccgatttttttatttttgtacaaaaatatgaaacattatttttacgttgttacaacattataatatgtttccacaacttgaaagggaaaaaattgaaaaaaagttgtccgtaaaaatataaaaaattaaaaaaaaaaatgtaaaattaattttaggattttttttcataaattatcctattaataattagtctatatatagagacaaaagaaaaaatatatttatgtatgtacatattatatacgagtaatttgaaattcaaaccttt

SEQ ID NO: 96673 - DNA, 1016 bp, Cannabis sativa
tttaatatagctttctacacttttaatttcggttactataaataaaaaagtatcactaataataataattacataatgatacataattaaatacaatatatattaaaagtgagtttaaaagtattttttttgcttcctttaaactaacagttctgttaaatatatatatatacctacaaatctaattatttggtctcgtaaatcatgtctaatttctttatgtcgacatgtctccggaagcccttctaagagtactggataatttatttgaactttttgaagagtttgccaagaatactggaaacaacatcggcctcgcatgaagtatttgactcaaaatcgaaatggatatgttaaatttctatcatttgccttttgatctaaccttcaaatattaatagctttctcaaggtaaattgatcctcaaattttgcatctataaatcttggagtttttacactaaaattttcaacttttttacttttttttatttttttattgtggagtggaatttttttcaaatttactgtataatgtgttaagtattcacggttgctccacggttgttttttagttatttcactgttattttaattgttcagttttgtttctttacggtacttttataaaaaaaatatatttttgtaaaaaattccgccccacagtaaaattgtaaacttttgctcaaaattcaatatttttgtaaaaacctcgtaaatctttttctcttttaatttccatttttaattcctaattggttctattggcgttgatctattggttacggcccttgagtcatagagaaagccaatgttatttctttcaaaaatctaaaaggatgatggtcttggagatgtaaaatatgtaacaattttttggttatcattatcaaattacattaatgcgatacatgtatttatactatgatatatagtttcacattggtctttaaaagtttaagatctctcatttatctttttggacattaaccgatacatctttcttttagagtttcc

SEQ ID NO: 96674 - DNA, 998 bp, Cannabis sativa
ctcaatatctctactttatttttcctttatttgtttctctgtctctctctctctctctatgtgcatgatcttggtgtcgacagtctttgaagctcgtccctcgtcgacggcgtttgaagctcgtccctcgtcaatgccgtttaaagttcatttgtggttccagttctggttcgtggtcgatcgcgattgaagctcgtcccaggttggcggtgtttgaagctcatctgtggttccggttcgtggttgcgattgaggctgtatgaatctgacgttttttttttttttaagttttcttgtttaagctttactctagccaaaagctatgaatagtattatgtttttaatagtttatgttatatagtatataacataatataaaaaaaatagtatgtcttttgtcaaaaaatggcagctctatccaataaatggaatattgttttttttttttcaatttttttggtttaaatttatgtttatgcccattgtgaattactatctttttgaagatatgtatggaatttaattttaaactttgaatcattatgtatgtatgtgtatttttagttaatttttttttatattattttaatttgagtttatttattaaaaaaattaaaaaaaaatctgatattcctttttaattttggtacttttcatagaaaaacatttaatatagtggcactttttgtgtgtcactatatctttaaaaaaattaaataaatataaaaaaagaaaagaaaagggatatagtgacactctatgtgtgttgctgttactttttcagtctgacaaaatctgactttatacgcctatagtgaagagcagaaagtgaatgtaaaatggttcagtgacatgtgtggagtgtcactaaaaactggctttccaatcactttcattagtgacgcgcgttgaagtgttactaaatagttttagagttactcaatgtgtgtcactaaaacttgtttttctagtagtgataccaaatatacaatgagttt

SEQ ID NO: 96675 - DNA, 826 bp, Cannabis sativa
  modified_base (773)..(773): a, c, t, g, unknown or other
gaaaatagtgtggcattccagtccgttcttcatctgtaactttcttcctttcttcaaaggtttatcgatccgaattcgcactcttactcgtagatagtctctccacccactaagaaagttatttggatccatcttcacatatgatcccatgtaattgccaagatccttcagaactctttctggccgaaaaccagcctttaatccatgaatttgcacccagaaaatcagttccatgggattgatactacgtggattctcaccagattttagtctttcaaatatgagaggaattctataaaaattcaatgagaatcaaaatttggatgaatattaatgttttttcttattattactgaaataatgtaagtaaggtcgataatcgatattacatgtatatgtgttatattattattatttattaatataatttaatattgtgtttcacacgttttaatttaattattaattattattataatctttcataagacatcaactcattctatacatagactagggcgatccgctcacctgaaattaggatcagtcataaatatttagagcttatgtctaaataaaaattttggcattatttatacaaatacttagtaatatcgtgtaatggtaaatttttgcaagtttaacatttcatacttactttatttatttttatttgtgtaagagaactaaaataatattgttcggctggtcatgtctctaatatgaaagatatctcgattagattgtaaattattattttaactaattgctanaataaaatttcataatttattaaaaaaatatatatattatcgttgggatttga

SEQ ID NO: 96676 - DNA, 689 bp, Cannabis sativa
tttttaaataattaatgattttcaaatgatattaaattattttttataactagaagaactaagtatgagtttttctattcgaatttgaggttgttttgttttcttaggaacttgactttattttttgactctggtttggtttttttgagtaaatggctccttataaaaaaaaagatggaggagtttagccattttttcttctttggaaaatacattcaatctattcaactttttactttttaaatatttaaataaaaatactaaataattaagtgtaataattttaaattaaagttattagcataataaaattttaattatgaaattatatgtatataattgtaaattataaagagttttgctataaaaattttaataatttaagggcaaaaaaattactaaaagatccttatttaataataaattacaaaaaaaattaattaataataattaatttaattttataatataattaatcttcattaatgttttaaaatgaaataaattattaagtaagtattaggttataagttaattattatttatttttatttaatttttaaattaatcacaaccattcaatagtaatctaatggctaaaaaaaatgtaactatgatggtttcatatttaatgtaactattgaaacctcctcttttagattatctataatttatattgtctttttcca

SEQ ID NO: 96677 - DNA, 705 bp, Cannabis sativa
gagtagagatcatcatgaagtttgttcctttctccctataaattcattcactatttatagggagaagattcttacaattagttgtttaaaggaagcaacaaaaagtaaatatccctatattctagggtgcagttacaattcattgagagtcctataatcttgggtagaggagttaaatttgcatttgtaggatgcagttggagatattcgcagaggctattgaagaaaagatcaaggttcatttaccttgtttggcctttctgggttcatctactctagcgagcatgctgacagcttagctaggtgtttctagagacttgtctgcttgggaagatcgcttttactgagccttcgcaaggtatgttaatcttgttactcttggtcggcatgtttataacttggcaagattctttcaagaaagttattcacttgaggaaaccaaccttactggagacctgcacggtttatagctactcggatgtccaatcttatgacatgtgtctactagatcaggccactcatagcaccacatttggtaggtaaaaaaatagataacatttgccccccaaagtccccttatgaagcctgtccggatagggacttaggtactagccaggatgttgacacgtgcgtgagtcttgtgccattgttttgggcgaatggttcgtgcaaggtcaatgtgtcacccattagtcactcctccaa

SEQ ID NO: 96678 - DNA, 587 bp, Cannabis sativa
catatagcacccctatcgatttctatatgcatgcattgtccgctcaaccatccaactaattcacacttgcataacgcccttctggcttccacgatatactaattaagttccaatgattcaaccctctggccatcatgtaaaatctagcacccttcttgacttttgcaggctcacatggctactaagtctcactggcacgaccctctggcctccacacaaactctagcgccatctcaacgcttgagcttggtcttcttagccctactggcttcttagatgcattcattcagcaactgcgcatctctatcgatgtctttgtgtgacttacgccctctggcgcttaaacaagccaacacatcccactcaactatctcggcacttctatatggatcaaataaaactcacatgcaaacacctctaagtacaaccatcctctgacgattgcggcctctgcccccttggtctccatgtgtgtcactcttgacacaccatgtagcaactgaagcatcccatgtctatcccaatttgaaccatctcggtcgtcaactctcgaccactatcgcgactaacaagaatttggtggcccc

SEQ ID NO: 96679 - DNA, 660 bp, Cannabis sativa
tcgccccgccccgccccggtaaaattttttttaggtcggggctgacccgattcgataatacactctctacagctgcactttcgaagggtatcaatatcttttgtatggcaaatcaacaatagaggaaagtaccaaaaaagaaaaagatatattttacaagtcgattagaaatttcatcgaagcttttgtaaaaatgaaagattattacaaataaataatactttcgattgtgtctggttaagatattaagcttattatggcataattgttattatatatattaatttgcttagtttttacaattaacacacataagcttctccaatcgaaatgctaaattctggtgaaagagaagagtaaatttaaagaatttgaactgaaacatatatattttctgctataattactgataaaggtaagtttataataatgttattttctattttatatatggctgaaagataaagaaaaagtaaaagaggagccactacagaccatagaataatgattgataattttcaaacgagtgataaaaattgagaaggagccactatagctcactcaccacatttaattatatacaactcgcagtcagggtagtagaatactcaaagtcatagttcaatatggagattttcaaataggattctttattatttt

SEQ ID NO: 96680 - DNA, 1048 bp, Cannabis sativa
tttataaaaacacagtatttttaaaaagatttttgtatgatagtatttttataaaaattattccaaattatagtatttttgtaagtttcccaaattttattggttttatatatattttttgagcaataatatagtgttttttaagagttattttatgggaaaattgaagaaaaaatttaaaaatgttataaatattattaattatttagatgtccaaattttttatttattaccattaatgttatcaatattctctttctcttagtttctattttttttagtttcttaatatttgattcttatctcttctctattatctttctctaaattataatattacataatactaatagtagtattgttgtactactcaactttatccaaatgtagaatcatccatatatatatattaaaaataattaatttatgattttcaggactagcctaagctttgggcagcttgatccattgcacaaggcctccaaaatatttgggccaaccctgatgattttacctccatattttgaaagaaagagagagagagtatgtgtgtgtgtcgatgatcacgcctaaataatgaaagtgagagtgagttgtccctcctactttctaatagtagtatcattgtactactcaactttatccaaatgtagaatcattcatatgtatattagaaataattgatttatgattttcaggcctggttgcacaaggcccccaatttgtttttataaaaggttcaattttaatcttttgcgcaaggcctactaaaatgtttggcccaactttgatgattttacctctatattttgaaagagggaacgagagagagagtgtgtgtgtcgataatcccgcctaatgaatgaaagtgaaagtgagttgtacctcctactttctattttctaatagtagtattattgtactactcaactttatattgaattttttttttttcataatttcatgatggttatagttatctctttattaaatcgggtaggttatacacatcccacctaactcgttcaataaaaatttggagttgaaa

SEQ ID NO: 96681 - DNA, 607 bp, Cannabis sativa
cctgatttctatctctcttgtgtgaagcgccgaccacccaccccaggagttcttcgaccaccccaagacggctagacgagccacgcaatcaaacccaacgaccaagaaatcccaaaccccgatcccccccctctcacactatttctctctctggatttctatctctctctttcttgtgtacagcgccagccacccaccccaggggttcttcgaccaccccagccacacaggccacggaaccaaaccccaagacctagaaaacccaaccacaatccaccctcttctctctctcctttgatctgtctttctcgcccttttaagtgttttactatttttttttttgtgaagaagaaggagaaggagaaggagaaaatgaaagggaaggggaagagtaagagacctcagggtctcaattcccataatgagaatggccactaggccactggtggtccccgttctatctctgttcaaaccatttataactaaaataaaactggttatgtaacataatgaatgtgtatttttggggtagatatggaataggtataattatttggtgggttagagcaagttgaatgaatgtttttgtttgagttattttatttaa

SEQ ID NO: 96682 - DNA, 500 bp, Cannabis sativa
atgattttagtggaatattaattatgactaagtgggttccactattaaacttatttttggttaattttaatttttttaaatacttgagtttgaaaattttttaatctagccccacttttccaactcattataacatataaccatccaaagcttcaacgacttcttttcactttttccctacaacttcttttctatcaaatatagagttatactcaagactcaaacatattaaaacttaacctcattctgttttaagttgctagttacttgttgttaagatagttagttagttttctttttttttgtttttagttatgtacataaccaaaatctctgtttatataaaaattttgctctaattgatctattagcttttgctaagctaatttcaattaacatttttcgtactctatcctttgttcttttggtcatgtgtttctacatggtatcaattgctcttaactaacgttaatgttgtcttctacaatctatctcgctcc

SEQ ID NO: 96683 - DNA, 603 bp, Cannabis sativa
taattataattattaaataaatagttttaacatttataggattgaaattggaaaatatagtattattgaaagaaatgatcaatggttgaaataaagtggcaaatttgtaattaatgaggcccattatagtggctggccacttagtgtgatttttgcctattattttattcttttttaatccgtgtaattaaatcctaaatatgaatttaaaatgatgatttgttgatttggatgtgttcatgttggtttatgtgtgatttgatgaatgtttgtgaattacaaaatttttccatgaaaataattttatttcatttttgaaattaatttatttggattccttgtgaaaaacaataaaaacaacaaatcacactacaataagcattcaacaacatacataaactcaaaaccataaaaatcaaaatcaacagcaagtatcataaaccattaaaaagagaaacatagttctgaagttgagaaacgaaaaaaaaaaatctaaaaccatctaatatgaaatacgaatgaaagtcaataacagacctaaaacaaactagaaaataatatttatcaaagcacataaaccatacttagaagcgataaaaccta

SEQ ID NO: 96684 - DNA, 1245 bp, Cannabis sativa
aatctcagccatcagattaaataagtctctcatctgacggctgccgtacatcacggaatgcattccgtgaaagtacaatcacaggataaaatcatatactatacatataatatatatagtttgtaataatatttggcactagtatcctcaaatattgctccatgatatatgaactaattatatctcttgtcagctaggaataatattattgatatgatatactatacatataaagttaccctttaaatgtgccatgtgaaaagatattttctggtcgaattattttaattcaatccttcttgctattctattttataagctattttacttttctaaattcttctgtaattgctactatagcacatgcatatatagccagtgttattttcttttaattacatgcaaaaatccaagctaagtgcatattcaaaatatctatagatagaatatatctgatcatgaattctcaatgtttatatctattctatgcatatgcaacataatttttgatttatgagaaattattaagtactttctttttaatttttaattcaaaaataacagttttttttttttaattaagatgtattttgatattaatttttaaataaattaatattacttttttagtctaagtcaccgatatttttagtttaaccagaatatactataacttaacagaatattcctaaattataatttttctccctcctttttgcgattgacctctattccatccatctctcaaactcaaatctatctgccgatcaactcctctgatgccaatcgcattgatagtatagaactttggccattgaacaatttcttaaacgattgaaagaacgatgagatgatctttacccatcatttaattgcatgttggcagcgatctgacatcacaaataatagattatattaaacaaaaaactctgattcaagaacaagaaattgaaaagaagggattctcgcttacattctcaatctttgacaatgctataccacaagcccaaagttaaattcatttttctttttgattcatcattttcttctcctacattttttccttttgtttaatatatttagctttggaattgtagacttctccaatgtgatctccgtatgggtggtggtgatgggattcattgagtttcagttcttcgaccaccttctagatagaatttcgaggatggagaagcaaacgagagaatgttaatggagactctaagattagcgatgcacacttct

SEQ ID NO: 96685 - DNA, 587 bp, Cannabis sativa
cctgaaattttgacctatgtattagtgtgctcctaatttttttagtccattaaaatagttccaaaactatttattgtgttgtaaattgttaagttttgtcacacttggttcataaaatgttaacgtagttgtttactctattatcacatgaacgttgcaaattattttaaaaactaatttaaaagtttgtaatattagttcaactattttttttcttttttgtaattattaattgattttagtaataatttttaaaatataattttttaattattttttattaagtacatggcaatgccgtgatattaatggtctaaacattcacatctgcattttgtttgtcatgtgtaataaaatttaacaaaagtactacttcacaacattgataatagtttgagaactgtcaactaaaaaaattaggagtcacaatacataggtcatagttcggaggcaaaagtcatagaatttattatactaaattttttagttccaactcttttttaattaatttaagggtaaatggcggcaaaacccccaatactttcgttttggtttcactaaactcccaaaactcaaatttctgcggg

SEQ ID NO: 96686 - DNA, 625 bp, Cannabis sativa
taagcccctaaaactagaaacaaaagagtgaaaactaaccgaaaatacgacccgaaacttagactaattttagcctaacagattatctctccaggatttgatattaacgttgtcgaatctaattgcttagcaattgtatctgcttttaataatagacattctaatttcaatgattttggttcattgttagaggatatagtaagcttattttccagattttcaagagtatccctagcccatgtacgaagggtgaccactacggctgcacatggattagttgtgcataatctttggatggatgaacaacttgtttagctaaatgactttctatttttcctttagaatgtatagtcttttagcctatatgacattatttgattttcaatgatattaatcattgcgtgcaatatatatatatatatattgatcctcctttctcgaagaataaaaaaaacatatatttctcatatattaaaataattattttattatttatctcttttttaaagaaaaaaagctttttttttttttttttttcaaaataatttcatcttgaacatataatttgtttcatagttaactttataaattttaatttcttttttaaatttttaagttatattat

SEQ ID NO: 96687 - DNA, 718 bp, Cannabis sativa
catgacaaattaatattttctctctagttgttgcctcaattccacatacattttatatattaataattctataattagctagattatatgagaaattaatattgaaaggtatatattaataatttttggtttgacaaagtatactcttcgattagacgataagctattcaggttcaagaaggttcctacgctatttgcagatatctccatcgtaaattcatgattgattctaatcagtaccttaaaaaaatattaaaaagtatttttaatgtgtgaaacactaccatgtcacaacttatgtaattaaacagaaaattttaaaaactagctactagaaaactcaaaatacttataatttctaatatggatataaatcttatatttataaactattgtatctcgaagaaagtataaaatatgggaatcctacaaaatgcaataataagacactaatatggcctaacaccacttaagatgttttaccgctatacgtattaaatttcatataatttaaaaaataatatttatggaatattatcgttaactatttgtaaggccctaccccatgaaagtgtatattagacaccactaatgtcttatagcaatgtgttagattgcttctagtattatttttagattaattttagtgtatttttaatttatttttactcgtgttcggagcaattttacgctttttatcttttatttttgcagattt

SEQ ID NO: 96688 - DNA, 658 bp, Cannabis sativa
tataatccttaccccactcactcaacacttccccataatacaaaattttctcttgtatccccttgccaatacaaagatcccaactatctttaacaatttggaaacaaagaggttcctttaaccaagcattttcaaatctaaatttattttcattagagatagccacctcagttttaggtactaaaaatataggataatgatcagaactagaaagctcaagattaaataacttacaatttggaaataagtcaagccaagcatcagaaacaagtgcccgatcaagccgaacttctatccattcgagagtccctctaccccgttcccacgtaaaaggatacccaaccaactccaagtcttgcaaatggcagccatcaacaacctattggaatcctgacagaagccaatcaagataaggattaccaccctgtttgtcatcatgactaagaacattgttgaggtcgcctataatacaccaaggtaacgtagattcagaggacaaatctctaagtaaatccaaagttttacgtctgagatgccgattaggttcaccatacatccccgtcaactgccatgaggaagttcagaaacagtgattttcaaatcaatatgcgagtttgaaaatcccattaaactagcttcatctccaaatctccataga

SEQ ID NO: 96689 - DNA, 688 bp, Cannabis sativa
ggagagagcagccctctcgaaaggttgtaattggagatactagcatctcgaaagctagattattcttttatttcatcattaataaagagattttctttgatggattttataattttgtgtaacaatttagatcgatacttttattctctaagaatatcatatcaaattggtgcggtgagctgcggacacgatgccaaagaaacctgtggagaagagtgacactactgctgggtttgaggacgatttcgaagctctgaaaaattgaattctcaagaatcaagaatttgatagaccacctattacatatgtttatgctcgaaggtgtatgaaaaagggattgggcaatgctgtagggaattaaaggtgagctggcagtttcttaggtgagttttgttctggtgtggtgagttttttctacacccgtaagtttgaataaaagttagctggttttgctttgtgaaggcatgagaattctgtttagcttgtaaccaattgtgggagagaaccaggctctcgaattcttgggtatcaatacaaggttgttgccatttttatcatccaataatctactgttattcttcttttcttctgtaactctatcttttttttcttgctggttttgcaattgagatcacattaacaggggagattctatcaaagtggcatcagagcatttacgatacaagac

SEQ ID NO: 96690 - DNA, 580 bp, Cannabis sativa
gaaggtagtagggtagcgaaccccgaagcataaatatcacatggtttatgaaaacattcaattactctactcaacacataggagtgagtagcgcccgagccaaacaatacagtataagaccaaccatttatagacaactgagctgtcagcactgacagactagaatcagcgtcagcctgagtcatggtaaaaattcatcctgggttctgatcgatattcttcttaggttcctctttcttggcctgaggacaatctctgatgaagtggcccaccatgccacactggaaacaagtcttggcctgacattcaccctgatggtgcttcttgcatttaggacactcaggataagatcggaatgaagattcgcagccctgacggccacctctgtttccccaaaactttctattaccccctgatgttctggaagcttcagccttccatttgtgatcaaggttgccactgtcggtccccttactgatattaccactagcatcaggattcaatgctgcagaggcatcctttacagtctgctctttgattacatgttgctcagcctcctcaacaattaaggctagctcta

SEQ ID NO: 96691 - DNA, 706 bp, Cannabis sativa
agaaagacaaacagaaaaaaaaaaaagatgagaatcagaatcaaaattcaaattgaaaaatattaataaaaataagaaacgaagaaaacagaggttttgagctttggcctttctttttttaccttaacagttccagagcaagcacaaggagcttccaaggtggaagaattttcaaattcttcttcgtggcagattctacagtgtgaaattacataacttgatttcaaatcctccataaacagtagtacttctcccatatttttaaaactttcttctctgtttttcaaaaattttgaaaacgaaaacaaaatttaaataattaaaaaaagaaaactttctcttaacttaggcaagaaaatagaagaattttattatgttttttcgttcacttggtttcttatttccctgcgagcttggaaggccagtctttataaataaaagagaactgaaaacgaaattccaaaactacccttttgtttttcctccaaaggagaaaaaacaaaaaatcccaagtgaaagaaaattatttgtaccgacctgaaaatattttggatgtggaaagaccatcatgtaataataatgccttccaatatgaatgtcaatatatagtttaatagagattttcttatagatatggattgattatttgttttattattttagtttattaaaattcagagtaattaatgattagtaattttacaag

SEQ ID NO: 96692 - DNA, 863 bp, Cannabis sativa
tatatttaattgaaacatacctctttttatatgtattgtacccaaaatatcctgacataagagagtcacatggagggtatcttaaagtggtaggaacaaaattgatacaatgtttaaaaaaagaggtaaaaatgctagactttaaaaaagagggtaaaaataaaaaaaaaaaacaatataaaaagagtataaagtgtaattttctcaatggaaaaatacaacttttgaaaaaaagaacattaaaattacggaatccgcgtttatttgtttaaaatatgttttttcttttcgtaagtgaagtttacaaggttagacatctcccatgcaaagtataaaatttatgctaaatttggtgtaaaaattaagtttgtgctatatttagttcactatttacaattgtcctccaacataatgatgtaataaaaatataattatattgatcatcattaatattgtattgaaaatatacaaacatcattattttttatattttattatttaaataatggtaatattgtaaataaagaagataaaattatgtaaatgtcaatgaatcataataattagtgacactataataaataaaaaaaatgtagcatttattgtgggcaatatttggcaaaatgctatatcttgtgtcaaatttggtacaatttttagcatgtgccaaatttggcacactttttaaaacactattacaataatatttttttaagtgtgctaaattatagtaatataccacttttttagcactccattatagatgctcttagagcagctccaaggagactgcaaattgatagtatagtgttgaggattgatccaaggaggcagcaacagttgcagcaaattgatagtttctc

SEQ ID NO: 96693 - DNA, 644 bp, Cannabis sativa
  modified_base (542)..(542): a, c, t, g, unknown or other
atgggctactcctcccattgccaattgattttgagattgaacctcattcaccttatccccaaattttaacaattttatgaggcttttccacacaaaaaaaaaaatatgtttcattagtatctaaaaatacattttggttgtttaaaaacaaaaacaatacatcttggttgttatgattttaagactctttccataaaaagtgtgctatatttgacgcaaaaaaaaaagacttagtgatatatttgcatcaatttttaatgttgtgcttcaatgcaccattgtaaacttaataaaaaatttaatattttcattaaaagtgtgaaataataataattttattattaattttattatgtaaatcttgtgttaaattcagcacaatattgctatgcgctaaatttacatcacattttattggagtataatttatttttattttttactaaatgaactataaatacgaccatgtttatgtaagatttataaacaactaagaattttaatataaatgatattgaaagtgttgcccctgattttgcccnatatacgtggaccaaccagataaggacacgtggatcaagtaattcacaatatttgctgagtctttatgccataaggtagcgtccaggacgtagcccccggag

SEQ ID NO: 96694 - DNA, 684 bp, Cannabis sativa
gtttttattaatctttttagacttctattaagtttatttagagatctttcttatattagtgctttgttaattttttttaaataaaaaaaaaacgtgatagctacgtgatatgtgatagatttagagttattattttaaaaaaaataaaatttttaatattttagacttttattaggtttctatttcttatattagtgttttgttaattttttttttttaaaaaaaatatgataggtgataggtgataggtgatatatgatagatttagatttattattactattttataatcattagttaattatatttaaaaaaaattactatgattttttagttttaaatatgaatttcaatttatattttcttatgattattttattttttttctcatttattatcattaactaaatttaacatttcttataaattttttaattaatgttaaatttgaattcccattagattagatattttctcattttttatttaacatttctaatttattattattaattaaatttacggttaattttaaagtattattaatttagttttttctttttttaaaaaaacaaagttgatgaataagagtaaaaggagagacaaaaataagtatgttattatattattttgtagcaaataaaaaaatattaataatatcatcaactaaaaaatgttagttga

SEQ ID NO: 96695 - DNA, 750 bp, Cannabis sativa
ttgtacatttttaattgcttatataaatattttgattgcctattcatacattaggtttaagtacttttatcgagacacattgatgtctctttaatactttcctatcttgcgcgaaccgttaatattcagctttgtacgcaactttatgagttatatctcatttataacttttgattttcctttctcatcagacaggtttaaatcaaaaagttatgatggtttgatcccattctcgtcagaaaggtttgaccaaaaactttaaaaaaaaattaaagttgtgggtttgcattatatcatgtatttctagataaattcttattaatcatatacaaatgcctcttaagtaattttaaagagtaagactttgtaattacttgaatgaaagaaattattctctttattcatgactgaagtttaaaatattacatcagcaatgtgagttacatcattaatttactggtagtagggtcgcaaatgttccacgttctagtagttctttattagcgagccatttagccgagccaatttttgaactccgatccctactactgcttcgattacatatggaccctcccaattcgggtttaacactcctgcagacgcatctctcgtgtttacaaatactcgccttagcaccaagtccccaacgttgaatagcctttttttttactcttttgttgaagtatcttttaactcggtgttgatacgctacattagtgacttgcaactcagttcatttttcatcaagca

SEQ ID NO: 96696 - DNA, 798 bp, Cannabis sativa
aaaattcaatagctttctctctattaggcgcaccaagattgtgagagaatcagataagtatttaaagagatatgccacttttactaagacatgtttcattctgaaaaaaaaaaaataagaaaatgagacttacaaatattctcctattgtgatcaataaatgagtagatgtagagtttcttacctaaaatacttcaagctgcttagatcaatagacatgagatgatggtgataaaagatgagagtaaaggggtctataaatttggctaaaggatgtaatggaaaggtgatgacatgaaaacttttaaggttagtcttgctcatacgggtggaaagaatagaacaatataattttagggttgaataaaatatataaataataataataattataacaataatatgacaaatttttaaacaaacaaatatctaacttttaaatttaaattgtaagctcttcatctcgtaactttagggattaattttgacctaacaaaatttcgaattatgatacagctatttctacaaaatttatatatatctttaatttatctttccaacgctactggaatcacctcaatcggagttataaaactcaaaatatagttgttttagtaaaacaatttctaaacctgcaaatttttctaaacttatgaattttctaactaattagataatatatgttatttaataccacttatataattaattaaatctaataaatatattataaaaccctaatggaccttcatatttagagttttaattaaatgattatctacttatgaaaatatcataa

SEQ ID NO: 96697 - DNA, 620 bp, Cannabis sativa
aatgagttgtcaaaggcactacaaagaaatgatcaagatattgtaaatgccatgacactagtaaaagtatgtaaaacacgattacagatgatgagagatagtggatgggattcttttttagttcagatttctttgttttgtgagaaacatgaagtggaagttcctaaaatggacgggatctttaaagctcgaggtaaatcacgtcgcaaagctcatgaaatgacaaacttgcattattttcaagttgatttgttttactccgtcattgatcagcaacttcaagagctcaatgatcgttttaatgaggtcaatattgagttgctcttgtgtgtggcgtgtttatctccatgtgaattgttctctacttttgacaagcaaaaattggttaatttggctgagttttatcctaaagatttttctggaatagagttgatggaactcgatgatcaatcggaatcttacattgttgatatgcgcataagtaaaaatttcaaagagttgaaaggaattggtgagcttgcacaaaagatggttcaaacaaaaaaacatttgatatatccattagtgtatcgattgttaacattggcattacttttacctgttgctactgctactgtcga

SEQ ID NO: 96698 - DNA, 515 bp, Cannabis sativa
cttttttgtacgtattagttaaattagagggtaagaacttatttattggatgaattgcttctggaatttatgtatttgtatagtataaattataaataagtggatttgatatctgctaatcctaacaataatatgattgggatttaaagcaaataatataaaaaaataaatatattaacgttttaaataacatactaatatactaacctcatttaaatttagattttttcaaagtaataatatatttataatgtaatttggatttaaataagtaaataaaaagatatatatatgttcaacattttaaataacacattatacgtaatttaaatttgattttttaaaagattttacatatatcagatattagatatcagatatcagatatttaaaaaagatatcagatatttaaaagatattagatatttaaaagatattagatatttttctaatgattattttttgttgaagtaaaccccatattagctatacactgtaaaaccagattttttaca

SEQ ID NO: 96699 - DNA, 625 bp, Cannabis sativa
  modified_base (27)..(38): a, c, t, g, unknown or other
tattaaataacatacttgtgagtagannnnnnnnnnnngtaaaataaattccaacaagaatgagattcaaggacaagaacacaaagaaataggaatagggtaggttatgaaaataaatgtcaaaggaagttggtttatataaacatatgagagagaatcaaaagaggaaaccaacttaaaagaaactaccagcccacgaacacaaaggaaactgtcccattattttccaaaattatttttttaaaaaaataaataaaagaaaactagaattacctagttactttccaaaaatagacaattgaagaaaatccttcaatatcaatgacaaatgacaatgaataagatatcaaacttgaaaatgaaacatatcaaaataaatcaatttagattaaatgttgaaacttaccaaacaaagcacaaaattttcttagcccacaaactaaatcaccaacgcctccctctcttttatttattattttacttttatttttatttttgaaaacccaaaaataatacaaaataaaatacccacaataaatataaggtaatctatagcaagcaactaatcaaaattcataacaaatgacaaatatacatgttatgctttcaaaagagaataactaat

SEQ ID NO: 96700 - DNA, 1128 bp, Cannabis sativa
aatgggttatgagatacctcaaagaaacatcaaacatgaaactcatgtacaaattagagtcactcaagcaagaaatatagggctttgttgactcagattatgcaagggatgtggacactcaaagatctcaaactggttacatattttctctaaagaaatgtgtgctataagctggaaagccaacttacaatctatagtggccctgtccaccactaaagcagaatacattttttgtactaaagcaatatagaagacaatctggcttaaaggcttaagcagggaaatgaacattgacgagggaagcatcatagttacatgtgatagtcaaagtgtgattcatctaagcaagaatcagatgtatcatgagagaacaaagcatattgatgttcgactacacttcattagagacatacttgcagaaggcaaagtgaaactcgagaaggtagcatatgaggacaaccaatctgatatacttacaaagttagtgactacaacaaaattcaataaattttgagatcaacttgaaattttagaactatctcaatcactaccatgaagtcaacacataacaaccaaggtggaaatttgtgaagtggttcttaattattattgatagttgacagttaattactaattgtctaatgtcttaagttctgagttgacatgtatacttgtaccaactaaggcctcctaatatataaaggaccttagtttattctagttatataacttggatcattttctaagacaaatttatatattttaatacagagattcattcattcaatacaatatacactttccttttcatactttttttttgtgtgtgatagttttgtccaaaaacgtaggtgtgtatagctaggattgatattgtttgacatcgatttatggttttaatgtgatttaattttctcctaatttttatgtattctattttattcgtacttaattacttttaattgtcttatcaccaatgaaatatttttgtttttgatgcgaaatctaagaagtgagtgttaattaggtgatagtaaaatagaaacaaattttgatataggatgagagtatctatatagttttgatagcttatagggtttctgtgtttaataccttttacatgtttaa

SEQ ID NO: 96701 - DNA, 1927 bp, Cannabis sativa
ataaataaaaattaaattgaaaaactttacattactctaagtatttgtatattggctatatttttattaacaatttttttttttttataatatgtgtttgtatttttattttagtattatcatcatcatctagttccaaatcatcacttatgattcccaatgatatcaatattccaagtaaaaagtttgcttatttggccaaatatatttaaagcaaaaaggtttttttacgtgcacaattacagtatacctcgttatgtccttagagaaacaaactcacccatttatttgataatgatgatattacttattagttgatatatttttaaaaaattagtacatttgtcatctcactgtacatgaggtaaatatatagagttccaattaattatgtttgttagttcgaatataaatagttaatatgtaatgaatttaatattattttcattatgtagaggcctatatgaaaaacttatcatgttgaaaattattcaacacactttgtttatggactcttctaagtttgttaatgcaaaaaccaatagtaatgatgctcgagccaaatcactatctgattgcttggctgtagcagacaaaagaatgtttttatgtataccgtataattttggagtatgtgatggtgttgtcttttgatttgtaattttttatttaaaatactaaataatgacataacatgtatttcaacagataacattggaggatgatgtaactatgaatgtagtgaaaatgtaagttttactttaactttatcttagatgcaattatttcaatgttaataaaacataaattatactatctaattaaaattttatttaatttttaagggcatttgaataattcaagcggaaagattatgaacataatttggttttgagtaaaggtatgagattcaaaattgacaattattttatttatttataaatcaaatattaatacatattatatatataatatatgtatatgtagggtcttaggtaacctaataacaccatgtgcgatttttacatcatgttgctaatgagagacttaactatgacaaaagatccaaatgagtatttttcgaaatatgtaagtaataattaacatattattttaaatgtgatcaattttaaattatcaaaaaactaacataaagtttaaaattaatttatacttattttgcagggtgatggtaagaccgagtatacaatgaatgatattaacacagtatgtgaagaatgggtcgactactatacttagtatttcctagtatagtttttctaattattttttctctttttttttttgttagcaagtacaattttaactaaatttatagttagaactaattgtagttctcatacatatatttactaacatatatagtgatatatagtgaattttattagataatattttactgcaacttacgtttgtataaattgtgaacacatccttataattaatacaaccaatgtaagggaaattttaaaaaaatatattaaaattattttttttttgccgactaaaattaattacggcggtgtgaaaaatagtgttgtaattgacatatctcagtagtttcaaagtgtctagaatgcgacctatcttggcagtttatgaggtgattgccgagattgctatctatctcgacggttttaggtgtgagaagaagcatgggacacctatttcgttacttaaatgtaaaactgtcgagattggtttatctcgatggttcccaaccgttaagattgatcattaccctatctcaacaacctataacaatcgggataaatttatcacatgattcttaaccgtcgagataaaataatttttcatgtagcggcttcatttgaatgccagtggcctcaaaaagaataggactagtaaaagtataatactgaaaattcatcaacttgagggtcca

SEQ ID NO: 96702 - DNA, 586 bp, Cannabis sativa
  modified_base (394)..(404): a, c, t, g, unknown or other
caaagattcagaacgtgaagagaacgaaccattagaggcctatatccctttgcaatgtatcctataaggtcatttttaaagtcattgcaaacatgattaaaattattctctcgcggcttatttgtcctacacatgctgcttttgtccctggcagaagtatccatgttaacattgtgattatacaagaaatcattcattccttcaacaggaagaaggacaaagaaggcttgtttgcaattaaaattgatctgatgaaagcctatgataagataagctgacagtttattgaccatggtattgctatggggtgccagagttattccgtaactgggtttcccaatgcatttcaactatgtctctgaatgtgtgtcttaatggtggtcaagttgggaannnnnnnnnnncttgtggactccgtcagggagacctgttatcaccttacctttttatttaggcgactgagattttgttgagactttttgatagagccatgggtaatggtagtattgggggcattaagctttcccgaggtggccctactctgtcccacatattttttgcagatgacctaatcttggtgggtagg

SEQ ID NO: 96703 - DNA, 689 bp, Cannabis sativa
cgggtccgagtttgggtttggttctatcctggttttgagttggagtttcgatctcgatttgagtttgtggcacgatccggctccggattttgatccaagcttgggtctgagccgggtctagttctaagtctaagtctaggtcttagtccttgttctggtctcgttcttgggtcccagtcttgtttcggttcaagttctggttttgggtcctgtgtttgggtttgggttggggtccttgtttgggttcgggtcgtggtctgagtcccagaggcagacatcaatcatgggtcacgtccaagtcccgagtcccagatcccatgtctagatcctaatcctagttcaggtctcgggtcttgtgttgggtactaggtcctggtcttggtctggggtgaggtcccaggtctcgatctgagttccgaggcccaagttccggtcctggttcgggggtctagtttcgggcccaagtctagtttagggttagggtccgagtactagtctgagtctgagttctagtctgggtctaggtcaatgtctggatcgcggtctgggtcagagtctacgtccaagtctaggctcgggtcccgggtttaggtacgggtatgggtttgggtcctaggtcctggtctagggcctaggttttcatcctaatttcggtccaagtttgaatttgcaactgattctaggttcag

SEQ ID NO: 96704 - DNA, 670 bp, Cannabis sativa
agattctatatgttatagtataaattgtgggcatgcatttatgttaagagttatgtgtataagacataactgggttaaacctggtatatatcaccaggctaaaccatcgacaaaacgtaatgtatggattacatatatatatatataaatagataaattacattaacaattttctatcccctactcctcacatcaatgttgctgccgcatcttctactgtcctgccctagtccaattcacctattgacaactgactttcctcaatcttcaataaaagacaacttacaactactgggggtaatgtcaggaatgttttgaagagatgccgcaccaaagctccacctttaacagactacactaacgcttcctcgcaccagaaaccagattcatcttttgaattatcaagtaactcattgatggatgctggcagtgatggtcctttggcgaaggctgaatctcagcatcgccaatcgccttgcaaattgtttgttggaatgctcggggcttgagcaatctgagagcattccggcaacttcgtttgctcatctctcatcattgtcctgatgttgtttttattatggagtctaagcttagattagggtctattactaagtttcgtaatgtactaaagtttcctaatggtattgaagttcctagagttggtcttagt

SEQ ID NO: 96705 - DNA, 501 bp, Cannabis sativa
tttagggtggagttttatgttaaatttttctatcgaattagaaaattcaatagaaaaatctatcatttttatattataaggattgagattgttatattggcttaaaaaattattaaataattaatattaaaaaaagttgagtttgacttaaatgtagttttatataaaatatttttgatatagtataaaaatagatatttttttatttttttaattaagtagccaaattaagtatagaaattcaaatttctcttttataatttagtattggatcaaaatctaatgatttaatatttatagttaaatttatttagtaatcatcaatgaataatacctatagaattatttcatatatatttggttaaaaaaattcttgataaaaaagaacttgttggtagagccagccagccacagttatcagtgtaggcaaaaaataataaaaaaaattatggagacaaataaaaatatatgaatatagaaatgaaaactataaacttagta

SEQ ID NO: 96706 - DNA, 600 bp, Cannabis sativa
atatgtatatattatacattttatttaataaggttataatataatactaaaatacatgtaatgataattttttaatctaatgtaatatggtattaattgtagggtactaatattagcaaaattatacatataaagaaagtgattttcgaaatgtgtaatattttatttaacttaatagctagattgagtcatatataataataaattttaggatttgggtattcacttacatatttgtaattactttttttcttaataagtataaatatgtaaattccctataataaatagttattgttttattttaatttattttatttttgtaaaataatatataaaattttgtgcttgaccaaataatgtaatttaattaacactaatttaactaaatattctcatgcataactaaacacgattataagtttacaaacaatcatattcttcttcataatattttacgtaatatgttaaaaattaattgacgtgtcaaattttaattagtttgacataatatgaaacactactttttaactggagatcttgatttactaatcggacatttagtataagaaatcaattgtactcttgattgtattggaa

SEQ ID NO: 96707 - DNA, 676 bp, Cannabis sativa
gcgcccttcaactcgatcgcagaatggtgatcctccatcatcgatcgacaatccagctgcagagatcaattccgatcccactccagctcccaatcctccagcgattccctcccgtaatccacaaattagggtttcaactcagaacacagatccccttcctcaagatccttccaccattgttgatgacaactcgaaccaggcactcacatctcgatccgtggctgatgatcattccagccccttcttcctcagcaccggtgatcatcccgggcttgtgcttgtttccaccgtccttaacggcactaattaccagccatggaagcgaggcatcatcatggcgctcactgccaagaacaaaattgcattcatcgatggctcccttcctcgcccggaacctggtaacatctatctcaattcttggttaagatgtaacaatatggtcatgtcttggttagttaattctgtgtctcctgagattgctcaaagcatattatactttgatttggctaccgatatgtggaacgacatcgctgaacgctttaatgaaggtaatggtcctcgggtcttccagttacagactcaattgacccatcttcaacagggtgataactctgtttcttcctacttcactaaattgaagtctttatgggatgaattaaaagaattccaacccatc

SEQ ID NO: 96708 - DNA, 843 bp, Cannabis sativa
cattcctactgctgaaaatctttaccataggcattgtcttaactctcctatttgtcctagatgtcatctttattatgagtcggtacaacatgctttgtttgagtgcaagaacatgaagaaggcttggtcaggtacgtcttttagctctgccataaaagatactaaacatctgcacatgttggatatcattttatacatgcagcttaatttttcagcaggttcttttaacctatttctttgtatgttatggaagtgttgtaatggcatgaatgcggctgtatttaggaaccatgactcacatccactgcgcattgaacaagaagcccaggattactttgacttttatcaagcagctcaagacaagcgtacgatgcagccccaatctaccacagatcttaataatttgacatgggaaccaccacctatgggaactctcaaactcaatgctgatgctgcagtgtctacccaccagaataaaacaggaggtggggttatagttcgtgactccactggaaaagtaattgcagcaacatccttcagtcgctcgggacagctgcaaccaaaagcagcagaaggctgagttttgtgggaaggtcttaaatggagccttcacaatggaattaacattgatcatatagaaatcatatagaagtggactgcaaaaacctactcacggatttacaatcaactgatgataatctttcaggctatggaaccataatcaacgctattcgacggatgttatctttgctccccactgtaacccttcaccacactcgaaggcaagggaatacagcagctcataatttggcacaaatgtccatagggttagataacacatgg

SEQ ID NO: 96709 - DNA, 540 bp, Cannabis sativa
  modified_base (182)..(195): a, c, t, g, unknown or other
aattattagattgtagaattattagggatgcacacggggtggagaattggcggggagtactccctcatccccatatccctgcttattccccatcggggataggacggggaatcccctaatgggggcacgaacgggacgggtcccctaatagaaaaataaattttataataaaactttttatnnnnnnnnnnnnnnaaaatacataaatataaaaatattacacattaattattatttaatatactaattattattcaaaatacaacttaaaattcataaaaaaaaatacaaagtaaacataaattataaattattactaaaaatataatataaaatactaaacgggttccagtcgggacgaggagtgtgatcccatcttcgctccgtttaatattcagggacaaaaaataattttcgctccccatttagatggaaaattcttgtctattagaagcgaatccctgcgggacccatccccatgggagaaagtgcatcactaattattaccgtaataattatataactttataattacaaagt

SEQ ID NO: 96710 - DNA, 508 bp, Cannabis sativa
ttcgggatgtggctactgtgtatcgtgatgaagaagaagacgaagtgaggtctgtttgctgaaggattagacttatacctctatggcgtcagttatttgaaattaactgatgccatagtgtaaaaatacacgtgttagctatacatatagcgtcgattaatttcaaataactgacgccatgaagggaaattccaaccgttcacaacactaattctaaaactgcctctaaatgtactacataaattatatacctacggtttttattaaaaaactgcatttaaatgtcaattttgtatcagacgagtattttacaccctttatcttatcttttttatgaaaatggttgaaaaaaacaatctctaaaggctcatattacagtagtgcgtacacatacatccctgaaattgtgagtatcaatggcgatgttgcgacatatgtactgagcaggtatataagctcattgaatgggctttcactaattactccaagataagttaaaaaaacttca

SEQ ID NO: 96711 - DNA, 515 bp, Cannabis sativa
aatttatgttacattcatgtggtagtgcatggacagataatatgcaatgtgatagggtataataagattatttaaaacataatgagagctttatgaaatgaaatgaaacttgtttatatatattatatatacacgatatggacatataattttaaaaatatttatatagatggataaaattttaataattgcatcaaatatgtaactatgattattatatttatttttagttattagattattatttgacggttgtaatttatttaaaaatttattaaaaataattaataaattacttgtaattaactgatactaatataattttatttattttttaaataaaaaaattataaatattaatttctaaaaatattttattaaatatttaaactaaaaaaatattttatttttaatatataattaacttaggtctaaaaataaaaattttaccgttatatactcaaccatatttatatatactagatagatgttacgtgccaaagtcacgtatgtta

SEQ ID NO: 96712 - DNA, 528 bp, Cannabis sativa
tcatactttttactttacagctttcattttttctgtgtgagattgtcactattaggctcaaatttagctaaagaaaatctgcattaactctatatgttacgcagattttagttcttgtctatttccttcgccgatgacagttgcgactcctgtttggtctcccccactagaagattgggtcaaaatcaactgtgacgataaagttggttgtgactcaatgtgtgtggtggctttgactaaagacgacacggagtcagttttgtgggtggctatcaacatgctcaacttccttaactcactcattggagaagcaacgacttgtttgttagccttggaatcagtgatccttttggaagcattcgtttgtgataattgagacttgagagtgattctcagacagcgatcaacacgttgaaggggacttgtttcgtttggggtattggtaactatgtgcttcaatgtaaaaatctttcaatacttttttattagtcgtaacttttcgtttatttttagactgtgtaattttgc

SEQ ID NO: 96713 - DNA, 608 bp, Cannabis sativa
gcaaaacttgaaagacttcaagtacggctcattatgtagttgatcacagttggtttgctagttttttccaggggtagaggaaaaggcgtctggtgcatttgtgtgttgttgtatttggcattttgagaagtgtgttgatagtgtatttgacttagatcaatgtcgtgaccatatgttgctgatttaacataagctcaaattcttaattgtttgcaaaagaaagacagcttggaataccatgatttgctaccctaattataaaagttagttgaaattagaagataataataggtacttatattttaataacaaaattttatttgatgtacctttgtttctaagctgtgggtcataagaatcaatgtagaagaaactgtagaaaattgttaccatagttgtaaatgcgtatgtgtcgtgctggctcgactcatattttgaaaagcccgcaataatatgggtcatgtcgtgccgacccataaaagaatatgggtcatttaaaaggtaagcctgacacgacctggaagtctatatcttcgtgtcgtgctttattcaaactgacctgtttttcataaatgggtcagcctattttcttatatgtgctcaaattt

SEQ ID NO: 96714 - DNA, 547 bp, Cannabis sativa
tctattttttccaatgaattctatgctggttgtttctcataaacctccaccagaaattagcaataagcttttcaaagtgtttacaatatagagaaagaaaccctagtatgacatagcatatgaaggaatagcttggataaccgctttaaggagaatctctttaccagctctagagaaaagcttactgttttaaacaaataactaactgctagccttttgaagcagaaaaagaaaggaatcttttatggaatgaagaggcactaaggaacacctaggtatttattaatgaaaggtttatattcatggcctaagacctgaataaaagaggctttatcctaagagctagtattaggagaaaaccaacagaagacttagaaaagttgatagattagccagtgcgttattataaattctaaggatatcctgatgcccattaatagaagtgaaaagcaaagctatcatatgaaaaaagaagatggaaaatggaaggagtagaacgataaatagagatacctttgaaattatttatatgagtttcagtatgaat

SEQ ID NO: 96715 - DNA, 803 bp, Cannabis sativa
  modified_base (312)..(315): a, c, t, g, unknown or other
taagctgaacctaaccatatcagaattaagattcatagaaacttaattgcttaaaatttcacaaggattacaaataagatatttgcagaatgaaaaaaaatacttttcgtagaaaaatttcgtaattcacattcaatcatcaaataacacataaactaacatgagcacatccaaatcaacaaaaacatcattttaaattcatatttcatgaaaataaattattaccatagctttgaggccagttgttggaacttattttacctgaatttagatttactaacatgcatattgattataattctataatctaannnnctaaatatgaatttcctaaaacagtaaaataaacacataagagattaagaaatccttacattgatggcagttaatataatgactaaatccattcagatttctatccctttgattcctatctgtagcagagcattataaagatatgaacctggatcttctttccttcgatttagttagacatagtctatctcactatgctaggtattgacttgaattgtgtgggcaactcctcaattcactaaggctttgaaaaaaaacaaaggaagaagtagaggattttgaaatagatgttgactcttttctattttctattttgtctgacaaaggagtttgatcattaattgaaaataagagttatacttttctatttataggatagctatcagggttaggtttaaaattaaaatataattaaaaaaagataaaaatagctttatttagtccatcatggtcgaaccctatatgggcttggtggatttcaattttgc

SEQ ID NO: 96716 - DNA, 4919 bp, Cannabis sativa
gaaaaaatagtcaaaaaccgcactacccgtaccgcgaacacccctaacaattcttatccattacattatcattctcgttacattacattacatcaaaccaaaaccaccttagaagagagaatagtttgcgaaaacgaaaaattgagagaagacaataatagaacataacataggttggcacaaaagagaaaggcatgctatgcaatgcaagggttgataggagccactacccaagccatagctttctccaaagcatcaattcgccatttcaactcacctactactcataaactcctcaacccttctcttcttcatctacccaacaaacccttattcttcaaccttcgaaccttcgccataatggcaaccctcgacaacttcgtcaacggaagcgttcacccgaacggcgtcgccgtcatcacccttgatcgttccaaagcgctcaacgccatgaatttaggtttgattttttatttttatatatattttcatttgcttcgattgatacactgtaagtggtcgaattcgggtttgaagcagctttactttgtcattttcctgagtttaagtatctgattgattgtatcaatttcttgtgtaattcgagtagtatgtgcattatcttgttgtagtaaccaacatctgagtgtgagtaggtttgcacaaaatacaatttcatttatttgcaatacactaccatttgtgtttgatatattaggatttgatttagaaatgaccttaaaattgtttatttatgtagaaatggatgtcaaatacaaaagttatcttgatgactgggaatctgatccaagggtgaaatgtgttctggtcaatagcagctcgcctcgtgctttttgtgctggtacgagtagataaatgattcaatttccttgtttgttataatttctttcagtttcaggtttgttgtttagtttggcaattgatttgatgctattatattagtataactttgcttgtttcgggagaaatgtttgttccaaatggatgtgagaatttcaggatgaccaatcatgactaatgcaggtatggatattaaaggagttgttgctgaaattcaaaaggacaagaacactcctcttgttcagaaggtttcttcacgacactcgtttagtttagtagagttcttgttggatgctagtttgatcattgtataatttattctatgtacattgattttgtactgttccttgaatagcgatttgaaaaatattaatgatgctctttgtgtgttacttgcctaatggaacttcaatttgataatctagatcttagtttatctgcaggcggtgatgtgaagaagatcacaactaataaacaactgtcagatataattgaggtcttgttgtgttcttctaaatctaatattatggattcataattattttacacatcaataattaaacttatacgataattatatgaccgacttcttaaacttctacgataatatcatcatcctccacagaggcatatacgttctaattttcttgacttgtgcaaaatggtttgggaagttctggttcatttatctataattatttttatttcttatttttcctagtattcatagaaagaaagaaaatacatgctcatgcaattttagttcttgatgtatctcttctgccaactccatgatttacttgtagtgtaaatgagtagtaactttttttttttttgtattttaattgtcatagggagataactttaatcttgtataattagaaggaaatttagaaagatgactgaacatgcaactgggttttggttccattgttattcttggttatcattatttttctgaatgggggatcaagactttgacgtagtaataaagaaattattttatttatctaacataattggcatctataaaattttccactctgcatgagcgtaaataccttttattttatctgttcattttccggggatacttcattcatagtttagtatacctggtaaatttgtttgatgattttctttatgttttttttttactataacttgaatcattagtattatatcatctgttttttttagccaacatgactcaaaggttattgaattccaatacctgctgatttgcttttgctgtaatactttgcaggtttttcaagctgagtactctctgatatgcaaaatctctgattacaagaagccttatataagcttcatggatggtatcacaatgggctttgggattggtctttcaggtcatggtctctataggattataacagaggtacatttgctttcatatgctgaggtcatataatccttataagctgcaatgtcttatgaaattttttctaaatctgacttcttgctgatgtgctctagagaacacttcttgctatgcctgaaaatggaattggtttgttcccagatgtggggttctcatatatagcagcacaaagtccgggaggaggagctgttggtgagtttttttttttaattctgaacaatactttgtttacatttatttaaggatttgtttagctcaatcatcatatgaaatttccaagaaacaaagagtacatggagtaatcgttaagtatctatggaagcccgaccagttacattatctgtgctggtgttaatgagaaacagattatcaatttcttgtttgctttgcttatcagctctccttgttttttaactttcaatattaatgtttctaggtgcttaccttggattgactggaaaaagaatctctacaccctcagatgcactatatgtagggcttgggtcacattttgtaccgtctggaaacttggcttcactaaaggaagcccttctttcaacaaacttgtatgttcctgatttttaattgcaaagctattactatgtgcattgcttggaattttttcatcttcagttgttatcattctctcacttaaccttcttaagtacagttctgaggatccacatcaagatgtgaaagaacttttgggaaaattcggtagcaaccccgaggcggaggttcaattaagtttgcttttacctcaaataatatcgtctttcggttcaaataagtcagttactgagacaattgaatcactgaaaagttaccagcagagttcagatgaaactggtgagttgcaaattgccattttttttgtcaatattcaaagaaagctgtataatttaccctgaattcagacactaagtgctgggttgtgagttttttaactttggattgtgttttgtttaatcatccctgctgatgttcatgctccttctgcagtagtggagtgggcaaatgaagctcttcaagggatagctaaaggtgctcccttttcactttgcttaacacaaaagtacttctccagagttgcatctgcatatggaaaaagggagaatgaattatcttcggtgagtttaaattatgtagctttattattctatatcaactaagattatctaatgtaacttttacatttggccttgtccagcttactggtgtaatgaaaactgaatatcgcattgctttgagatcttctttgaggaatgattttgctgaaggtgttcgagcagtgttggttgataaggatcaggtattcatatgatatttaggagattatttttctctacttgttagaagaatgtgaaaacaaggttggtagaaattatttatctacatgcggctctctcactcattatagtggaaggaaagcaagtgctttactgatgcaaaccatttttacaattgtaatttcttagttcttctattgaatcttgattattaatcccggtgttgctattgtgtctgcataggtgccaaaccattatgtctttttttttttttttttctttaaggagaaaaaatttgatcatattttacacaccgagctggatgtttcaactgctgctaaaataatttgttgattctttcagaaccccaaatggaacccgtcgacgttggaggaagttgatgagaaggaagtagaaggtgtgtttgaagcactgagcccgggagttgaggaactgcgtgtttgacttacgttaaagaaatgcttcgttttgttggtaataactagcatggaaaggcaataatagacttttaaatgaatacattttggtaccatctttttattttctttgcaaattgcaatccctcgacagtgaatgaacttacacataaataatctttatcacaacctagtgtgatatttatgaaaaagtttcatgacgatatatatatatacatatatattttctggctagagagttacttttttcatcaaagttgggacggaaatgggactaaattggattaggtacatatgatgggtttggtattagattggactattctttttataaataaaaagtcaatgaaatgaaatgatgttttaagaataaataaataaaattttaaaagtttggattaatatttaaatgataaaagaaaattagaaaggataaaattggcattgtcttttttatcttttaattcaagacattctttctttaatatttatattttgaaacaggaatcattcattagataaacaatcagtattcagtacattaggatttggcatgtctagcttcacagcaatgactatcacatagctctaaccttcttatgcctaatctataggtcacttggttggcctctccaataatcccacaatattatttacgctgaaacatagtcctaatttgatacaaaagactatctatgtctcgacaacccacatcagcacagcaccatttatcaactgcactacctcaaggcaataaaattcaatatgaactgattgccacatgaacggattgctagcaattctgtagtcagcggaggaacatttgttggtaggacctgagcttccaccattaaaacagtaccttgggcatctctcacaaccatttcgaagcttgctcttcctagg

SEQ ID NO: 96717 - DNA, 530 bp, Cannabis sativa
gataccacactggaattaaactagaacagacaaatagagcatcctcaagagttttagattcttctccgtatcgtgaacaacaaagcagtacctgaacttttcgggagataagttgtgttgctactcgtaaagctaaatggaacatacgccaaataaacacttccacatttggtggtatattaaagattccatactccattccaccgacgagttaacctggatgaatttgcgactccctcctcaccttggagcgaccacaccaaaaagtagtcactcttgacattataaaccccatctctatcgtagtatcagcaccaaccttcttctacctcacgccttgctaatggaatggacaaaattatgtccacatccattaataaaaaaatatgttgaagcttcccacatcccaagtatcaaatggaaagataaattcactcacccgacagtcatcattaatcctccttgtaattggctgaaaagacctcggacaagggagccataggtccgtgaaagccctaattaacttgtgg

SEQ ID NO: 96718 - DNA, 1013 bp, Cannabis sativa
tcataagcgccatcattatcatgtacagtaggttgagggcctcaagatcgggttcttcatcccctacctctagattctggccattctcatgctaagttcttctcaatcatgtggaccctgtactggggccaccttcaggttgggtcctccttcaggttgggtcctcctagaacgagtggatcgtgtgcttgggccaccttcaggttgagtcctcctaaaatgagttgcctgtgtagatcgcgagttgggaggcctccgggagcccattggctcttttccggcatgatgttgggtggtgtcttcaggaggagtatccacattttctccgttgtcagtcatagagaaagttttttttatcaggatggttttttctaagcttttttttacgaaggctctcaatgaaagcaccaaactgttaacgcagatttttgttaactaaattaaagcctattttgtgattaatttgcacagaaataatagtagtaaaaggaaaagcaataacataaaggttttttttttacgtagttttgcagttaaaattctgcatagtccacgagtctatcctattagatttttgatacaaaactagggctttttctctaaaggattttccgtcccttttttaatgtttcttgctcctatttgtagttacataggatggaagttaattacaaccagactgatatcccacaacaataatcccctaaaattatgggatttgattacgtccaacgtaaaataaatgcggttattatttaaaaattatacagctgtgatttatccgcttttatcaggtcaatgcgtacgtggattaaatatgcttgaaagtgtatcgtgctgggacatctcgctgggaacatagcagcaataaccctggcagcgagttggagcttttctcatttcttttcgaggatgataatgtaaatctcgccgttttagcgtttgaagacataaggttccatttaacaattgtagttcttggtgacaaggtgaacttcagcagtcaacatcat

SEQ ID NO: 96719 - DNA, 511 bp, Cannabis sativa
  modified_base (456)..(462): a, c, t, g, unknown or other
ttaatatttttgtctctaaatttcgacaagtatcaaataatgtcctttgtacttttaagatcgttaaaaatatttcatgaactattgagattgttaaatttaaggatttttgtttaattttagtaaaaaaatctaacgtggataaaagttcaaggagcataattttatacatgtcaaaatttgagggacataatttgctatatatcaaagtctggatagtataatttaatacataaataatcactaaaatagtaaaattaaatgaaattagataaaataaatgaaagtttactatcactgaaattagataaaatcactgaaatagtttagggagcatgatttaatacataaacaattattaaattttaatcacaacttttttgtatcatgttgtgctaattaattatagtattttatcgtgtcgtgttaaaacttatatttttttttttttttttnnnnnnntactttccaaactcgtatcaatttcatatcgtgtcaaaatacttaaccc

SEQ ID NO: 96720 - DNA, 503 bp, Cannabis sativa
tttatgcctccagagggaggggtgaggccaccgcacgacatcaactggctctttgatttgaaatcaatccccaagcagagcaggttaaggtatttctatttttctcagatcgaggagaagtggctaacgggcaccgtggactccaatgtcagtaagatagggaattttttggacgagtactacttcctccacagcatggatatcgtccacactcgattccagcagattccctcatactgtcatcctcccttcacattggggcttagggagagggcacaaaaaatccttcaattgtcggacgttgctcggaacattaccttcttggccactgaggccaattatgtcaagtacaaactcttcccagaggaatttgtgccaaggcttttgaagaagaagaagaaggcaaaggccaaccaggttggggtgaccgaggaggagaagttaagcaagaagaggaagaaggctcttcctactgactaggtactagtggagcgtgctatcag

SEQ ID NO: 96721 - DNA, 932 bp, Cannabis sativa
tgtcgagttttaaagccatgaatctttttttaccgctttttttcgtttcagatagtgcataacttcaaaggcaaccataagattatcagagattaggtgacctggaataaaagcgctttgagtttcagagataatacaatcaatcaagtctctcattcgattagccaaaactttcgaaatgatcttgtaaagaacattacacaatgatatcggtctgagatcactcatagtaataaagtttttctttttagggatcaaaacaagattggtatcattgagtccatcaggcaaagcttccgttgcaaaaaactctttcactaaattagtaacatcggaaccaacaatatcccaatggtgttgaaagaaaccaggtcccatacaatcaggcctaggggctttattaggatgcatagagaacacaaccacttttacttcttcatcaaggatcgattgcaagagggcttcattgtgagatattgtgacataatttctaacattgtcaataattagaggagaaaatgaatccgtggactgatagagttcctcaaaatactgatttatcacagttgcaatacctgtattccaacattgccaagtgccattaacatgttgcaattgctagatttggttctatcttcttcgagcactagccgtagcatggaagtatttattatttttgtcccccaaatgtaaccgatactgtttagagcgttgtttccaatagagttcttgctgcgctagaatcttgaaataattgttcttttccaccatgaaattttcagcatcaaagtcattggcgaaatttttgaactgagcaagaagcttcttgtttatcttcagccgagacttaaaattcccagtcaggtttcgaccccaatcagccagttgcttaccacagataacaatttttcccataatatcttcagtcgggt

SEQ ID NO: 96722 - DNA, 647 bp, Cannabis sativa
ttcataattaatggagaggggaaggggaaggggtttaaggctgggagatcctttctccccttttcttttccttttttatggtgaggcgttgtcttgcttagtgaaggctgccgaggctcagggtgacattagtggactgcggttattcaaggtatgccagcctatgttatgagctattttcagctctcaaatttttttatcaatagtgtgcatagcctagttgctaagttttggtggtgttcgacggagaggaaacggaaaatacaccggtgtaagtgggaagatttgtgtaaaggaaggtgtaagggggactgaattataaagatttggagctttttaataagaccatgctggccaaacaagtgtggagggtgatgcggaatagtgattcattggttgcgcaagtgttgaaaaatcattattttcgtaatggagatgtcttatcggctaaaatggggtcaagtccttcggtagtttggaggagtgtaatgtggggtagagagattattttagaagggtatatatggcgtattggatcgggagataatgttcggattgtggaggatagatggataccgaggcctacggagtttttttttcatgtcaagccaattattccctcgggtttaagagcagttgatctttgt

SEQ ID NO: 96723 - DNA, 660 bp, Cannabis sativa
  modified_base (586)..(592): a, c, t, g, unknown or other
tatatatagttcaatatttttacatttaatctatgtgggataatgttctctaatatcatttcttaagatggtggctatttttactcatcaattttgaatcactttatcacaaatcatgctatttgctcgcttttttttgttcgaatctcaagcgtctttgcactatctggatctcgtgcagctagctaactatctggataggtgtagatcaaaagtccgataccatgttgagaatcatggagttctatctcaaaactaatcggtattgagagtggagtagctcatatttttatatatgactccatacttttatatttaatttatgtgagataataatatcgtataatcacgaaattaaattatactaataataatataatatgatagttgaaaaggggaaaaacaaaaatttataatatttgcttctgattcatgattaggggaagctggaggtgtaagggcatctccaacccaacgatattttcctgtgattttttttttactccaatgggactgcaattgtcaccttattttcatgaggatctatcacgttatttttttttttagtttttaatgattaaataannnnnnntaatataatttattggatttaataaatatttagtattaaaatatttttattatattgataaaataata

SEQ ID NO: 96724 - DNA, 1617 bp, Cannabis sativa
aaacgagaaattgaatttttgataggaaagagtaatccgcatgtacaaaaatatgtcatggtcgattaaaatcaaaggacagataataatcaagatttactaccaccattggtggatgggcatttacaagtcattattggaggcacgcacatagctagagatttaagcaaagcccgggagaggtatgcccgaacattacagcacgagcaagaagaagtggttttggctgtcgaagaaaggaagccgaaaataccacgggcaggggaacccaccataacatttaatgatgaagatgctgtcaagaataatttcccacacaatgacccgtttgtcgtggaagtccagatagccaacaaaattgtggcccgaaccatgatatattggagcctctacaaatattttgttcaagacaccatatgaaaagatggggctccaactcaaggacttaaccccctgtcttcagcccgtgtatggtttctccggccagagtgttgcacctctagggaaaattcgcctacctctcactgttgggcaagctctgaaaagcataaatgtaatggcactatttttgatattggacgtgccataagcctttaatgtcatgttgggtcgaccaaccttatatgacctaaaggctgtcacgtcgatatttcattcatgccttaagtttccaacaaagaatggggttgggtgcttgagaggaaatcaacaggttgcctgggaatgttacaaccttgccgtaaccaaggctaaaaaggaagtatcctctagtcagagttgagacaagggaaaaaacatcgccaaatagggaaccacccaaggcaaggatgaagatgtggatccccgacttggggaaccaaataccaatgttggtctagtagaagaattagaagagatcggaatcaacccaaaatttctgaccacgaaactcaaaattggaaaaggtttgttgctcgaagtaaaatcagcattgataaaatttctgagagcaaacctagacatttttgcatggtcgcatgatgatatggtcagaatcaatccttctataattttacacatcataaatattgatcctaatttctggcctgttcaacaaaaaagaagattgttggataaggagcgagccctagcgctaaaagaagaggtagaaaagctgggcaacaataatttcataattgaagctttctacccagcttgggttgctaatcccatattggtacccaagccgaacaagaaatggcgagtatgtattgatttcaccaacctcaacaaggcgtgcccaaaagactgttttccacttccaagaatagatcaacttgtggacgcaacagcagggcacgaaattttaagcttcatggacgcctattcggggtacaatcaaatcaagatgcatccaccggaccaagaacatacaagtttccgaatagatatgggtctgtactgctataaggtcatgccatttggtctcaaaaacgccggagctacataccaaagattcgtaaataagatgttcaatgaccagctcggacgaaacatggaagtgtatgttgatgacatgctcattaaatctaggaaggctggggggcatatagatgacttggacgaatgcttcaaggt

SEQ ID NO: 96725 - DNA, 531 bp, Cannabis sativa
attaataaataaataaatcaaaggtgagttattaagaaaaataagcagagtttgaaaaaaaaaaaacaacaacaacaacaatagagagatgctaactctcaatggttgggtggtgggtaagtaaaataaaatggttgagtttcggtacacgtttattaatttattagaaagagttcgtttattaatttattagaaagagttcaggtattgacagcaataaaatatatgagcatattttcataaatattttcaaaagtatgtattgtgatgtcattatttctgaaaaatttaggaattatcttatataccaattttttctagtaattgcttcaaatcacactcataactcagcacatgagtgggatctgaaacatattttcgtaacatagagacatgaaacacgttgtgattgctgaaagtgttggaagcaaggctagacgatatgctaccagtccaaccttctcgagaatctcgagaggccctataaacttagggcataacttgtcctttttcccgaaacatttgatcccc

SEQ ID NO: 96726 - DNA, 575 bp, Cannabis sativa
tgatcaagtttaagcaatacttaaacttgtttaccgttaagaccttagtcccaacatcagtaggattaatattttctaatctgaacttttctaattcaaccaatccttcttctatcttttctcaaatacagtaaagtcttatagctatttttttactcttttcatgataactgggttcttacaaagatggatggataaataggtatttgagtacacagtcacacttgtttcaattcacagaattctctgaagcaataaagcttccttgaacacttccgtagtagccataaattctgcttctgtggtggaaagagcaaccatgtactattactaagccttccagcatatacatttctgatttgtcatgaacacgtaggatatgattgattttctagtatctctataagaagcatagtcatcatccatgaaccctttcaactctaattctctttttgcattcttatatatactactacaattattcaaattcgcgacggttttgaaaacgatttttttcggggaccgtcactaaaaaaattaagtaactgtttaaaaccgtcgggaaaaatgagtat

SEQ ID NO: 96727 - DNA, 793 bp, Cannabis sativa
tttaaagtctccagcagctggtatcttagccttcagtgatctaattatggacatatcttacctcctttccttcttccctaatactattgtaactcatgtaaagcgaaatgctaattcagttgcagatagtttggcaaagtttgccttagggttggatgagatttgttcttggtgggagaattttcctccttccatttactctgttattgtcaatgactcattttaatttataataacattgtttattctcaaaaaaaaaaaaaaaatttacaaacttaaaaaatcaaaattacaaaatatattaatttataattttattaagcgttggatatgtttttctcatttaagttttatatacatatatataggagataaaaataaattctctcttaaaataatgatacttaatgatacttgacataaaatattatacttaagtgttgatcataaaatagtcatgaaaataataatattattacactttatatatatatatatagtgtaagaaaaaaaaatatagtaatagtagaactgttgtgataaatacaacacgcaagtatacatatcgttttaacaagtaatactcaggtaattaagtgagatcgttcccacaaagactgtaattaagtaccaatcaattgaattcttatttctatttggcattcaaataaaaaaaatttgaaaataaataaactaagcaaagttaataaaacaaacaaataaaaggtttaacagtggatgtgaaattaggaatatttcaattgttttgattacccaattgttaatactaatt

SEQ ID NO: 96728 - DNA, 562 bp, Cannabis sativa
  modified_base (47)..(61): a, c, t, g, unknown or other
aataagaaaatgacacgtggatttaatggcttaatatttaacggttnnnnnnnnnnnnnnntccaaaaatataacttaagtattactattgccgaaaattaaacttaagcatttatttataactggaagttaaacttagggatctatgccgcaaattactcttttttttatttattttttacttttttactattttttagaaaattaaattatttcaattttattatagactaatcaaaacacatacaagggtatactaatagaaagttaaatagtatatcaaaagaagtaggatttagaagttaaccttaagaaaaatcaatttgtaaaattaagtatcacaaaccatataattcaaataattttactgacaatattctttttaaaaaatacaattgtagctttagagaggagtgaacaccccctccgtttgtggtaatatggcagtttatgactactaaggatcgtattgtattaaataataaataatactatgtttggataaagcaatgtattgtattaattattacgatcaaaattaatgtatgttgtattatttaat

SEQ ID NO: 96729 - DNA, 597 bp, Cannabis sativa
cgcgaccaattcagtttccttgacgccctttcaccttttcggaagtgaagagtgctctttttcaattatctagtgatatggttcctggacccgatggcattaatctcctcttttaccaaaaaaattggtccacggctggcactgacctttgccacgctgttcttgatgttttgaaccacgacgttgatttgacttcgatcaacaaaacttttgttgtacttattctgaagaaaactcaagcttctaaagctcgagatttcagacctattagtctttgctcgatcatttataaagttgttgttaaatccctaactaacaaactgaaggttgttctcactgatctcatttcccacaatcaaggggcctttcttaacaatcactttattcatgataacattatcattgccaatgagatcattaatgtcatcaccactagaaagaaaggtaaagtgggctgggctgctctgaaactggatatggaaaaagcttttgataaggtggaatagaactatatccaccaaattctctctcactttggctttcctgctaaatttgtctctctcattattaactgtgtttcaactgtttctttcaaac

SEQ ID NO: 96730 - DNA, 521 bp, Cannabis sativa
  modified_base (60)..(70): a, c, t, g, unknown or other
  modified_base (138)..(148): a, c, t, g, unknown or other
tatatatatttatatatgtgatatggacttaatataatttatacattaatcataatcatnnnnnnnnnnntgtgaaccatacaacataaaatgcgatttttgatctttactacttagtaaatctaattatattgaaannnnnnnnnnntagggcacaaaacccaaaaaatacgtgattaccaagacccattagctttagaattcttgacaatacctctatccccgatgatctttatgtgattgatctaaaaaaaagtgagagtgtgagtggaatgaggagtttattagagcaaattttttgagaatttgattcatgtagtgcctactagcgataaggaggtaaaagatgagatattctgacattatacaaaaaatgaagagtatagtgggaaaagtgggtataaaactatagctaactcagtctttcgcattgaagcctctaatgtgaagagagtaaaatccttttggaactgtatctagaagttactataaaagattaaatactttttatggaaagcgag

SEQ ID NO: 96731 - DNA, 553 bp, Cannabis sativa
tgttgacacagtttttcatcaacgaatctaagaagatcgtaaacaagaaaaatgaacacaagcactagttaatcaaagtacattagtttgtgaaagaaaatttaacaaaaatgaacatgcatattttatagtggttcacccccttttggcggtaataggctagtccacttggagtgttattgatctcaatacttgagaagagttctccaaagttcaatcctcaagtgagtgtttagaaagagatagtgggagcttaagagaatgattttgttagaatcaaaatgagggtccttttacaagtgacttccctcccccttatataggttttcatctaggacacgcttagagtttaaaatatcttaaccccataagcacctttttgtaactatggttaggttaggtttgaaatacaaaatgataaaaaaaaatatatatcacatttaaaaataaatatctagaaaaatgatcagaattgaatatatcttcaagatcatgttggtaagtcatgagaggcacatgttgttgacgtatgaagttgaggccccatttggcc

SEQ ID NO: 96732 - DNA, 621 bp, Cannabis sativa
atgagtatctcaaagcatatacacccacacatacatgttacaaatttaattatatgacaaattaattataatattgttattgaatattagtattgcttactatttatttctttacgatagattaattatattaataactgtattatacttataagagattgctattagcatttctcaattaattaagtcacaaaatttcatagatttggaatccaatccaataatattaataagtatatatttcgtcactaacacatatatatctactaatcataaatataatgcttaattagcttctaataaaaaaaaaaaaaaagctttgttaggcttaataaagacacataaaaaagcttttgttaagtaacatcaattttgctgaaaattattagatatattatacattataatttaaagaattagtaataatattattaataattgttgagctaacaccagttcgatcacaccagtaggtggatctttcttgcaccagaacagtctcaggttcaaaagctgaacctatcctaggaactcgaatccaattaagacagaattgtgagagaattaaagctttattactacttagcttttttacagaatggtacaaaataaaggatagcc

SEQ ID NO: 96733 - DNA, 539 bp, Cannabis sativa
ttttggtatatttaaaagaaaagttatagcagaagtaacataaatatttaatttttcgaaaaggaacatatggtatttaagtgtataaaactcgaaacctaaaatatttatgccgtaaatatttttttttttcatcaattgctctatttttttattttattttatgttttctgtttattttagcaaatgatgaaagtatttggctaataatttttttatttttttttttaaaaaaataataagatttaatcaataaaatcagcgtgaaataataaaaaaaaatattagccaaatgctttcattatttttttaccattcttctcatcattcatattaccaaaactactacccaattaaggcattttcacccaatacaattcacggaatggctgtggctctagatttggagctaagctgaaaaatgctttttttatttatcaattaattaaatttatctctaatttttatttaattaaaacacctctttttatatgtactatacttaaaataccctaatataagagagtcatggagagtat

SEQ ID NO: 96734 - DNA, 1629 bp, Cannabis sativa
  modified_base (730)..(747): a, c, t, g, unknown or other
aaacaattattaatgagatatgcacaatctatttcggattataatcaatagaattgaaaaacacgaaattaatttcataaaggaaaaatatataaactcttaaagtttaatcttgaaattcccttaatttactaaataattttaagcatgtaatatatcaacagaaatagattttaataaggaataaaacccctaaagttttaagattaaacaacgaaaaaaatttaacagaaaataataacgaaattaatatgtaattgaagaaaattaacatatacatattaattgttataaaattataggtcataattcatatacaattgtcaatctaataccacatgttaggaaaattaatgataaacacaagatcaatttgtatataatatagaacacaataacaaaagatattaagataataattaggtatgcgtagctgatagattcataacaattaccagaatttgatagtacaatactattcactaatgacatgtttacttaaagggaatatgaatcaatggtatgatattgattcccatacaattgtttactaaattttggaaagaaagaaaatagtaggacccacataaattatggagaaaataaatttatttttatagggaatacctttccctttcctcttaatttatttttatttttattttattaattaaaaatgaaaaagacaaatatgtcctttaaaaatctataaacagaaaataattacatnnnnnnnnnnnnnnnnnnttgtcaaattaaagtatttcgattacatttcctagttatgtaaacaaaataatatgattctagttttatttgtagagagtttagtaaacaacataataaaatattgtttccgattattttctattttaaaccgattcatttctcccattaattattttgattttaattacagtttagtaaacgcgccataagtctttctctctaggtctctaaatcaaaagtaattttatttatctgattatcaaaagtataaaattgtgatgagacaatatgcattatagaattagggagggaacttagctatataacccaagttagactgggcttgctcaaaggtttcagtcaactagaaaaaactcacacttctgcttaacctatactttacacacacatatgctaagcccattaactatgatcaccaacaatatgggttaacacaacaaaaacctatataatcaacctaagttttaataaaatcaataaaagttagtgtaagcccaaataaaaagtctaacagttgtcacatgtcctcctctgtactttactatataattaacttaagttttaataaaatcaataaaagttagtgtaagcccaaataaaaagtctatataatcaacctatataatcaacctaagttttaataaaatcaacctatataatcaacaaaaacctatataatcaacctaagttttaataaaatcaataaaagttagtgtaagcccaaataaaaagtctaacagttgtcacatgtcctcctctgtactttactatataattgattttgatatatatgaataaagtatattttgaatatttcttaaaaaaaaatattataattatatatattacataaatacttaaaaaaaataaaaataaaaa

SEQ ID NO: 96735 - DNA, 1238 bp, Cannabis sativa
taaatgtaattcaatgtttgatttgattggactatttgttctttttctttgaaaaaaaaataataaataagataaacaaaattgaaaaaataatttaataatatataattatagcataaaattttaatttaaacaataaaacttgagtcataaattaaataataaatttctgtaaataatattaatatatcatatgtattaataaatatatatgataattaaattaaataataaggtaaatattattttagaccctgtattttgtaagaattactgactagaccctctgttttgataaatgataaaataaacattgtattttctaaaatagtactaaatagtacccatgaactaattttctatcaaaataaaacttgataataacctgatctagaggtgttatgacaaaactggttacgtgtacttcaacagtatttcttcttagaaattatgttcaagttggttatattagaaaaaaaattatcaaaattgaggtcagagtcctatttatatcattttagaaaatacatgtctattttggcattcaataaaacagagagtccaatcagtaacttttgaaaaatgcaagtccaaaataatattaatccttaataatatatcatgctttattataataaaaaaataatgtaataatgaaatgaaattattttaataataacaaatattcatgtcaagtaatattttaaattaatcatttagttaatttaatataaatataactttgatataaatatttttttaagaagaagaaaagattttatttcaactatctcatgacaatacacagaagtacaaaagcaataactaaacaactcaaaaattgttgatcatggctattagatttttctctctaaatattattttttttaattttaaaaaaaatatactatatagtactatattatttagttagaataaaattatatattatttaattaatatcactttaaaattttaataaccactatatgataactcaaaattatatatttttctcaatttaagaaactatgtttttgataataaatttataaataaatttttcattctcctatttatattatttttaaatctaaaatatatttacaaaattaaaaatttaaaagaaagataaaatattaattctgtcaaaatagattatttatctacactgctagatgagataaaaataaatagaattaacttgattagtattattgagtcttgtagcataacca

SEQ ID NO: 96736 - DNA, 777 bp, Cannabis sativa
  modified_base (455)..(459): a, c, t, g, unknown or other
tttatttttttatataaattttttcaaaatatatacaaacgagcccagcccattattttgtgggccgagccgcatttatagagtagaaaagtacgaaactaatttcctcattattatttcggattatttcaaaaatacaccaaatcaacaaaaaagttgcaaaaatatagctgtacgaaattttatatatttttacaatttttaagatttaatttaaaaataaggtcttttgatgtatttttatattgtactttttttcattttattggtttttttatttgtaatttttttttatgttgtttggatatttttttttttaaaatgtacaaataggatcttgaactgatttttatcgaaataaaacttaataatattttgatctagatttgttatgacaaaactggttgcattttctgtatctgcgtattacaaattatcttcaagttggttatatnnnnnaataaaattgttgaaaattaagcttaaggtcctattttactattttagaaaatatatggtccattttgtcatttaacaaaacagatggtccaattagtaacttttgtaaaatacaaggtcctaaatggtatttaccttaagtttaaatgtaaattattgttaacgaagagtttatttgaaaaaaaaataaaaaaaattgtgaaattagactaatttaacgaatatttgcataatttaatgagatattcatacataaatcgatgtaaagaatgctggcaaattttatgcctaaatattaggattgaagtttttagcaag

SEQ ID NO: 96737 - DNA, 1116 bp, Cannabis sativa
attataagttaataatattaaaattctataaaaaaaaaatagttgggtcggatctgatccgatccgagtatctgatccagccggacggggcggggtagatctgtacatgatctggattaggtcggattatagtcggatcagatccgacccgccccattgacattcctaatgatgaggcaacttatcaccgagtgaatttctaaagtatgctcaatattttttcttttaagaaattaatattttaattcaaattagtgcctaccattactgttgttgttttaattttggaattgattatttcactatttacaattaatgtttccatgatgagtgaaattaagctttgtctctgttaaattttattattaaataaggcttatttttgttgtcaacttccaacaattatcactactatgatgaaagggattaattaccttaattctttgtatgtatatgtattcacaaaataaatttattataaaattaataatatacattgtatattaatacaaacaaatatttataatcatatataagctatatttataatcatatataagttatatatgatatgagtacataatttattgatggtgtgtgattatgactatatatatagacaaaggaggtgaggcgtctaagagcatctccaacgaccacattgaatttgatgttacactattaccaaatttagtgtcaaagtattactactccaactacaataccaaaaattacactaaaaaatattccttattattatattatttttttaataaaattaaaaaatttaatatcatattaattaactaaaatcacaacaatatacccctctaaatgaaaaagtgatgcatacaacacacagtttgaattttattttcagcgtgttaaatttctctgatttttcgaaattttgcaggccatatttaataactataatgtacacgactatgaaataataatagactaaaaaggtgtcttgaatgctaaaatcggttagagcatatcattgcaccacttttaaaaaggtacattattttttgtgtgttaaatttttctgaatttttcaaaattttacaaaaatgtcttaaataattataatatgcacgactataaaaa

SEQ ID NO: 96738 - DNA, 588 bp, Cannabis sativa
tttctattattattttttattattttttattattatttttgaaattagatagtcttaatatttatttatttttctacatgagtgtacaatataattatttattatattctctaaagttttaagtaatttaaaataatttataacataaaaagtagcattcaaattaatagtctattgtgcacacgtataaaataaaataatacttaagcgtgtaacatatattgttttaacattacttttgacacgttaaattttttaaatatctcaaaaatttacaataaacttaaatactacacttgtatactgtcataaaaaaaattaaaattaaaactatttgaatatgtcgagaacataaataactataagttacatcggtgtactaccccctttttcagagtctaccatacaatttctcatatatatatatatatatatgcataaatttatctcatgtgcatgctattaaaaattcatgaatatatgttatatattaccatgaaccatcagaattttgtgaattcaaaatgtaactttctcctttagaaatgcatttgtctaattcatctcttctgtgtgttggatataatt

SEQ ID NO: 96739 - DNA, 1220 bp, Cannabis sativa
aagcattcaagttaatttggatcctcccaatcctattgcccacatcattaccaaatagatatcgaacatagcccacattccattttctggtacttctatacattaaatcagccacagatctcagactcggagcttttgagcgaatactctccatcaactcacgaaattgaacataatccaaccatggaatccacggttgccaccagacatccacctcttcacccgaggcaaggacagtacacgcccccttagaaattgtattcctagctcttaggatgccacgccacaaaaagctatccgtatgcttttcttgaacactccaaaaagatcctctaggaaagtattttccttttagaatatcacaccaaggacgattaatcttacaagccaacatccaagcaagtttagcaagaaaggcatgattgatatcttcgaaacggcgaaacccgagaccccccaacatcttgggttgacaaatagaattccacgatttcgctgcccacatatactgattttcaagagaaccattccaccagaaccttcgaactactgcatcaagctctcggcaggaggagagaggaattttgaatgtagacatggcatagtttggaagggccaaggcaactgagtttatgtacactaatctcccaaccttggacagcgactttaatttccaaccttcaagtctctccaccagtttggatttaagaaaatcaaaatcttttctcttactccggccgaaaataaaggggttacccagatgtttctccgagtccggtaccccgctcatgtccaacttgctttcaatggcttccctgagcgagctagaacaattgcccgagaaaaggatcccagatttctgtttactacacttctgccccgaccactcttcaaatttttggatgcaaccattcaaagtctccatgtcccggagattagctcgggagaatatgatggtatcgtccgcaaacataagatgagatatagcagggacattacgagccaccttgataccatggagcagacctctgtcttgttcgaaagtgagaagccgagagagcacttcgttgcacaggaggaaaagataaggagacatgggatctccttgtcggatacctcgctctggcttgaatcgtttcaagggtttcccattgagaagtatggaataagacacggttgtcacacaacacatcaccaaattttgtggttaatagtcacaa

SEQ ID NO: 96740 - DNA, 701 bp, Cannabis sativa
  modified_base (332)..(334): a, c, t, g, unknown or other
  modified_base (515)..(519): a, c, t, g, unknown or other
gcaaagaaggcgggaatagacacagagctagggcttaagacactgtcactcactcaaccttcttttcattatccatttgggcctcgtattgggccagcctatttcttaaagagaaaattacacacttgtgggaaatttataaagatactgaaatttgggttaacttttacaaaaatactgtcacacaaaaaagttttcaaaaatactgttataaaacaccagtaaaacacaaaatagaacaactcaaaaaaatagtagaacaactaaacaatactagtagaatactagtaaaaacttaacacagtataatgcagtatgaaacttataaaaannnacagtaaaaaagtaaaaaatatagccgtacagtattcttataaaaaaaatagcaaaagttagtataccatgtaaattttcctttgtaaattagttgtccaatataccatcaccatctacttaaatttagcacatataagtgagtatatcttaactaaaataaaaataaaagtaaaaattannnnnaaaaaataataataataaaatgaatatacaatgtaatttcttcaaactttaatctctttggaggattaaaaagataaattaaatatatcaaatactaaattatttttaaaaagataataaatatttatactaaaaataatattatcgtaattttatccttccaacttgagttactgtcttct

SEQ ID NO: 96741 - DNA, 663 bp, Cannabis sativa
gctgctggctagtgttgtcttctgccattgattttgatcttgttttgctttcaggcctttatgaagttgagtttttcacgtgacaactctagggggtctccaagcactcttcgtgagcagataaagaccttggaggctctcctggcgaaggaggctaatcatctggcaaagggccaggctttatctaagatagagggtcttagcctgcagaattggagcatgatttctggtttggaggccatgcttggcacagggaattaggagaaaactatgcaagctgctaacatctccaagttggagactgacctcacgaggtgtgaggagaagctgagggccacccttgatggtcagcaggtcataagggacaagtatgtcaacttgtcttcagaaatcatctatgagttcaagctgcgcaactccaatgatgatctttcatacatgggcaatgctgctttcttggaaagcacactagcccaaggaagagcgctattcgagagcaggttggaagcgaaacagaccaccatctagccagaggagtcttctttggagaaatttgatgaagagatggctgacccacctgcttaggaggtggctggccaaagccttgaccaggttgttggccagcctatagaggctatggccgccccacactccggcgatcca

SEQ ID NO: 96742 - DNA, 2947 bp, Cannabis sativa
tgagaagatgagatggtatcctaatgatagatatgaagaaggagaaaatgtattaaactattctaaattgtgactaaattatctggtttaagtttaggtggtttattttggtggttggattattattttaatatgttctcttatttcacaacaaaaagacacgagaaaaattgtctaatcaaatcaaattccagtatcttgctagtattaagtgaatcaaaaaatcaagaggcatataatatataatagagaactaagagaagcacaataaaagaaatatcagcacaatgatagttagagtagctaaatttgagaacatatcagatgtcaatgaaaataggacattggcgcaccttctccacatagctgttcaaatcgagcaacaatgtgttttccatacgtatatttcctcagagcagcaagatgggctcttgtgcgattcagcaatattgctcgctgtctgtcattgcttttctcaaacatcttttgcaccacataattagcaaattggtccttcatcattgtctagatataggaagcaaacaactaattttagtatgttcggaaacttttacaccaattagcttatagggtgttctaatcatcacaaaattatattcatgaacaaagtaattttttaaaaaataaaaataaaaattggaaaattcttttaaaatctgtttggaatgccgatgaagagtcgagagaaacttcagacaggcatttaatgtccaaacagagtatacacttcttctcattgactcacctaaatggtaaggccaaagcaaagtaccagtggtaaaagaggtgaatattaattctgttatcaatgtaatataatgaattatactcttgtatcatatatgcagtatactttatttgtcataccagtaaactatcattttcctccgacactcccaaaatctcctcgatcaagagctccctctcctcagtattgccatgctccaaacacttctcaacaacatttgatgcatacttgtgcatgctcatttgtacaattatcccggttaacttgctaataatttggctccgctcacaaggctttccctgcactaggagatactgcaagcaatcacatgcactccatattagactcgaaaacaaaaaactaacatgaatagaaaaaatagcataaacttaaaatgaattatagattattagtttttttgttttcaaaagatactgttgctaaatatctacacaacaaccactgtgacaggtgggtgcatggaaggagtttgacaggaccaactctttaatggggaaaaaaaaaggagacaaccaaatggggcaagcataatcaagaaaaccaacaggaaaacattaacgaaacatatgggaaggaagtaacatcaagcatgaacaagatttcttctagagcataacactagctaaacaaagtgatatatagactgaacactacctatatcatcaatcatcttaactaatctatgaaaacctattgaaatttagagccaaatacagcaatcatttaaatgcattgttatttgttttattatacttaccaacattttcagctaaaggctgtttgaaaaagcaaatctaacttctaagaatagaaactaaaaaacagatcaaattgatagtactgagggatccacctgcttcctctgtctaacaagaaatttatagaaccagacgcacttattcaatgaagaaaattcttaacttatattaaggtaaactagagaagcataaaaataaagaaagccaacctgggtaacataattgccatattgatcttgagcaagaatactagcagactccagtatttcatttatgacacatcggcattggaggtcatctgaacagtactccaaaactctctgccacaagccaaaatatgacaaaatcttaaacacgaaaaatcaaatctgatttagtattaaaacctgaagacaacatgatttacctgtatgacacggcaaccgtaggggtgagtagcaaggttggcaacatgtcctttgaaagcagatataataaatccaatttgttctgctgggacacattcaatacatttctggatgacatgatttccattttgatcatgtacacatgtcatgacatggccatcaagttcttgcaccagatgtgtcttttgaccaacctcaataacgtcaagagcctaccaatccataaccaaaatgacaaggttattccgcaacaccattgtccaacacaaaatgttagttttatactctgtacttcacagaacacaaaaatgaaaagaaagaatcgaagccaaattccacagtatgagtaagcagctctatgggcagtctctttctctattaaaatatgtccaaataccaagagaaatacacatgcacccattttaggatttaaatacatcccctcttgcgcacacgcacaagctgattaaatcctaaccaattgagctagtctcaattggcagctccataccattctaactagtcataaagcaaagaaatcaaagaagctgacaaggcaaagcctcaaagacaacaagacttcagcaaaggcaattattttagggcaccataaagtatataaggggagagagtctcttagaaagataaggagaaaattggttagagctgagactcattgtggagagccccaatcctcttaaacagattggaataggagagaacaagcctcttggaagcttgtgatttgtaattttgtccatcaatttaacaaagtttttgcaagagtttcagccatcctattgtcttaattacataggttaattctatccaaaaaagaacttatcaaatgccaaaagctataagagatgagggtgcccaagtagttatatactactaaccaatctcatactttgccaatgtaggatcctaacgttacacccccctttggagccgacgtccacggcggcccactctacagtggcctactctgg

SEQ ID NO: 96743 - DNA, 534 bp, Cannabis sativa
gaagtgaaattctctttggtgaaatacagaaggaggattgctaactgatttcgtcacaaagttcaccttttagttcaagccaaatttcaaatcacgttaccttaacaactatttctccgactattttctatggagttgtggttgaacttgtgtctgtatgtactgaatacaattctactatgttgtttatgatattaacaattgctcacattggaccagaacccacaactgacagatttgttgtgatggtaatggaacattcttgcttttttaaatgattgttagagaggctaatcagatgtgaatatttttttattttctatctttagtgcatatttttatttatcgattctctattgtattcttatggttgtttagagtctgggcctggtgagtggagtatccttggcaatactgttgatgtccagcataatatgcccttcagtggccttacaacattcagaattattttcttatcaaaatttgagtgttctcaaatggcacatcctttaagttatcattttataattacaa

SEQ ID NO: 96744 - DNA, 828 bp, Cannabis sativa
cggtggcttgctgtttggctttatcgattgctagggacattggttccgaatttgttattgtggagagcgactcgagagtagttatcaatactcttaatggaaatgagttccactgggcaattgaaaactatatcctttttgtaatagttattctcctttgtttattagttgtattttctaatattagtagagcttgtaactttgttgtccatataatgtggctaagtgagcgttttcccaccagaggtttggttttattccgctatctgccatacctataaacattttatgtaatgactgcgagatctaactatttttatttatcacaagtacgcttttattccaaaaaaagttaatagaaacagtaagaagggttaagtgtagggcatgacggtgtggtaataatatacacaaaaaatggcttatgacaaattaactaactgggaatttgggatattctcagcatctgatcaaatattctaatgagcaatttcacacgtaaaagaagagacaaaaaagagaaatcaatattagtcacactcgaaacattcacaaagttgaggagtacttcttttttgtatccattaatcaaaatcactctcatattatatttcattaaaatgtattaacttttgtgagtgagttgcccaatataccctcaccttccacttaaggctagcacataatttatattaacctaagagttataatggagacatcaagtatatcttaaagaatataaaaataaaggtaaaaattaaaataagtaaaataaaatgagtatacaatatacacaataatatataaatttaagggattatttcacaa

SEQ ID NO: 96745 - DNA, 1473 bp, Cannabis sativa
atttcatttgtggttacttgtacagagttttcaaataaatcacttaagtttgcttctgccattagaactttatgacactcagtagataaaacttgtcaatacccgtgaatcaatggtaagctgggattatctcacccttacttccatacacaaactagaagaccttgttcaagcttcagagagcttccttttcctgaatcagtatttattcaaattcaaaagtgcaaatattgttttcaaatgatgatcagcttcccaaaaagatataaagccattacaactataggaatgactccattttgctaaggcatcaactggtttgttaaaagatctaggaatccaaatcagttcacaattggacttgtgtaacatattcaagagctggaaaattcagctgatgccatattatttaggttggcatcaaggttaaactgtataacaaaaaatctacattaattgatttgcatatatttaatatactattaaaattattaatttatagttaattataaattagaaaaaaaaattcttataaaaatataaggtagcttatttacatttgatattaaaattttattcattattttaataatttatgataacttagttaattagtatttagaacaatatatatttttagtacattgtttgaatgagtaaaaaaaaatttataattaaaaatatatgtataaaaattaaatatgcttctattaaaaaaaaatcaaatatgcaatattaatcatgttaaattattgttagttaacatatggtgtaaaataaatatagtctacacgctaatatcatgaattgagttagggttaaaatttcttgaatgaaatacatacagatgttaaagttgaccaattagacatattaaccaattgaacatgaacacaaaagcaatactctctcctaccttactcttttgtcctaattttttcattttagtggatatgtactcccgtgtaaacaaactcttcattcacacatcaaattttcaattaatcaaaataaaaaaaaacaattaaaatttgggtacagtagatgaggtgcattttgtaataatttgttatacatataatttttcatcggaaaaaaatgacaattgataataatatattatatataataaatacgttaattcattttaaacttttttactaaaataaaagaatgattatataaacagtatatatggaacatattttataagaattttatttactaatatttattttaatagttaatttaattattgaattatttacaacatgctttataaaatagaaattaaacctcttaaatttgagtatacttacatcggtgtcatatcaaaattaatgatttcttccgtttagtactccaatccttgatttctttctgtagtaaagtatcaccaagtactgaaatcaaatcttctttttcttaagatgtggttgatgttcacagactctttaagtgtcctgagtatca

SEQ ID NO: 96746 - DNA, 612 bp, Cannabis sativa
ttttatatttaaaggaaatatgttcttttttttttaattattgtttgcctttttttcttttatagagagccatgttgatcataattatgtgtgcatgttgttgtttcacgacttagtctctatgtcatcataggtagaccaggtgtgcactcacctgtagataaaagacctaaaatttgtctaggaaatgaatagaatttgagccctcaatattataatggttatcatgcacgactactcggcttatgatgttaatttctatgattgatattgaaaattaggggtaaagtaaacaatgtgatatgcacaaatagcttgtgtcttgtgattacttgtgatctctctattttttttaataagtgatgatgataataagatgctttatttttaatagctaaccatacataaatttttattaataaatttttggtcctttgatattagttatttttctattaggccttataagctcactccttatatttctccttttaagaactcaatgtgatacttattaatgagagaaactcgttgataaaaaataatgtaattagcttagttcaatcttatcaacgattgaactaattagttattaattaactagttttaaga

SEQ ID NO: 96747 - DNA, 591 bp, Cannabis sativa
agtgttttagtcttgtctttgtgaaatagttttgagtgttttagttttgtctgtgtgatatggttttgtagttagttcttctttgttcttagattgcttgtcatcaaatcgttgttagtggttggaaataaaaaattctctgcgattgaaggagttgttagtacgtagtgcagttacgtaccttgcacaataattgggtgctcaagcttcgtggttaaacgaacctactgtaacagtttttactgttgtgtcttctgagcggtaaatgaaactgaatataggtgttcctaagactgactgtgatgctgtaatctttttaatctgattttatttttagtttttttttgtcaaaaaatattagagaattaagcgactgattatttaactcatttttttaattataatcttcatcgtatctccaagaaaaaatgtattaaattgcatactattattttaataaattatcttcatcgtatctcaaagatctaaacaactctggttgaaagaaggagaccaaaatagtaagttctttcattctaaagctagtaccaggaaacgcaacaatcggattttttgtttgaaagatgatga

SEQ ID NO: 96748 - DNA, 943 bp, Cannabis sativa
ttatactcatatttcgagcaacaatatggtgttgacacgtgtaaagaaactaactcgtgttatagagcaattaatgcatgtactaaagtactgatcgcctaagaaaatacatgtggtaaaaatattaaaactcgcccttttaaagataaggacgagctatgaataataactactaattgataatattggtgagatgaacgatcaacttagaagatttatctcgagaaatacagaagtacaatacttggaaaaaggtagataatgaattatttacagagcttgcagctcattgacttacctactcgcgagtatgctaagagactaagggttacatttccagcatgattcatctcagaattgtcatactgtgatggtgttttgtgtttgcttcacccaacacttattgaatggcgcaagaagtattacttaaagtatacttagacattgacaaccctcttcagaataaagtatcttgaaaaagattttttgtattacaaaatttcaaaaaaaaaaaaaattgtataagagttttcccatattaacaagttcaattaatatactatcataaaatttaaaatagtttaatttattaaaattaatctaaaaattaaaaggaacattataaaaagtgaatcttgtgagatcctgaactaatagtgcatcaaaattgagcatgtcatcgtcggagttgtgggaaccaaagaaataattgtcccgttgaactatttactttgtcaaaatatatatactagtcaaatatatatcaattataagcatccaataacaagcttctctatcgtgttgttgtctccctatcgaccaaacgacaactcgcccttaagggaaatacctgctttacattagcctccacttttactccaacagaaatggttaaattcagcttgtgtttgagaagaatggagacaagtcaagccctacttct

SEQ ID NO: 96749 - DNA, 1021 bp, Cannabis sativa
ctagaacgattaggatacaacacattaacacaacacaagaagtctttattgaatttgtaagaagaaatataaaagaataaaaaacaaagtaaaaagtagaattttgtcaacgcaaaatgcaaggttgagaaacgtatagccaccgttaaaggatgagattctgataaacgtgttgtgctgtgattgtctagttttatagtcttgtatataaaataataggatattatgtatctggattgggaaggttcctttggcccactgaataaatatagttaattagttatgtacatctttgtttcttagtcaaattacgtgaatggagtctccaatgctattaaagagcctagtaagcaaataggcaggccgccgccggcggaggctaggaacttcatattgttagagattatatattatgtaggccataactacacaagaatagattgagagattttgtatgaaaaatgtttaatgcactttagagaagtatagaacatcttactattttagactatcagatcattaatgtaaattttatgttaaatttagcttaaaaaaatagttaatgttatatttgatctaaagtaaaataaacttttttgttatggtaaaaaattaataaaacattacattttaatttcgaatatataaaaaccatattaaatttataaataaaaataaaaaaagttttttttgcttaacaaaaatataaaaacttattaattgcaataatgaatgataatagagtaaataaaaaaatatattttattgtggtttaaaatttcacttattttatattttatcttaaatttggttagtatatattaaatttagatgaattaaattttatgaacatccgcaaatatacattatatttatagcactttaaatactttatgggtgaacaatatgtttatttgaattgtaattcataatatgaaataatttataatatcaacatgtcattgaattgatggaatagaatttaatatagattttgttttgttttggttttttttttttt

SEQ ID NO: 96750 - DNA, 1215 bp, Cannabis sativa
  modified_base (92)..(92): a, c, t, g, unknown or other
  modified_base (1014)..(1025): a, c, t, g, unknown or other
agtagctgccagtgttagaaaagtcgtcaaaattagtattgtcaccggaaaaatcaccaagaaaatttcttgaagaagaaactagtttcttngtgattttttcagtgatttttttgacgactgccaattctgacgaattttctggcgtcggtagcaactccgatgactttttcggtaccgactgctactctagtgattttttcggtgctgtcagcaaacttcggctacttttccggcatcaatgacagataaaactaccgaaataaataaaaatattaaatatggaatttaaaaacctaatttacatatatatatggcatatcaaatatcataaaaagacctaaaaacaataaaatactatataaattagtcaaatttaaatgtgacatatttattataagaacttttaaaattctatagtaatatttttagagaaaagaaagaataatataaagtatttaatattatgtgaaggggaagaaaagaaaattgatacacatattcagttttaattaattaatagataatattcccaatttagaaaagtttaaaaggtttttgtgctacactgtacatgaccattttcagtataatttgttcataatctttatattacatataattccctatttaagttactacctaataaagataccaaaagccgttattaacaaaaagtgaaaattctataaattttcttttagaaaaattattctttttaaaaattttaaaagagacaactcaaggcacagttctcttgccaccaccaaaaaaaataaaagaaaagcacctctaaattagaggcatatgtcactttgcatagtgtacattagaaactcttaaattaaaatagcatctccaatttatgactttttcttttctttatttaaattaattagtaaacaattcaacctgttataatttcttaaccaaacttttttgacgaaagagaggtcgaattgttatagcattttgatcaaactttttttacgaagaagggatcaaacaactatnnnnnnnnnnnnaaaacctatctgacgggaaaggaaaattaaaagttataactcgcatataaaattgaatactaacggtttacgtgagctaagaaagtgctaaacgagacgtcacaaagtcttgataaaagtacttgaacctagaaaatggatagataacctaactatttatacaaaaaaatctgaaatatacaaagtgata

SEQ ID NO: 96751 - DNA, 524 bp, Cannabis sativa
tatttaatacataacaaattaatagtcgtaatatagcttgtagtataatatttacaaaggatttggggtcaacctcaatcttaaatctaaactcgggatccagttcagatccggacttgaacccgaacttgtacctagatcctagtctcgaacctgaacccagacccagacccgagacccaaacccagacccgaaccttaactcggacttgaaccggaacccatacccagacctgagaaacggacccagtctcaagaccgagaccggccggaccagacccgaacccgagactcgcaccccgaagccagacctggatcatggacccgacccgtagttgatgttgcggtcgagtgtatttaaaatatattataattttacataatctactcataaaagttaataacaaacatattattatattaaataaaactaatacaatacaataaaatgtaatacaatgttgtgtaccaaagaagtcctaagagaatttctatcaaactatttttcttaatgaatatagtcac

SEQ ID NO: 96752 - DNA, 552 bp, Cannabis sativa
gttaaaaattaagctcatggtctttttttttatcattttaaaaaatacagggtcaattttgtcatttgacaaaacaaagggtcgaactagtaacttttgtaaaatataaaatccaaaatagtatttacccataaatttataataactaccagataaagacactcttgtaaccatcattaatattaatactaattataaaagaaactaacaaaatgaaaagggacaattatcaaccttaaaataagtcttagttaagatgaattgattaaggactaactaatcattaataaacaacttccttaaaaataaaaactaatgttattgcatattttttaaatttagagaccaatagattataatattaaaggttaaaagatattattagtgtttaatatactacccgagttattatattactattagtttaattaattattgatagagctcacctataaatttaataattacgaacaattagttactaatgttcgaaagatatcatctaaaattactaactaattataagatgctactttataataatattaggca

SEQ ID NO: 96753 - DNA, 668 bp, Cannabis sativa
aatagtattataatatatatttttatccgtttgattggagtaatttctaaaaattaaatttttaaaaggcccaaaatgtgaaggagccaagaattgaacccaaaaccaaccaaccaacataaattccctctaccaattgtgttgtaagaccttttatgaaaattattgaacaaaaatttatatatatattatatatatttttattatttattatatatataatattaattttaatttttcggggcctccaaatttgtggggcctagggcctaggtcccggctgccccaccttctggctggccataaatcagccatcccgcatagacccaacccttcaaaacccacctccaaattagagttgaacgatgctaggattagagaacatgtagtgacaactcaccaggacgagaatgctagtcgctataggcgtttcttgcaagaaatctccgaaggcaaacaccgattcttgcgagatgcatcctggccagaacctcctagcgtgtcctttattcctttagcaaagcctttatttttaatcaacgtcacgattgcttttgaactaggtgacttggattttgagataatgcctcccaagctgttgtgaaaaattgtatacgcaagtgcacgcaatcgtcaacaagtaataaagtgataaatcgagtatcgtc

SEQ ID NO: 96754 - DNA, 726 bp, Cannabis sativa
gatctgattttttatattttttgaccaaaccagtataacggtgttttgaatattggaaactaaaccagaccaataaatttattaaaccaaaccactaaaaatagtttggtttgattcaaaatcatagtttaagcagagtttataattattcatttttttaaagtaattatactatttttattaagttttttactttttttttttaaagtatatatttagtatgataagtaataaatctatataaatagtataaaatcaaaatataacataaaaatctaaaattcatgcaataaaaaatttaacacacaaaaaagttaaatctttagtcctctaaacccatttaatccaattgggtaataataacaaaattgggtatttaatggaaaatttcttttatcacatacatataataatatatatacattacttatttattatttattataaatggtctggtacggtttaaccattaactatttattacgaaccacaatgaaactgttaagtggtgaacggttcagattaaccagataaccaaaaacggttttgccggtaatggtctactgtaatttagattgtcgcggtccgattttaaattgcggtttgatggtatctatgaacaaccttaaggtagaatagtatcatatttttgttatgtgtttaatagaagaattagtttagatccatgctttatagtataccattctctctaaatatatttcttag

SEQ ID NO: 96755 - DNA, 536 bp, Cannabis sativa
  modified_base (231)..(236): a, c, t, g, unknown or other
attggattggatttgatccatctaattcaaaaaaaaaaaaatggtaaaattttaatgttaatttttatatatattttacgtataataatataaaatctaattaatcattcaaatgaaatgaaaatcctatttagttcgattggatgttggatgtattgaaattttagacaccacatccaacatctgatcctttactcattcaaatgaaatgaaaatactaattagttcgannnnnngttggatgtattggatttttagacacaccatccaacatccgacccgatccaattggatatttaaaaataatatctgatttgatcataattgaatattcaatatttagagataaattgtaatttgatcagtcagttatcattggatttgatgatttaatcaaaatttatcttctttgtcaaacacaaacaaaaaaaaaaaaaagtgaaaaaatgtaaaaaaaaaaaaatccaatttcaaaagtatccatgtattaaaggaataattacataagacacaattttttgtaaaatatttacatt

SEQ ID NO: 96756 - DNA, 663 bp, Cannabis sativa
aggtaaacatctttcaggtctttgctttgcttaattgtgtgatacttcttatacaaatgtatgctatttatgtgtatatataaattaaatgtgttgtttatatatatacgtataccgttggtatatatatgttggtgttacatttggtatgagaaagatgtggaggatgattattagaaaatcgtctttagagaaatgaataacattttaaggtggtgtatggtattattccttaaacctcaactaagactctaataaattagttggttgttctttaactaactcaattgtcacagttagtatactaggttaattgacctatataaagagtactattcatcttatttcaacagacaaaaacaagaaggcttaacaagaaaatacgaagttacaatgagaaagtaagagagatgactgagagggagagaatgagttgggattgagaaattgtattaagcagtattgtcgattatgttggctcgggttagtgagttaatgagtgttgagggattataccatggatgactcattgtgattattttcttgtagctcctcatattcacatttttaattctctccattaatatagattagtggcagtactttcaaactggagtatgaccaagttcacattgaacttaggatcggaacaagtataaatct

SEQ ID NO: 96757 - DNA, 783 bp, Cannabis sativa
cggtgtctaccattaaaatgtggtctatacaaatgtttttattaaattatataaaattaaatatgtactaataataatatgacatgtcaaaaaatattattagtgttttttaacatttctcatattttatatttataataaaaatagaaattgaaacgctgttaaaaatgtccaacactagataaaataatacgtaagaattttgattggagtgctattaaagtggtgtgttactatcgttttacaacactttcgataaataattaatattaatgtaattaatatgtgtcaaatttaaatcatgttatactttatcttaaatttaggtaacaataaatatatatacatatatttagtattttgctacattaatgaattaacgtgttttacaattttttaacttttttatttaataatttttatatattttcaataaaattaagtatttttgtctaagataaattgcaacaaatgcattaaggtcatatataatactgactcctttgtttttaactaaatttagtataaatcttacacagaggagtggtcaataagttttaatgttacttattaaataaaaaattatgaaattcaatattgaattgaattaataacatgtcattatcaattccattaataataatattattagagtatcataaagcacagtaaaaaatgattcatataagagaattactaaaagtataatattataaaaagtcttgtcttttgacatggtttgagtgtttgtcatggtacgtgtattttgtcatggtatgagag

SEQ ID NO: 96758 - DNA, 651 bp, Cannabis sativa
gattagcaacgagctgcatagtatttttaaaatcacgctgatacgcctatgctaggttgggtgttacaatttggtatcagagctgccaagttgtctttcgaagatcgtcacgacatgtacaatcatcatcaacagtcagctcgtttcacaattcagtaagctttgattgctttggtagtttattttaatagtatgacttaagaaaagcctgttaggaagcattttagtagcatgatagtagaataggcgcatgttttttttatttccaaataagcggcattagtaagttttccttgatcatggactgacgaaactagctattggttgtgcatgctgttctaaattagtatgggcgtcaagcgatcaggagccagggtaactcggttagatccagtggtggtcagggagctcaggtttccctcaatatccgtggccgaggttgaggtcccaggggtagggcacgtggccggggtgatgttaacccgccacaggctgcaagccagcattaatgaacaagatgatgagattcaatggttaagacaatagggtgctcctgcagtgcctgctccaaaaattctggtggcacctgcccctgctgttctggctgaaccagtggtggcagtgaattggatggaacccttgtatgaaagg

SEQ ID NO: 96759 - DNA, 601 bp, Cannabis sativa
atatcatagggagccatccctattattacttcataacttttattgtagaaggattgtatcaatggtaaataccttctccacaaaccctcaaaatctataacacaggctcgaaccatgtgttccagcatctatattattcttttggactggccatcactttgaggatgaaatattatactgaactttagctctatgaaaaaaaaactcctttacatataattttgcatactaatcaactatataggttgtctaaatcggtaaaaagtatgctaacttactgaatgatctacaatcacccatatgaatcatataatctcgtggttctaggtaatctaataaaaaatccatgataatgtcttcccatttttactcaaaaagagtcaaaggctgtaataaacccgctggtctctagtgctcatcctttatctaccaacaagtcaaacatttggatacatattctattatatcctttttgatacctagccgccaatataaagatttcaagtcttgatacatcttggtggtaccaggatgaggtgagtaggcagtggtatgagattcatataatttccttcacgattccatcactaactggaacaca

SEQ ID NO: 96760 - DNA, 622 bp, Cannabis sativa
  modified_base (390)..(404): a, c, t, g, unknown or other
ttgtggctgttacttaacagttttgccatccattgtatggaggccctgtcttgctaccaataaggatgtattctatctgtactctgtcaatggcttatgtggacatgccatgtcaggtggacaaaatatgggataacatttacccccgagtccatgttcaaacatccggtcttatagggactttttagcttttgtcttgtttgttgtagtctctgttgagcagccttgtcgagccaagtgttggctttcacatggcatacttttggatctttcattttatatacatctcatcttctcttcttgaatatctcttctttattcctgccattaacaagttttaagcttttcaagcttttgaaaactttttgattctcatgttagtttgtaatnnnnnnnnnnnnnnnatcctcatgacagttttagaatgtttaatgtgtgactttttgatggaaaagattcaactctagccttctttatgattcttgaatctttgagtcataaagaatacgaggcttatattcgagttttgaatgaaaacacacattggtattcaaaacttacctttgccagcttaggaggtcttgcttgagacctggcaggtcctaggacttaatcatgggag

SEQ ID NO: 96761 - DNA, 894 bp, Cannabis sativa
ttattatcagaattgctctggttttgaagagtttggtccttactttttccccacagaacagcataaaggcttacaaccaacaaaatcccacctaaaacactacacatattaaaaaagtaacaagatttgttagaagttgtgtgaagtagtgctaaacttgagtttgcatcaaatgtcgaaggagctgaatttatagaaatgttaataattattcacctgccgaggttaatggcctcccctaataaaagcactgaaccaatcattgtaatgattagagtcaatggttgtgacatggctatgaatactggtcctttaatctgaaccacccatgcttggatgttatatgaaagagaagttatcaaaattccctggaaagagaacaaccttgaaaccaactctgtttaaaatgtaaactgaaaaatttcctccaaagaaatactagctgtagtagaaaactttacccagtcacagataatattcaataaaagaattgcgaatggaaacatattatcatatgtgtataacactacaaatagacaggtatccaaatgagagaagatagtaaagagtctggaatataccatattatgtacataggatatttcagtcttttcatcataacaatattatcggtggtacagaaagtactctaagtaatttagtatcaatgaaacatagatgactaggaaaattttgctaggacacaaattcccaaatctgtctgtatttttaatatgtaaagcaaaaacaaaagaaaaagaggggaaagttgtaaaactgcacacaaactttgctttcttcaatgggcacttacttcttttcttatataaacacttataatatgggaaatgctaaagcaccacaaaaattggcatatccgatataatttaatat

SEQ ID NO: 96762 - DNA, 1142 bp, Cannabis sativa
ttcttctcttgtgaggacagcactaacagcgtgctctgtgactgctaggtacagaccaagctcttcattgtctatgggtttagacaacaccgccggttgggccaattgcttcttcagcttctggaatgcattttcacattcctctgtccactcaaattttttgttgcctctaagaatgttgaagacgggtatacatttttcggtagacttggacacaaatctgcttagtgcagcaaagcgtccagttaggctttctacttctttaatagttgttggaaatttcaatccaaaagggcttggatcttttctggattttcttttattcccctaacgttgactatgaagccaaggaatgttcctgagcttacgacaaaagagcatttgagggcactgagtttcatgttgtagctacaaaaggattttgaagcactcgccttggtcctccaaatgcccctaagcctttttggacttgacaagcatgtcgtccacatacacctttatgttgcggccaatgagatctgtgaacataatgttcaccagcctttgataagtggcccctgtgttttttagcccaaggggcatgactttgtagatgtataggactaggtccgtcatgaagctggtatgctcctgatcaggtggatacatctttatctgattgtaacctgcatatgcgtccataaaacttaggacttcatggccaagcgtggcatccaccaactggttaattttgggcagtgggaactagtcctttggacaagctttgttcaggttggtgaagtcgatgtaaactctccacttcgtgttgggcttcggtaccaacactggattggacactcactgagggtggaatgcttctgttattaagtcattagccatcactcgttcgacttcatctttgagtgcctaggcacactccttgtccaaaaattgcctcttttgttgaacaggccggatgcttggatcaatattgagtgcatgggttattatggaagggtccatctcgatcatatctctatgtgaccatgcgaacatgtcagggtgtgcccttagaaattttgtcaaggcggacttgatttctagggccaaacctttaccgattttcaatcttcttattgggtgagagggatcaacttccacct

SEQ ID NO: 96763 - DNA, 571 bp, Cannabis sativa
ccctaggtgcccaggttgactttcagggtgaagtttcatgtaatttcagctcccgaagcttgtattcaattgctccatgtcttcctagtacagattattgagggataatgagttggaaatgagttatcgaagtctgaacttccattctggagttttcgaagtcaatctgggtacatggctagggacccctcccaggccgacttcctatgactcaagactactcaactctgagatgttatctttcttgccatgtgtcaaatattgatgttcacgtcaacaaggctacttttagtgtaaatatttgtcctccaagtcaactttccacttgtgtgaagttgacttaataacgtgaattaagcatgtttttctcgaaattaccatatgggcatcaatttttacaatcctagacaattgtttttcttcttcaaacatgtccattgagagtaggagttcaagttcccattcactattgattagtggaatttggaaattttaagtataaaaggagaagagaggaaagatggtaatctttacttatcatttgtcttctctttttcaacttgaactttag

SEQ ID NO: 96764 - DNA, 1196 bp, Cannabis sativa
aactttataatattttattagttgccgaaaacctcggtcaataatacatatataaataaaaacaaaattataatagaacaaactctattactaatttaaagatacaactaatacatttatatatatatatatatataatgtaatagctaagtatttaaagaattataatatatatatttatagtgtaagttaagtacttaatttattaaaaaaaatacatggtattttaataaaaataaaatgtgaaataatttttttttaaaaaaagagattaacttttcaaattaaatttatatgtatagaaagtaaataaaataagatatttatttattaattgatttttttttcttttactaacttaaattattattttcttttaccaataaattagtaacatttattattgttaattatgttttttatacatttggtttaaaattatttactaatttgttaactttcatctttacattaaaaattaaacatgtctcctcttgttagaaattttaatatgaaaattattttatacatatatattataaaaaataatttaaaatttaatgtgtattttgattataagtgtgttaataaaatatttctcaatttaaataatttagagtaatttttgttttaattgtaaatgattttcgacataataaatcgtgttcaaaattttaatgttgaatataatatataattatgcgcaatgaaatttttgtttgatactaaagtttaaatttggctccccttgcaataaaatcctggctgcgcctctgtatagagctgattctatttttatttatacctgagacatctacccctggtgactttttcagtaacttttctagcacgggcaacttttccagtgactttccggtgtcagtcacttttttggagaaacttattattgttttactaatatatgatttccacattttttacaaaaatatggaataaaaaaagtcatacaaatgtaaaaaaaataaataaaaaaaatcctaaacctcatagtattatttatttatatcataaaaaagtaaatttttataattttttcatgtcatgtgtaatttctacaaatataaatgtgtagtattaactacttccaaatgttattttaataaatttaaaatggaatctaaagtggtgaaactagaaggaaattatagttgtacaaatattaaatatttatgcca

SEQ ID NO: 96765 - DNA, 1246 bp, Cannabis sativa
gtcctcatatcagactccagctcccaagtggcttcttccactttgttattcctccaaagtaccttaaacaatggtatggttatattccgaagggctttctgtttttaattcaagattttcactggttgttcatcataagaaaagtctggctgtaactccaatgcttcataactcaagaaatccattggatcagatacgtattttctcaacattgagacatgaaatacattgtgcgcaactgacaaagctgaaggcaaagctaaccagtatatagcttgtccaaccttttcaagtatttctaagggtcctataaacctaggacttagcttgcctttcttcccaaagcgtctgattcctttcattggtgatacacataggaaaacatgatctcctagctaaaatgtaatgtcccgacgtttggatccgcataacttttctgtctgctctgagaagcaagcatccgagctttaatcttgtctattgcctcatttgtcttctgggctaactcaggacccaaatatttttgttctcctatttcatcccaatgaattggggagcgacattttctgtcatagagcagctcgtagggagccattcctatggtactttgataactgttattataggagaattcaatcacagagaaatacttattccatgaatctccaaagtccatgacacaagctcataacaaatcctcaagtatttgaataattcgttcagactgcccgtccatttaaggatgaaaggctgcgctgaacttcaaagtagtatccatggccttttgtaagctcacccagtacttcgatgtgaattttggatctctatcaaaaataatagacttcgggagtccatgaagacaaataatttctttcacatacaagtccgcatactgatccactgtttatgttactttcataggcaagaaatgtgctgactttgtaagcgatccactatgacccaaactgagtcatacatccctgtggtcctgggcagtccaaacacaaaatccattacaatgtcttcccacttccattctggaagtgttcatggctgaagtaatccggccggtcgctgatgctctactttgatttgctagcaggttaagcatttagacacgcaatccaccacatctcttttcagtttgtaccaccagaaatagggcttcaaatcttgatacatattggtggtacctggatgcaatgaataaggcgtagtatgtgcttcatccagaatttctttctta

SEQ ID NO: 96766 - DNA, 943 bp, Cannabis sativa
ataggtcgatttttcattttttttctttctctattgtttaaatgttatatttttaatatattttatttatataaaaaattagaaagttaatgagagaaactattaaaatattttttaaagaataaattaatactttatagcactcaaagtagtacatttaaatcaatctttttttcataacacgagatcatgagctttcatgtggtacgagcacaacatgcaggacatgattaaatacaagtttggacctgacaccacacgaataattataaacttgtacacaatacaaaaaatataaacttaatcacaacacgacaaacatgaaggcatacacaacatgaatgcacaaatatattagcatgaaagcgcgacacaagcacaaattatatccgtaaatacctatttctatattttttttttattgaaatgtcttatatatatgtatatatatttttttgagttaaacaagttaagattcgttccttaattttttttttgaataaccttccttaatttttaattacactaaatttgatatattttttaaaaaaaattaaaaatataagataaattatcatatataagaatgaggaacataaaaaatttaaaatctcgttttatataatcgaaaccagtttttttgatgaagtttcttgataaaaaaaactagtttcatgatatgatagacctttggtgagttttgttgtgaccaatcatcgccgtaaaaaacttaaaaatttatatataaattttatttctatataatgaaaactaattttttttgataatttttaatgaaaaaatcaatttcttgattaataatattttgtgagcaatttatataaaaattaaatatgagttttgaaaattaaatttatatatacatggtaaaacaaataatataaaatagtttaaaaataataaaataaaataggggaattac

SEQ ID NO: 96767 - DNA, 1533 bp, Cannabis sativa
gaggtgtagtcaaaatcaggtcaaaactttgaataatgatttaattaaagagatttaactattataaatagaagccttaagaaatcaaagaatccttttttacactgctaattttgaattttgtagagagaaaaagaaactctatttttctctctattattcttgttcatgtgttgagaactcaacaagaacaaggttataaactttatcctaatagcccacactatttcttgcgtgtggtggatcgatttggaagatactggtgtgagtccaaattgcatattcctcatcaactggattaagggatacaacatacgaaaagtttcgagactaccctgataggcttcaagaggtatactctaaacttactgtttttattattttgatttaatgtacacacatatggagatcctgaggggctatggtacgatgataatcagataatacgaaactcttgcgacgcgtacttaatttagtaccataaaatcaacaatatggccctcttcttcaacggccgaaagcattgggtgactttagaagcaaacttagatcgttggttgttaagcatatttgactcgagtcttgaattgattccccatgatgaattgaagatatacatggaagcatgggaaaagttgttcccaacattgttgatccaatctggcctattcaagaatcataaaatgatcgtcatgccttagttaacagcatcagagagtcaggttagatatttcacctcaaaagtcatcgaccacaacatgatacgacagacaaaatcaaggtaacttaattacaagtgattttttttattgagtaacttgatttaatttttaatattttatttaactattttttattgtcatatatagcagtgattgcaagatgtatacaataaagaacatcgagcatagcatgctataacttctgtttgataacgtacacgataacaatatgaagcaacttagaaagtggttgtgtgtagatttattctaccaaaacttagcatgaacttctttttttaatatagatatgtatttatcgggataataatgaaatttggtttttttattggtttagttatgttcttagcaatttgtcctgattaatttttttttaagaagtatcggacaaaaaatacaaccaaaagaataaactatttaaaagtttttactaacctaatattggaccgatgcatggaccaatagggtccaatggtgaattataaatccttgctttttaatttttttctaaaagggtcgatactagtccgatgtatggaccgatagggtttgattgtcatatacatcgaaccctattagtctatggatcggtccaatattgggctagtgaaaactggcccgatgcttggtctgatgcatgcatgatgcttttattaattttcatcataaccctaccaagcatctgaccagcatcaaatttacatcggactaacatcaggccaaccatttttttacaggaaaaaaatgttgaaaatgtttttttttttttgatgaaaacctactcgtgccacaa

SEQ ID NO: 96768 - DNA, 663 bp, Cannabis sativa
ccatatgggaaaaattccacctaccaatccgacagccagatctctccccaataatgatccatccaagggagcacatgcaaagaagttggcctataaataccccagaaaaaaacacaaagaaggggaccttttttcggatggaaaactcattcttcatcatcccaagcaaacacattttgtaaccctactattaactccagaatattcctactaagctttctcttcttaaagaggaacacggtggaaggaagttttagtccatggtgtctctacttgtataaagattcaccggtcgatgagcctaataaaatggactcgtggactaaggatagttaacgcttgaaccacataaaaatctcttgtttgttattactctattattacttttcgaagctcaaaaaaatattaagttaccaaaaaactcgataaatattttgatactttcattgagagttgaggaaagaaacatgcacggtggttgtcggtgcaagcctgtaaaaagaagagcccatgcgaagaaagacaaaggaaggccacttgactgcttgtcaaggtctggccaatggacgaaaggatctaggccagaggtcttgtcaagactagattcgtcgccaatggctactccccctgccgtctcaatgcgtcacgaggtagatcgtagac

SEQ ID NO: 96769 - DNA, 622 bp, Cannabis sativa
taagagtatacaccttatatcataataactacatgatttaaaatcaatggccaaaaaagctatcttaccgatagagaacttatgctaagttctaccatagtcttcccctatatatatatatatatatatgatattatgatgatatgtcatatcatacattgagagaaaaaaaaaaaactagtgagactcatcattacatatgaatggaaagagaaagaaataaaatgtcaaaaaaaaaaaaaaactagagaaagggtctacttcagtgtaagaatatatatatgttttaacggtatgtttatacacggtatatctattaaataattgaccaacaatattatagcaattaattttagattttggtcggttgatgcaattaactctaaaaattaataggtgaaattttagtaaaatttgtatataatattagtaggaaaatttgaaattccatgcttaataaatccaaaaattagtattctaaactaatattatgtaacatttataaaatgggataagtttaactaaaacccaattttacccccacattacattacccccctctcctctctcttcttctcatcccatttcactccagccaaagccgaactccccttcactaccc

SEQ ID NO: 96770 - DNA, 910 bp, Cannabis sativa
tttaaagatctaattttagatgtaagtctcttatcatttttccctagagttactgttgtacatgttaaacgttctgctaacatggcagcgcacgggttagcaaagtatactttagagttggatgaagcttgtttctggttggagttatttcctccactaatttactctgttattgtaaatgacctttcttaatttataataacaagtatttttctcaaaaaaaaaaaaatctagttactttcgaaatcatagcaaagacaaggacataaatttcttcatgactttatatccttgatttatgctaaagcagagaaaatctacacagttgttatagttgtgcacatgaaaatcaatagtgtcattttttttttgccaaggactacagcatttagatatttattttaatactctagggaagtctttctttgactaaaatactaattattaaaatttataattttctaactagactaacaatattcacacctatttaaatatatatctaaaacaatgtagcagcaacttgtttaaataatagaattgcttaaagacactataatggaagattaacctataaatacaacctcatattctcatcttttcaacacacaagaacccactacaacttcaactacattcttcttcttcttctcatctcctctttaatcattttcaatcctttcataggccatcatgggtgttttcgtatacgaaaccgagttcagctctaacatctctccaactaggttgttcaaggccttgatccttgatggggacaaccttatcccaaagattgcccctcaagcaatcaaacaggttgagacccttgaaggagatggaggagctggaaccatcaagaagatcacttttggtgaaggtataatttgattagcattgtattgtatgtatg

SEQ ID NO: 96771 - DNA, 773 bp, Cannabis sativa
gaattactttctgcttctgcagacgcatactgttttatattttcttatatataattgacaattgcaaaaacacaatttttcatcttatttaagagtagttttcatctattcaatgttaatatacatggaaaacccctttaactctttacccctcataagaagacaaaataacgtagacatgtgcatatgtgtaaagggaaaatgacatttatcactcattctcaatatttaaattcacttgaatatttaaatgtttttcaatatcatttcaccaactaaaactacttacatcaatcaatgacccacactgccccaagaaactcatcacctataaaatctaccattttttctcgttcaaccaacatacagcaaagcaaactccactttttttgttattaaataaaattctaatttcacaagaaatagcataccatattctggaggatttttatcttctcctctgatattcaccattgttaaatttacggctcttttgatgtcgacccacaccgcacaactactcgtcacagtagaagctgaagaaatggccacctttcgatattctccttcgcacagctatgtcgtcgactttaatggaagatgaaatataacaaacctctagcaatcgtccacccctgaacctaaataagaagcaaggactgagatttttattttgggttttcgttttaatggtgattttggggagatatctaattttggggttttatttgtgagttttgttttgatcatggttgtggttttagaatattgta

SEQ ID NO: 96772 - DNA, 509 bp, Cannabis sativa
cctagatcaatctcagacgtcagatcaaataactccctcatctgacggctgttgtacatcacggattacaatccgtgaaagtacaataacgggacaaaatcatatccctacataattaatctctttaaaaaaacaagtcaaacaaaataaataaataaatattactgcataattattcgtaataatcaacaacaatcaagaatattaaaattttaaatgcactcaagtaccaaaatgttagtgtttacaaataaagagaactaattcatcattatccaaaataaagggtacagagtgtatattttgataaaagataaagtacaaaataagtatttatcaaatgataataaaaaaaggtaaaaaaagtaacaatgataagaaccattttagcttatcataatatattacaggcctaaatatcaaacagttattttctgttataaacagtattaggaagtttgttaggttctgttatttctgtttttctttcccttattttctggataata

SEQ ID NO: 96773 - DNA, 579 bp, Cannabis sativa
aagcactcttccatccgcctttcgatagctaaacgttccctttccaagtcctaatcccaggcccgccggtttcgagcttgcatccgacgattatcccggcgtcgctcagcacgcaggcaaagggcatggaattcagcaggcacccttgtggcagcagaaatattacgtccctcattctcaaagaaattatgcaaccactcctcatcagaatatgaagacgcatcgttgtgcctagccctgtaagccctcatcatccttccaacaatagcttcaccactgggccggtagtaacatgagaaaatcgaagggcttgggggggatcgatccccgatgtcagagtggaactcatctctgcttgaagattcaggaagaggagaaccggggggatttgacatttctaaagtaggaaagaggataataataataaaaaaaaaaacgtattcgtataaaaagagaaacttggaagctacgctaaaaagacactatgaacaaggggaaacgttggtttaaatagaacgcgaaaggtggccaaggaagggtaagaggaagacggagaggtaaatccacccacatataagg

SEQ ID NO: 96774 - DNA, 620 bp, Cannabis sativa
  modified_base (38)..(64): a, c, t, g, unknown or other
ctcggatatatagacccatggtctccatactagttgannnnnnnnnnnnnnnnnnnnnnnnnnnattgattttaattaatcaattattgttcaaaaaaaaagactttgtctagtttatgaattttcactaagttatggcttgattgtgaagaaataggcttttatggtttatttgttaattaagagactttatggagtctaattagtaaatattataaatgacaattttattagataattattttaattattaaataaataattttggcatttatagggttgaaagtacaaaaagtggtatttgtgaaaagtagatatatggttaagaaaaatggaaaaaatctaactagtgtagggcccacttcatggccggccactagagcctatttttgctctatttttatcatttattttattccaaataaatcaaccctaaccctatatgaattagtataaaaagataagaatggtctcattatccaactaatgcttcaaagggctttaaacctctttttcattctctctgacaactagtttttgagacttcttcttcatcttttcttccttctaattcgaaatcatatagtcttcttcaatatcaaattcgagccttagtgatt

SEQ ID NO: 96775 - DNA, 2361 bp, Cannabis sativa
  modified_base (1394)..(1397): a, c, t, g, unknown or other
aaatattaaattttgtatcaaattaactcaatattaaaaaatgtaaatatattattattattattattattatttacaaaaaaaatgttagtctatagcggtaggagtctaagacgaccacctcggtcctcactggtctcacttgagaccgggccgaccgaccctccttctaatcaaaacttaaacataataaaattatttttcaaagacgaagcaaaggaagtaaacaaagaccaactatattaaaatacttaaatcacatatgagaatcaccctgaccaaaaagagacctataataataataatctatgactatacctatatgaattaccaaataacgcatatataagacaaaacataaatattaatggtatcaccttgttgcccacgaacttagcttgttccaaatccatgtgcgctacgcctacattcagtgaacttaatttgggagggtcccacataagttttggactgctttattagtttgacctccaaaagcaaggagggtcccaccttgtttgggcatcaaggttatcttatcttataagtacatgattgattgtttcaactttcattgaataatattatcgaatgaacctaaatatgatgagtggtagaaaacaacgtgtgatgatggtaccagctccagcccaaggacatgtgaaacctcttatgcttttggctcacaagcttgcccaacatggctttaggatcactttcgtttacactcaactcgatctcaaccagatcacgagagccatggatgagactagaattgggtcctcagatgtgaataacatcgaattggtgtcaattccagatgggttgggtcctcaggaagagagaagtatgatcaataaaactaagtcaattgtagagtatttgcctgtggagattgaaaagctcatagcaagtattagtagtactacttccgagtccaacgacaagattagttgtgtcgtttttgatgcatttttggggattagcgtggatgttgctactaagatgggtattcaaggagtactattttctccctcttcagctactgctcttgtccacgctatgaatatccaaaatttaatttgcgatggcgtcatcgatagtaaatttggtacgcatatgatccctttttttttatttatataataatttaaagaagtaaaaattgaaaataagtaatttataagtttttttcagttaagtttcttaacaattagtttacttacacttaattttttaaatttaaaatttagtggtaaaattctctaaagacatattttaattgtttaaatatacacttttgtagtgataaatttatattgatacacttaatattattatttaaaaattatgaaaatataacaaaatttataatatttttatttttatttttnnnnttttatttaattttaaaataataatattaagtgtattaatataaatgtgctacgtgtacaatagtgcttacataaataatttatgatatcagttaaccagataatattttaaatttgttaaccctaatttaatagtttgaaaagttttaccgataaaatttgagcttggaaggttaagtgataattaacaagttaatttactaaatatgtttttagaaatattttcaaaacgcacactaggtgtactaatatttaatttttatgttaattttgcctgagttcttttttaatcgattttcctcttttgcaactaaaatttgagcacatgctaataataaaattttcaagtatatttatacatgttaacttaattatatacaggaacatccactcaaaaacaaatgattcaattattacctggtatgcctggcatagacacatcatgtttactatggaagttagatgaattagactcacaacagctactatttcaactatatctcaatattgaacaagctttgaaatcagcacaatggtgtctctgcaatactactcatgacctcgaatctgttgctctacattcatcttcaagttttctcccaataggcccattgatggaaaataaaaaccatagtactccttcaactattttaggatcacaattttgggctgaagacacatcctgtttaacctggctggatcaacatgaggctggttcagtaatatacgtagcatttggtagtatcacagtccataatgaaaaacaatttcatgagatagctcgtggactagagctcacgggtaagccattcctttgggttgttcgtttgggatatatctcaagtaataatgaacaagaaaagggatttgatccttatgaattgttgggcaagaatagtaatattggaaagatagttagttgggcacctcaagaaaaagttttgagtcacccttcaattgcttg

SEQ ID NO: 96776 - DNA, 757 bp, Cannabis sativa
ataatacggcttgtaagaatttgtactattgcaactttacacactactcataaaaaatgttatttatctgatctgtagtcgcatttttttctattttataattatgctttcttcaattgccacgtggcagttaaaaagtagactattctttcttattattttacataaaatggtatcattcaatacttatgaatttgtttatttaaaaaaatacttatggaatttgttgttcaaaaaatgaaattatacttacgaatttgcttgttcatgaaaaaaatatttttgaatttgttcacattaaccattaacatatatttttttttttttgaaagaccattaacatatttttaaaagggaatcgtaattaatgtgtggtattaattatatttataattgtttatttgcttactaaattatgtaatgggagaattagtgaaaaagattttttttcatttttataaggaatgttatttctttcctaacttattttactttaattttaattttcttaatcaaaattaaaaaaataaatatgtccttcaaaaatttataaataaaataattatatgatttaacaatgactatttaatcaaattaaagtattttgattacttttttttagttatacaaacaaaataaaatgattttaattttttttccggataatttaataaaaaatataataaaatatatttttgattattttatattttaaaccgattcatttttttcatccattctaatgctatgattacaa

SEQ ID NO: 96777 - DNA, 989 bp, Cannabis sativa
aaaaatttaataatttctttattagttttttatgcattttaaatttgatttgatttcattccattcttatttctattctcattctcattcttattcctatatttttattcctctcaaccaaatgccactgttgggaggaataaaatataggaataggaatgaagatgagaatagaaataggaatgaaatagactaaaatttaaaatgcataaaaatatttgattaaaaaattattattttcttatcatgaattagaatgatctttccttctatttaaaaatagaatagtcattctacaaaaatagtgtttaggtcattccaatactttaatatgcaaccaataaaataaaaattgtttctttccattctattctattttattatctccaaccaaacgtcacttaattgtccatgtgagggagaaaatgacttttaagacaaaagtccttaagccttggtcaagcctattgtattttattcttctctagttttcttataatcttaatgtaatacttttatttgtattttgattgtaatttttttttcttcttgcaatgagaaaatttctaacagatggcattcatccatttaacccacaggacattctgtttcgtaaaaagaattcaaatatgtcgagcaatcgaaactttattccacttggtataattttaacatttatactgccaaagtaatttttgtatatatattttttacattttattttaattttacaatttttttattttttaattataatttacactcctataaaaataacataaaaaaaataacaatagtaaaataatcaaaaataatataaaagcacaaactataattcattaaaatgtttaaaatttcatacaaccgttgtaatttttttttttttgttatctattattaatgaccaaagcggtgtatcagttatatatactaatcaagatacgtagttgttgttgaaatcgcgctcatattgaactaataagctaatt

SEQ ID NO: 96778 - DNA, 1781 bp, Cannabis sativa
taaggaccaaccccaagttgcaagtgaaaataaaatgtgctttgttgcattacacaactctatgagaatagcttcatagtacaatatctatatatactcaatttaatcatttaatcaaaagtcaatataattatgagcaataaccgtaacaaacattttctttagttaagttggatttgattttttgtcttttcttttgtttgccatttaaaaaatcaaatgtgatatcatttaaaaattacttactttcccatttttcaatttatttttatattattattaccaaattaacaagctttgtctcattgtatatatgttgttctcaatatatataatttttttgtcaatcttttcttcaaatcacaaatttatttttcatatatcttccaaacatgtagtgtttgataattgattaaatgaacatttccaaaaataagatgttgattgtagtagatcctttctccatgttttgaagttgtgtaataaagtccccacatattaatggatcgagttatatatttaattatatcaaaaacaatctgacacacacaagattataatttccattattatacattaattatattattattttcacaaacacatgtcatgggcacacatgtttcatgcatatttccattcccatatatatatatataatcactttttattttccagtacacacttaaaacaaaaacaagtagtacatatacacttacacatacatatatatacaaacattatatatcatgatgaaccagtttgcattatatatttgtatatgtgtgaatatatttttcattaaacaacaaaatgtcccaaaaagggcaaaatacgttcttattatcatacaccactacactatatattattattattagtacaacaatatataaaagacaaatgcaagaacaaataagagtgtgtatgtgtattattaattaattaattagggtctttggttgtgaattggaggctttcggtgaggttgagcatagtccatcatatctatatcttcttcattactccttttgttttccttattattagcattaacatcttcttcatcatatcccagcattgaccttagactcttacccttctcattttctccctataaatatatatatataatatgttatttcatgcatgataaatttatacatgttgtatatcatatacatgaacattatgcattgactcatttttataagccaatatatatagtatggtcccccgtgagtatttatataaaaggattcaaataatttaaataaacatgatcataaatatgaatatagatatatatattaatttatgactacataccttaatattattattattagtaaattcaacacttgaacgtttgaacaactgatcagtatgtgatgataatgattttgttgtgagatcgtttcctcctgtacatatagataatatatatttacaatcagccaattaataattgtgtaaaccaaataattccataaagaaaaaagtaacaataattgctacgtaccaataattagtcatttgattattctaaattttaaattgtatatatattatacgtacaataaagtcttttggacattataattaatcttccttctaaaaatgttttttcacgtttattatttatttgggtgatctcaaaaaacaaagaagaaccagtgggattatatatatatatatatagaatataatattatatatatattatgtaggataaataaatagttaattagtgtctcatgttgcattctttttatttttta

SEQ ID NO: 96779 - DNA, 573 bp, Cannabis sativa
ttcttttcaagaatgctaattgatggttttcttttcaacacatcaaggatcaattaatagttttcttttcaggtttaaatctttcctaacaatagtttaatcataatttttcatctatgtatttacatgccttcatgccttgcatcattatttttctttttgttatcagtttccatttaatttgtcctttttctttctctttttggattttttttgggtattgtattagtgattattaatttaactttgcatatacaccttttacaattgcaaaaaaatatgattcagacttctatatgatcttcttactaatattctcataggcaccctcataatttgtatgtatgtgtaatttacttatctcctattttacttctatcttcaaaataaatgcaatccagttatgacaatatacaagttggtcatggtagatgtcctatattggagttacagctattgacttgagtaaattttggagtaatttatttcttatattttagcattatttacttagtattttcatagagatgtttcataagtaattacccaccaatagttgattcaatttctatt

SEQ ID NO: 96780 - DNA, 590 bp, Cannabis sativa
gttattttttgttatttttatcttgaataatagtgttacaacaccactctactatatatgattttcttattagagtatgttttgtttacggcatgggattttagccttgtcttgtggatcggtggtgctaattcatttggctcatgttactttcatttagccagtatggctccctatatttatagtcagatctagaggttcctatatgtcatgggattcgatctttcattagatcatccttagtcatggttggtcgtgccattttcttatagtcttgttagaataatagagttgctattgcccaaaatttttgggattgataggtttgatttgtcattagttcatttgcggttgaaaatttagtatttttcacacttttaatttgatgtttcatagttggcagtttagttgtgcttttgttgaagatggtattagggtttcttttatccaatttaactattaattattgaatatttccattttctttaaaaaaatatatatataagtataacattcaaaaacaatgcatcattaatagaaggaaaaaaaatcaaatttctcttactaaataatctacaaatataagttga

SEQ ID NO: 96781 - DNA, 609 bp, Cannabis sativa
gtaaaataatttccaacaagtattgtttaactttgcataccattgtctagaggcttgtttcaagccatagagacttttctttaatttgtaaccacataaatatcctcgtgtaattcaccatgcatagtaattattaaattagcaattattagagaaattgcttcctctaattttcgtaatctggcatcaactcattatcctccttcacattaaagcctaaaattttatagagacaatagtcagtataaatatgcattatgtaatctcattcataaacagtaaataaaagaaacataaaattagcatagcataagcattcaaaatattattagaaaaaattcactaattatacatctatagttattgatccaaaaatatgaaatttaattaaagtaataataagaaagaaataaaagtgataataagaaagaaaaaaaaaagactctttcacaaacatattaagcaatagagaaagataatgaatagagttatgtattctcaaaaggtcctattaaaatcaacgaatatatataggtacatatcaaataaaagatttacagtgaaataaataaataaaaattaaattgatagctttttgcattttttttt

SEQ ID NO: 96782 - DNA, 622 bp, Cannabis sativa
gtaacatatttgacgtggaggaaactaaacgagcttcgtttctatggaaaaacatccttcgggggtcgagatttttggaaaaaagggatttgttggcttgtgggtgataggattcacgttcgtatttgtgaagatgcttgggttaggtctattctttttggagtggtgctaagctttaacgactttgtgatctcaagtttgtttcaggccattggaatgtttctttgattaaagctctttttgatgagggtgaagctaaagttgttctgtctatctctatttctatttatactagtcaaagactatctaatttagaattatttatctatttttcacatttttttttcgaatttttaatattattcatctaattttattgaaattttttcaaaacttgattaatttataatatattaaaagtatttttcgtaaaattgtatttaattattttttataactatatatatgtaatttatatttatgtaagtatcttttaaaaaattatatactatatatctattctatataaaatgtggctatataaccggattcttggtttatgagaaattattgggtgactctttttttaaataaaaaaataacaaattattagattttgcca

SEQ ID NO: 96783 - DNA, 619 bp, Cannabis sativa
gtctaaaatagtatttacaatgacattattggcaaaagttacgtaaccaacgaagatgcctaaccttagggtaagttgaaatgtacccttttttttcatcagaggaagattttatttattagataagtgtataatcggaatataacaaataaaagaaggtataaattaaatatatagaaaagaaaagtaaaaatgaaatggattaagaaaaaaagatatagagtgcaatttcccaaagcccatattataggcccaactccaagcccagccgctaagcaatcgcaataaaaacctagaaaacctaggtgagtacactacacaatcttataaaaccctagttacactctcatgccactctgtacaatttaacatgcttctacttttctaccatcgtcttctgcacttgcctcctaaagctgtctgccattcggtttgaattttttcctattttttttctgtatttttcgatttaagtctatcatccttaacatgtgcaagaattttttttatttcatagaagagtgtggtgatgatacaattttgtggactagagtttctgatctgggaaatgctcagaatctgattacaaacccttggctgtctgagcacccttcttatt

SEQ ID NO: 96784 - DNA, 552 bp, Cannabis sativa
gaagctctagcgcctctcctccggccaagaagtctaagagcggtgaggggtcctctttttcggaaaagagaccttctggagaggtcattgatctatctgaggagctgactgttgcaaacccctctacccccaagtctgccaagtccaaagagtctggaccaccaacggctgggtctgaactggttaggatcagtaatcttgagcgggtgcaggcccactccacctttgcccgtgcttctagaggccaaaaaaggcaagaagatgctggcccactatatgaaccggctagttcctgaggtcagtgagcaagtggctggtgctgatagtgactcatctctagatgtgttggtgggcggagtcttgaaggagctcaccagggtaagtcttttttgatacttccctttaactttccacacttagctctatatgctaagtttttcctttctgcaggccggtctgaagttggcctacacttactctcaggttaagtctgttgcttccaagagcaaggctctgtccgacaccttgtgggcagaggcagacttggccaag

SEQ ID NO: 96785 - DNA, 591 bp, Cannabis sativa
tattgttcgaaggagcaaagagaaaaagatgatggataatcataatgacggaagaaagagcactatataattttttttacgatcgtatttgagtccgtcaatattatacattttcaaggtattatttcaaggtagttggaatactaccgtaaaagtattaaaagacttaaaaaatttaaaacttcataacaaacatagtaatcattaaaattatcttttccttcctaacattaatccattctaaatagttcttacgagatataataggaacattatctataaaagttagtatataatgtaagaacattatctatttttatatcttaaaaaaaaatataaaaataaaggtaaaaattcaaataaattttataaagtgaatatatctcataagttcctctatattttataaggttgcttgaacacatcacagcttaagaaagcccaacaattaaagagcagctgggtcatatcgctactacattattatgcaattttttcatgtattctcttctctttataaccaatcgtatgtcaagtttcaacactttgatctaaatcatgtgctattgtaatcaatataaccgagttgag

SEQ ID NO: 96786 - DNA, 711 bp, Cannabis sativa
tgccaacacatcaaaaatagattttattttgctagcacaatactaaatttttgccaacataataacaaaaatcatatttttatacaatacgacggtaccaaacaagtccatatattatcaaagtttacttgtgaattattgttaaaatgaaaactaacgtcggcagaaaattaggatattttatatttcaaagagagatattaaacgtatcaattattactttttagttttatatttatctatataataagagcacccacaaatcaaaatgattccattataactttaaattataaatagtatgtgatctaaatactctagtgttattagaagaatttggtctaatacaaaaaaaaaatgtgagtattcgaataaagcaagattacctatttacagttaattatgcgaatattcacttagctgatactcagctcaaagtttaggttataaaatagacaaaaataggaatagaaaaataaaaaagataaataatagtggttcagtgtgagtttggtctgcttagtccactcttataataatttcaactttgtctatttgatttggatcacccttttatataaaaagtagattcccattaatatattacataattgatcaaattgaactatattacaataattgcacaaattaattaagataaacgtttaaaggaataaatataagaatagtttcattcgttcttgtcttaat

SEQ ID NO: 96787 - DNA, 1050 bp, Cannabis sativa
tttaaagcttgccatagaataaatatgtgttttggcgtgatgaaagagcaccaaacactcctactataatcccaaactacctgcggcaatttgctgttataaagctgatttgttctgaacttcccattagcacttgcattaataatatcagatctagaaaatttatctcgtacatgacaaattttcttccagtaccaactcatatcagtcttgagattataggaccaaatggaattatttttgagatatatatcattgatccatttcacccatagcaagtcatgactcttggataaaatggcccaaaggtatttagctatgatagcttcattccatttagtcccctctttgaatcccaaaccttcataatgtttaggcaggcaaactttctcccaggttaccacatggagcttacttctattcccattccaaccccaatggaacccactacacaacttttctatctctttagtgatgctttgaggtaggataaaaatactcatccactaatttcgaaacccaagaagaactgaatgaattagttgcgctcttcctgcaaaagaaaggtgtctagttgcctagcagagaagtctttgtttaatcttcttgattgtcacactacagtcttcagctttccatttagtcggccacaaagggactcccaggtactttaggggaaaagtaccctcagtcagatttaattctctcattatagcctgcttagtctcttctccaaccccttcaaagtacatttgagatttacctgtattaatagcaagccccgagatatctttgaactcctccagacacttctttataacctggattgattgcatattccccttacaaaataatataagatcatcagcaaaacataagtttatgatgttgagactcttacacatggtgtggaatctataatctgacttcttggctgccatcttcaacttccttgttaaaaactccattatcagaacaaagagaagaggagaaaggggatccccttgtctcaaacctttcttccctttgaaactgccttgaactcttcca

SEQ ID NO: 96788 - DNA, 892 bp, Cannabis sativa
aactgtataagtgactggcactgtgtataagaactaagctaattaagggtcgtggtaatgctaaacgacctcgtgaaagtaagccaaattaaccatgggattatgggttgttgagaaaggttttcattaggcgatgatggctcaatgaaagaccattgatgctgccgagctggcttcacatcataaataatataagctcattttaagaaataaatccacccgtttaaataataatctctagatttgaaaagtaacgtgtacttttttttttgttaagtaaagtaatgtgtacttgaaaattgaaattgagttaattctaaaagagaagaaatagaatcaactaatcgtatctctaaaatcaaattctttataagcacaaagtttgtaaacatgccccataacatggaataaactcaacatacatagtagatgatgtgatattaaagtttatttaatactttttcaagaaatagctgcacgaatcaaagtgaaaatatatccaaaagtaggctttgaatcatctgcacaaacactaaaatctgaatatgaataaccaacaacttaaagattgttgacatccttataaaaaaacataaaacaaactcttcgttctttacaaatatctcatgactttctttgttgcaaccccaatgatcatgtccaggatcagataaatatctcaaaagaacattaactatgaaagcaatatcaggtcgagtgcaaacctgaacatacatcaaaattcctactacacttcaacatgggatgttctttatactttttttcaagtcgttcttaggacatttttacttagtaaactcatctcccttttagaataggaacagaaccagcctaaccaaaattcatattgaaccttttgagaacacgatta

SEQ ID NO: 96789 - DNA, 707 bp, Cannabis sativa
agtttggtggtggtggagggttctcgcccctaccagtctgcctcgggtgcatatctatacacctgcggtcacattcccggtagtaacaataataataattatttccatatattatagtcctgcccacaccattccgatatcaacacaattcagatcatcaggcaataagaaaaattaacaaactatcttttaactactaaaccatgagttgatcaagtccttgcagctaatgtacatatcgaaccaatcttcaggatctaaaaaccttggcgctctgataccatgttgtaacgccctgtctaacagggacgccacgtgtgtgctcttaaaacatttttatatagatactatataattataacaaaagtgtgggtaattaaactttgtttgtaattaaaatccagcatgtaaaaacttctttatagcagaagacaagtaatgagaactatggggaccaccctgttttcaaaataatacaaactagtttattagtacttttacaacatgaactttgtaattccaaaagattatcaaaatgaaacatcctgttcactgggccgatacactgccgctgatatgtacactgctgctacgacctcgaactgatggctactcaacctttgctttccccttacctgcaccataaagcacccgtgagtcacagagactcatcaagaaaagtgaacaaaacagtagcttaaaatgat

SEQ ID NO: 96790 - DNA, 610 bp, Cannabis sativa
tagattgagtctcttaacgtaccatataatataatttatctatggaggattagattaatcgtgttcatctaattttatctattttattttactcacagaatatttaatttgtactgaatgagaattttatatattagatctaatttaatctgtataatataaatttagtccaattcaattaattattttaaattagttattttttaatatttaattatttaatgtttactaagaaaatatattgtttacacaactaaaaaaaattattattattttatatctttaataataaataaaaataaataaaatgacaaataacaaaatcaaagaaattaaaaattgtacgtggaaaaaatgtttatttttttaaaaattatattttatgcataattcatctatgttttaacatatatttctatcatataggtattaaatttttaaattatgtttttttatatattaaaataataattgtgtatatatattttaaaatatatataaatatgtttaatcagttatttttacaagtcaatcaacatttaatttgtaaaagtgacgaaacttccttatattttaattttaatatatttaaccccctcatttatttatt

SEQ ID NO: 96791 - DNA, 589 bp, Cannabis sativa
ttgccattttttcaccaaacttctccctattcatcttagtctttcgtcttctaattgttatagcaaacaatttttaaaattgaattataaaagattgcagatgaattagaatttcaaaatttgattacccatattatgtgtgccattgtttgctattattatagaccaccaggtgtttggtgttgtcttagtgtgtttgagtttttatcattatccctatgtttaatttttttttttttaaatgtgctttacaggtagtataatatgtgatggtagcttggagagaagactaaaacttgcagagtggcatattgaagtggtgaggcttctatcattctatcagctctgtattccttttgtacaaaatgcttttagtttgttatttatgccgtcatagatgagggatctttagaaagaaataaagatttttatttgaatattttggctgatactttccttagcttgtgatctggtatcaatccatgaaaaagaataagattgtgattgcatatattgcttttagtttgtagaggactgcttaaagccagcaagttttctcttgctggaaactatttaaggggtacaaaca

SEQ ID NO: 96792 - DNA, 800 bp, Cannabis sativa
atattatatataaatatatattttgtgggatattttaattctaattaagatgttaattactccttgttttgactattatagtattaatagttgtgtaaaagtatatatgagatctcatgggtttttgcattgttttttgatagttttgatactttttacaacttttgtgctttttatggcttttgtgccattttatggcttgtccctatttgtttatagtagttttgtagtttggtcatttggcaagagaagtgattctgctgatgatatttctatttcaacgattttttctctttcgacagataagtatttcaagtttaagtccttatattaaatatggatttgtttactattgttatttcacattatcattttcattatattgtatggtaatagagttttattttttgttattttgtaggttattttgtggagggcgcctacaattacaaagaattactgacaatcctaattttaaacttaatttgtttgatatagtttttcagtacttttatattagggtgctagtttgttgttactagccaaaggataatacctttggctagttattcttagaaattctcttaattttttagtttttagtattgctgagagttagagctatgaagtgtgtgtgttaatttctaattttatatattattttattttaaagtttgtcattctaatataagtgttcttttgttatggtgttgcaatttttcagtttcgccttgttctaaagacaactagttaataatgggaaggtgatgtttgatgatgttatagctttattgtctaaa

SEQ ID NO: 96793 - DNA, 545 bp, Cannabis sativa
atcatcatggaaccatggtagaagttttcaagaagagaaaggttgggtatgtccaacccgaaattactgagatcataggcatcaaagaagctttgagttggatcgcaactcatccctggaacaatgtagtgttagaaacggatagtttggtgtgtgtccaagcagtcaaaagtattattttcatgtcctcacagtttggtcttattattcaagatgttaggaatttacttttagctttattttttactgagttatgttttgttaaacgatctgcaaacaaattggctcattgattggcaataaactcttgtttctctacaggttgtgtgcttcagttggaggattgtttctctgaagtgcgttctattattttgaacgagtttattaattaatacaatctcttgatttattaaaaaaataaaaaataaaaaaaaagttaagaaatagatatatatatgtttattttcaccataacgaaatatcatttatacaagaataaatatttttattcatttaaagaaaagtgtttattgatatacttattt

SEQ ID NO: 96794 - DNA, 615 bp, Cannabis sativa
cccatctgaagaaagtagggaaggttatgtgtgccccaagaaggtatttcctccaaacgcttcaccacctctagtcgcagaaggaaagcctaagaggctagggtggaggcaacactctctcggaggggacggagacttaaggcagggagaggccttgacctaaaatgaatcgaaacaacatcaataacaaccaactcaaccaccaaccaaactaaccaccacaactccaaatacagccgtttcaaacttaataacaacaatagcaaccaaacgaccaacaatcaaataccccaccatcatagccaaagaagtagactcacaacaccaaagtacaaaagctaatcctttacacttcccttcctaacattccaaccttaagcttcaatttacccttgaagcttaaagccataagtgcagacatcttagaaaatgtgtaggaggttgactgctacttaaaatgatgccaagagaaagaactagcattggcctagaggaggacctccctcatcaagtctcagaagcaagctaaaattgccaatggggcttgcttaaagggtttttaacctgtgttatattgtgaggagctcaacaaacaattagtattgagggttagga

SEQ ID NO: 96795 - DNA, 993 bp, Cannabis sativa
gcttagataaggatttggtttggatagcaattcctccaagataatagtaattgtagctctgtatttattggtttttctatcgaagttactcctaaacaaaaagtctgtactacatctttattagtgtctacttttgcccaagatgatcaatcttggacacatgtgataagctagattaggttggttttctatgagtatttggtaaattatgatgatttcttgtcggaatagcctaaaataatatgctaaaatttgaccaagcacaagaaagtaatgtgctgatgctgaacatgttcccatatttctcgaatgtgttgaatatgttaccatgttaattcttaacgctacaaacaattaagtgttactattggtaccttaagatgtgaatactagttagtatttttattcaataatatttattgaattaaaatgtattaaacttaatattaaaatattacactaataacaatacaacatataaaacaaagtctatggggcgtgagtatcagctcttctctttcatggcgaaaaagaagagagtgatacggaagcctgcaatcaaattgaacctaacaaattccccttcaatccaagacaatctgattgagcaagaggatgaatcgactgaagctaacctggtggagatggctttgtgaatggaggatatcattcagacagatttgaaatctgactcggagacggagaaggacattgatgggcaggacacctgggtagatgaagtcgagaaggacgatctgctcgtgaattctcaacaaaaacattttactgaaggtaagctttcattttctgaacctaagctttcctatactgaacctataatgaaaaatgggaagaaaataactcaagttgatttggaagaggtgaaagatcaagctgctatatggaatacggctgttgtttgtatggtgtttggggttaacccaccgtttgctgtgtttgagggcttccttaaatggaaatggggcaagctag

SEQ ID NO: 96796 - DNA, 2197 bp, Cannabis sativa
tcacggtctgagagtgtgcatatctggacagatatgctaaatttagtagaaaatgtatagaaattatttgagtatcctgggggtctcctttcttatcagaagtttttgtcttccaaaactaaaaatatgcaatagcttaggcaaaaatacatggataagatctcgagtaagaaaaataagatgaagaagaaatccaaggaggagaaaaaggttactcaacgagaaatgaagtatactgtgtacagatatgcaccgaccctgcaatattaggcgtttaaggtcatccaagatgtggggaagaaatatgaccagtgcaaagggactagattccctcgaatgttaaactagagcacccctaattcggttatgaaacacgatgtgaagcaaactgatgtggttgcactgtttaagaaaaggatatgtgaatctttctctatttatcattgttgttctgatatctgttttgctatgtgttatttgtatttatgtgcgacttttgtagatgttgttcaatatttatgcgatattttttatgtttattcgatatgtgcttaagtttgtgaaactttatgagattttcttattttattgcgatttacattatattttgaacgactgcaatatgtgtgcgacttatcctaaattttgtatgccttttttattttgcaatttaaattatattttgagcaacattatacgatttatcttaaaatttgtatgcaatttttgtgcgatattggtcgacattaatgcgatttgtatttgttttgtgatggttgttcttcaaattgtgtatcctcagaattgggaggttgaaaagtctaattgtgagggtgaagtcctcacagtggatatgggcttggatgagagagaagaaacacaagttggcacacaagattctactgtatttgagacccaagcaaaatgggtgaccggctatgtttaaagtaccaaaatcattccactatcaccatcgaaagaaccaatggagcccaccacatctgccactatgccctcaacctcaactcatactgccaatgatgtcgattacctagggttggcgaagagattaaaaaaggttaaagcccaacaacttgcgattctggctgcacaaactgagatgaaggctacctttctgagtagtacagaaagagatgaagaatcctatcatggatcaaattgcgaccatgataaatttgttatagaagcaaccatcagaatcgagacagtcatcacagctggcagacgataaaggtcatgagtatgcttgtgatgaggatgatgtgtatccgaaagattaggaacccaacgtagatggggttctttctactccaatagatgccattatgattgccatcagtgatacacagtctcaggttgtgcaacaattagatgggccacctcctggagtgaaatttttcacggctaggagaaaatggaagtctgttttcttgaagaactacatggatgtgaagaaaacaacgaattaggccagttaatgtagatactttgaggccagcaggctcacacctttacacatttttccaaacgtggattacttactcgagggacaacgaccgtcctaacgatgttcacactggtagtgccaatcagagtaagttcggaagttgatggtggaaggagaatgactcgatgatgttgtaagttgtttcttaactgtttaaatttagtgttttaaacttttgagcgacatatatttatatttatgcaacgtgtttgcgagtttttgcgatatctaacctatgtatttgcgatgtggtttgtaaaccataaatacatcgcttaaactcgcaaagaaattactaaatatgcccatgtttgatgtgtgcaacgtctgtgcaatttttttgaaaattatatgcaatttacttctgataatttaatttgtttgatctttgtgcaagctatgtgcaatgtttgtgcgacttttgtgtgatttactgctgataatttattttgtatgacatttgtgcgacctatgtgcgaagtttgtgtgacgtgtttctaactttttttatttgcaatgcagtaaattgatgacatgatgcacttgtaaagaagaagacaaaagcttttccctaatgtgtacacttggaaatgtgttattctggacacatctgctccacagatatttcagatgtattggaattttcatgatgatgataggagcacattc

SEQ ID NO: 96797 - DNA, 966 bp, Cannabis sativa
tccaactcgagatcattgtgcttttcatcggccagaccttggaacatgtttttcagttcatccaactgtgcctgcacggctggatgaactttttcggcctcttggcggaccagtgtcacgtcaggatctctttgagctggatcttgaacgcgagccccaagctgagtggttggtggaacatattgtttgtctaatactctcattttgttcaaatcatctctgagatcatgagttgttcccagcctattaaatatagatgcaccaggctgtcttagtgactggttggtttggccgagcacttggccagaaccgctaatctgggtggagttattaggtataacacctcctgacgaatttccaaataaggtatggccgcctaccgcttggcccacaggtggaacctgcgattggggattggacggttgactattcagagtttggaaagtgttcctagctagatctttgcctgaaccgcccagtgggatgctagaggcgggttgctgattagtaacttagtaggctcttcgtatcagtacggtggcttgtcttattcggtcatcgatggctgcttgttgagccctcaatgtttctatctctttatccctccattcggcaaacagatgcctttgttcttcgaaagcaaggttcactgcaacacggagctcttcctgatcatgatgcagagtattagtatggccttgcatgagtccaagagcattacagaggttttggatctcggtgtcatctcttacggttgtccggacatttgttgctaaaggaaccccagtactgggagtacttagatcggctgctgaactggtatttccagtctcttgcacaccgggtgtgattctagccaaaggagacgtgacatcatgacccgcagttggtggttgggtgattggttgttcagggttagtgattggtggaacccttgcattccctggagtctgcagtgtgggatct

SEQ ID NO: 96798 - DNA, 619 bp, Cannabis sativa
  modified_base (573)..(594): a, c, t, g, unknown or other
ttttaaaaaatatgttatttaatgaaaaacatgatcattaattgtgagtagtaattgctatatctggaaaagaattgtgtatgttagttaggattttggcaagaagtgtgtaagtgtggatttggtgcgtgactcgctgggattgatgattttagggttgtttgaaagaatggaccctactaaatcaactagaacactaagcgagtctgtagagtaggatgataatccaaccaatctaccggtaccgccaacaccttcgcaaaattcttagaatactgcggccggggatgaacaatgataatcctcttgccaacttgtcagtaaatatttatagaaatgcacactatcatactctattaagaggaagagtcgcgccggattaggcaactgactcaggcagccccggtagctaatcttggattggacctgcaaccacacagtgattcaatctttgaaaggtttgtcaagctgcaacctttgactttcctgggtttggtactgatattataaaggcagagcaatggatgagtactattactagcattttgaataatcactacaagaaatgtcacnnnnnnnnnnnnnnnnnnnnnntgcgctggtaaaagtaacttttacc

SEQ ID NO: 96799 - DNA, 847 bp, Cannabis sativa
  modified_base (212)..(213): a, c, t, g, unknown or other
aggttgtagcttcacgaaccgctcaaccactgaagctctatgcggcgatacaaacccttagttacccaccattggcacaggagctagtggtaacattttctcaacaggagctgtcagtgctggttgcctcaaccaatgtactacttcttctaaacaaagtatgacacctcgcattccttgaaacatctgttgccaatcagcaggcggattannattgccaacccctgcattatccctcggattctacagaggcacaggcggtgccagtggattagtttggtctacaccaggctctagtagctcgccctgcagtctagatgattatggagggtccattttactaacagcccagtaatcaacaaccctggcgagttaagcaccaataccacacttacacacttattgcctttaaaccctaactcaactattccatttcatttaaataaacatttatcaattaacattctaagcatagcatcatatatcacataaatactctagatgctcacatactacctaaaatggaaagcagtaaataaataatcacataagcagtaaagcgtttactctcaacacttactgtaccacgagtcgagcttatctctgacgatgattgtacatattcggccggtctacaggaagtttaaaaacattggcgctctgataccaaactgtaacgccctaaaaattaagcacgctacaccaactgattaagaaaccctaatcccctaaatcgggattactagaaagataagcacaggaaattttaactttatttgaaacagaatgaaaattaaacttgtaacaactttaaactttacaaccaaaagatacatgttttgggatc

SEQ ID NO: 96800 - DNA, 668 bp, Cannabis sativa
  modified_base (443)..(446): a, c, t, g, unknown or other
tcctaatgcctttctctttgatttcttgggttttaagttaagggattatgcatgttttgtgagttttgctgttgtagttgttgttgatgtttgaattgtgtttttttaaagttaaattaaggttatatatgttgatttgtgctggttttgtagtttgagcaagctttgagttttaaaactcaagctttgctctttaatggtgatttttttatattaagaatgttatgttgttctgttacttgggtaatatctattggggtataatatgcaggtctggaaggtttggtaagccttggagttgatttggttagggtttcgaattttttggggttttttggtgtaaaccgggccttgttaaactgattaaccggatcagtgctgggttccccggactttttgtgttgtcgattcgtgttagttttagagctttggttggttaattnnnnattagtttagggtattgccatgttgactttcagtaggtatatttttagtttaaaacctaagtccctagctgtgatttagcgtgtcacttatccttgttgtgatcgatgtgatttaggaacctgtcatttgttgggaaattttccacttaggttgaccggtacacctgaatttggaaacaaggtaagattagtgtaatattatgcgtatgtatttacatgttt

SEQ ID NO: 96801 - DNA, 1281 bp, Cannabis sativa
  modified_base (550)..(550): a, c, t, g, unknown or other
atggatgactagctgtaagaatacgcaatcactcttcttttaatttgtttcaactcataaagtattccccgaagccataacacttctttaaaagctttcgtagttgccatgaattctagttctgtggtggaaagaacaaccacagactaaaactaacccttcgagcatatacagttctagtttctcaagaaaacataaaaggtggttaattttcttgtatctctattcgaggcgtagtccgcatccacgaactccaattctctttttcctttctcataggtcagaccataatcccatgtgctctttaaatatctcagtaaccatttaagggctttccaatgctccatgcccagattggacatgaacctgattaggatgcttaaaacgtgagttatgtcccgtctcatgctcaccatcacgtacattaagcatccaagaaccattgcatatgatacatccttcatttcttctctctcttcatattgttagggcattcttcatttgacagaataaactgacctcctaaaggaacggatgtactctttgcatnttccatgttgaacttctgaataatcttcttgatgtacctagacttcttcaaactaatagttcattccttccagtaccgtgagacttcgataccaagtatttttcaaactggcccaagctctttcatctcaaattctctcttaagcttggcttttatacttttgatcattgatttgtctttgctcatgatgagcatattatccacttagagcaataagaacacaactgtagattgctttagattcttaaaatataagcagtgattgtatgcggatcgtttgaactcgatctgatcatatacgtatcgaatcttttattctattaccttgaggactgttttaaaccacataaacatctattaagcttgtacactgattcaactcctttctcttccacctgaaacccaggtggttgcttcatatatatatcttcatccaagaatccatttagaaaagcagtcttgacatcaagttgttcaacttcaaactctaaatgtgctgctgaggacaacatcagccttatcgtcttgtattttaccacaggtgagaagatttcagtatatataccttccacctaagtaaaaccctttagccactaatttggctttgaacctcataggttcattctcattgattctctctttcaccttgagaatccatttgcactccataattttcttgttctccgacctcgacacaactaccaagccttgttcttccatagagaatccat

SEQ ID NO: 96802 - DNA, 549 bp, Cannabis sativa
agtgattttagagttattattttttaaattatgtgatatttgggtttaaaaaaagtgtaaaaaaatatgaaaaaaaagtaattttagataattttgttatttagagaaaatttaaattgttatgtgactacttcatatctctcatttatatataacatatagagatattgataataattattatatttatattaatgtattttctttattaattcaataaaaaaattccaaaataaatagtgtggtgccaagaaaaataatgttattattattatttaatataaatatcatttgatacataaaattaaaaaaaaaaaataggtttaagaacatattttttttatgattattatttaaaattatacaatattattgggatatatgatatatgttaataagatagccgtataagtttatatttttaaatatttacaaatataattaaaaatttaaaaaagagaaaattaaggagagatgataattaaatactaaaaaaaaagaggacattagaaagataagagaagtaaaaattaaaaaagaattaaaaaa

SEQ ID NO: 96803 - DNA, 2338 bp, Cannabis sativa
  modified_base (1282)..(1286): a, c, t, g, unknown or other
gttttgggtctagttcagtcgctatggtggtctaggtctaaggcgaaacagtggtttgtggtggtagacagttggggaattgaatataagaggaaacgattgtgcggcgaactttggattgtcgtttgtcatgtgttgatacaccaactttgctattgtaatggtggtagaactttattcattaatggtaagagattttagtcttgtttctttttggaacgttgggggaattgtcaattggctcaaaatacggtttatgttagtagcatgactatcattgcctgtggtcagctctgcggattctcatatttttattggccttataattcaagatgcttggttatgattgtttttgctatggttagttgtgactattaatctaattttttattaggagatatttagttcataatcattgataagtgtgatttgtcacatgtttatttgaatttgagatttaacattttttgcttctttgatctttggcaacttattaatcttttagttgaaggtgttattaatatttttattcatatatttttctaaactacatgaatttgtttgagctatatgatcatggacgatttaaaagattattttttttaaaaaaaaggaatagtcaatgtaagattgtgaggaggataaatggaattagtaatgtgatattttgataattagtcaatttcgtccgtcggattgggccacatttgattgaagaaaaccatttaggaaatattttatagggcccactaaatcttagttgcacactattataaattattattattattattattatttatgaaattgtgattgaaaaacaaggtaaaagaatccaaatatttgtgatccttcaaattaaagaatatattcttttcaaataaataaaaatatgaactcttgttctagaaaaaataaaaaaataaagttaattaggatttttctcatgaactttgacatgtactaaattatgcccctgaacttttaagatcgttaaaaatgctctctaaactgttgagattgttggatttaagaacttttgtctaatttcatttaattttactatttcagtgaattgtttatgtactaaaccatgctccttagactttgatatctaccaaatcatgtccctcgaactttgacatatactaaattatggcccttgaactttcatccatgttagattttttttttactaaaattgaaaaaaaaaatccttaaatcaataatctcaatagttcaggggtatttttaacaacattaaaagttcagggggcatgannnnntacatgtcaaagttcaggagacaaaaatcctaattacccaataaataataataacctccataattttattcttattgataagttaattttcttaatagctcaattgtaattatcattttgtttttcaacggttggtgaagatttgattaataaataactatcatctttttgtaaataatataatatattgaaaagaaaaatgatatacatataatatacctaggtattactaatcaaagatttgtacatgcttaagagctaagtatatgagattttatggaattttagaaggtgtccttaataataatacaacatgcatgtgttcaaatttgattgaacataggaaacaaataagtaaattaaatttatttaaaaattaattaattaattaatagatttgaggctataattgaaaaaataggcaaggccggcgcacaataagaaaaaggaccacatttatcttatacctaactatagtatcattttttcctcaatagaaactttatattattattattatcatttttcaatgtgacattattatatggttaagtgtttgaaaatttaatcaagaatatgattggaataatcaaaatggattgaaagaaaaagtatcaaaatcaatcaattcactattgaaacttaaaattgttttcatttagatactatggatttatatgtcctttaatttatttaggacatatcctcatgaaaatttcacatctaaaaaaaaaaaaaaagcagtaaccatctaaatatagcataatgaaaaagttgctccaatttttgttttagataatcatgaacaaaattttaatatttttagtaattattatatattatgattaaaaatgacatttaatcacaaaaaaattgtactgtaactaaataatttttttttttaacttttgtaggatcatcataattatttaggttatttgtattgcacaactaaataagactattttttatataaatcatacatattttgtttaaggataattacataaaatactattgtttatgaaaaaaattatatttttacttttata

SEQ ID NO: 96804 - DNA, 545 bp, Cannabis sativa
tgttatctttttcttggtatttttggtatcccaaaaaatatgtgtttaagcttaattacgtttaccacacgacacaaaaaaatataaacaagaaatacattaactcgaaaacatgatagattaaaaagcattgtaatttaataataataacaataataaatatttatttatcaattaaaataattattattcaaattataataagtataattatttgttatataattatatgttattattatttaaaaaagatataaaaataaataaaactataaaatatatatatattttagtatttaactcgacaattgtaaaaaaaaatacaaaaatatggaatattgaatttgagtccgcataagaaaacatattggtctatttaagaaaaatgagtcggcacgaataaagaacgatatgaatctgagcacaacacaagcgacactgtctatatttttttataacccgacacgatatgactcatattttaaaaaggataaatagcggcataagtacttaaaattttaagtttgtaagcggcataaacccaa

SEQ ID NO: 96805 - DNA, 585 bp, Cannabis sativa
tttttttaaacaacgtgtaaacaacagtttgtaagaaaaaaaaatctgcaaaaatataaaaaatactcataattccgtaaaaacataagttttttttgtgttttttgggatatatttgagataattcttataaaattatgagaaaattacattatatacccattttattttacttgctttcattttttgcctcaattttcatattctttaagatatacacacttttatagatgatgtctccactagaccacttaagttaatataaattatatgctagacttaagtagagagtaaaggtatattggacaatccattcaaaaaaagtggatatattttaataaaatataatataaaagtatttttaattaatggatacaaaaaaaaaagtatttttcaacttatccctaaaattattactaatggcaaaagcccatacttgcatgggctgggctgcacattaaaataaaaaataaaaataaattttaattgttatgtttttttttggcaaaaatatattttttcataaatattaaaaaataatcaatccaatccacatttttgaggattgaatttgagctattgcac

SEQ ID NO: 96806 - DNA, 631 bp, Cannabis sativa
atttctaaacatgtatcttagaaagtcaaactaaaatgattaaaaattcaataaataatttaaacaactaagatttttcaaagaaaaaatcaaagttaattatatttataaacctgtatcttaaaactaaagaaaaataattaaaaatttaatagatatataaattattttgaaaaaaagaaattaaaattaaaaaaaaatgttatgtttacttaaacaaatctaaacttttgggaaaataatagactcaaacttgttctcgtaaaaaatattttttttttaccaaaattgaatttttaatatatatttgttatatctaaatggatattttaataaaaaataaataattttttaaatcggttaattagttttattttttaatcattaattttttaagatctaaattagtttttctagatttactaaaaaatatattatatctttcttgttattattttgagacgtgaaatttgatagttgtcaaagttcagatggaaaattgctaattggcgactcttcagcattttaacgaaataataggacgaaacttaacagaaagactaaactttagtaattataaaagtttaggggattcttcacaaaccgtatatttttgaaaatagaattaata

SEQ ID NO: 96807 - DNA, 702 bp, Cannabis sativa
agagcgagctggattgtcactcgacccccgtttgtgtgccagggtcttcgttggctcggatgctgacttggccttccttttggtgaggtgtactgcaacgtggcacaacttccgtccatatgagcatgccacgtcatgaggataaaaaattgagatatcattttctccccaaatccctatgcggatgtttgtacagatagggactttaccagcaagattgatgttgttggaactgcagttagttttgctaaatataaaatggtgtgtgtgttgaagcattttgtcttgattgtttgatcttgttgcaatagaaaaataactcatttatgtatgatgagttggtgaagtaagtgagagagaaaaagggggcccacatgtacataagtgagttttggagggaaacccttttttcactttcattttttacttttactttctctgactagattttggctcttgaaaaagctcctccttctctctaagtggacgaacctctaggcttcaatctctttgggatttttgcattatttcaacaatccaagcttcccatctttgtcttcatcaaaatctaatacgggtaagctttctatttcctctctttcacttgatttgaatgattttgacatgaatgcatgacattatttctttttttgaacatgctttgattcttacgtgagattgtaatccattcggtattttgat

SEQ ID NO: 96808 - DNA, 752 bp, Cannabis sativa
ctcagataattgaacttgagagaagaaaggtatctccagtggggactattagtatcaccttcgagcttgtttattctataatttaaaatacatgctctgctgcaactcctttgaaggtaccattagtatctcatgtagctaaagttgctgctgttcttcaagggatgcttctctgtgtctccgtcttggcttccttcgtattcggattagtactgattactttcgtgtgtgccaaaatattatccgtaaggaggttaatcactctgaatatggcattgttctccaagacattcaacaagtgtggagctcctttattagtatttctgtttctcattttaatagagctataattttactacttattttttagctgaacttgttttatctcttaattctagaatttggcagatttatttatcttcttatctttaactaacggtgttcgcagagtgcggatggtgggattttttatattttttcaaattaatctgcatgtaatttttttaatttctcaaattgcattcgcactacgaaattaaaaaattgtaaaaactgtaaaaaatagtgcggtgcgattttacagtttaaattattaccaaataattatactatcacaaatataacaaaacttgagcaacacttactaaaaatactataagacttgaaataaatattaaaaaaaaaataagtttcaataatacaataattagtgaactttgggctggaccttcatatacagtagaacctctatc

SEQ ID NO: 96809 - DNA, 1164 bp, Cannabis sativa
ttatttttgttacaatatactaatttggaataccaaaaatattatataatataattatatttttaaatatttttttttaaaaaaaataatatgtagtaaatgtatttttataatttttagcatctaatttttaatatattttttaattttcttaaaaaataaacaattacggacttggtttctaaatttaaagttattttttatcttaaccctattattatatgtaattgtagtcatcggctctatactaatggaagttacattacagccaaattgctcttttgaacgcataatttggctcaaaactaaagtagtaggctaatgagaatgaattaaccatgtttaattatataatcatgtaatgttgacaagatgacgaaaaactttattgatttttattgagccaccaccacccattcccttccccatgccactttccaagaaaaaaaaataaaaaattgtagaacgaaattgaatggcataaaagccaaaagtgatggatgacaaataacaagaattttgtgcaaggaatttggtcataatattcctcccttagaggatctcaaagtcaattcctccttatattataatgtatttttttgcccacataagactcaatcaatcaactagccacatttttttttcaattttataatttattgttatattatattaaatattttttaaaaaaaataatacatattcatacaatactagggttaggagatatatgaggatagggtccacatctaatagatgtctctatacaataataattttttgatattgaaagctaagttaagagtccatgtacgtaccctcagattcatgcatggtttttaaaagcaatatatatttatataaaaatctacaacaagaacaatgatatcaattgacccattctctatctaattatttcgtttcttcttcaatatcttcgtgagacataccatcaccatcaccatgctttgccctgtaatttgaagctcaaaatttatttattttgatttattttattacataaatatatatatgtgtgtgtttgtgtatatgacaaagagtttgatcatctagatctttcgatttaatatttgatgtctttaacaccaaaatatttaataaccaagctacactgatgtctgtgcatatttttttttttttttt

SEQ ID NO: 96810 - DNA, 1345 bp, Cannabis sativa
ttttttgtgttattagttttctgttttgtttaaaactgttttcttacaacttggtctgttatgtgaagtactattggttctgaaagctttttctttctttctctttctttctagaatagttcgggatggagggagaagtttgatttaggagccaaaatataagtattttttagggggctaatttttttttttttaaatgtaggaattaaaattttagacctgaaaataattaatcacattttctattttgttaaataacaaatcaaagtttgtattttctattctaaaatagtataaaataaaatctgagctcaattttcgtcattttttttatcataaccaacgaaacgagtttttagtacgaacagatgccaaaaaaaaaaatctaatcagtttggtcataggcacctccaggcgagattattgtaaaattttattttgatgcaaattaagttcaagatactattttgtactattttaaaaattacgtcttttctcatttaacaaaatagaaagtctgatcagtaagttttacaaaacacggagttcagaataaaatacattttaagaaatgaaaatacggctactatgttttgtgcaattatctattgggatattatattttagagtttttggcgactaaagcctcttaactataattccatttgcacttagccctctatactcaaattttggcggtaaaaccttccaaactataaaattgttagcaaatttaaggtgttatctatttacatagttaactgccaacataaattattgatgtgtacacatttatacatgtgatacatttatattggtacacctattattatttaaaagagttttttgcggctaaaccctttcaattatcatttcacttgtacttaaccctccaaactcaaattttagtggtaaaactctcaaaactaaagaaccattattaaatttaaggtgtcatctatttttcacaattaactgccaacttggattgcttacgtgtaaactcttgtacatgtgacacgtttatattgatacacgtaatattattatttgaaaattataatattttttattttttaaatattttatttttatttttataatttatttaattttaaaataaatttcgaaataatttttaaataataatattatatgtaccaatataaacgtgtcacgtatacaagagtatacacataagcagtccatggtggtaattaaccggatgacaccttaaataaaagataagtaataaaaagacttaagattaaagatgagtgagtatgaaaatgattttcaaataagattgtagagatattaaaatccacaaaatgcaagttcaata

SEQ ID NO: 96811 - DNA, 769 bp, Cannabis sativa
  modified_base (514)..(531): a, c, t, g, unknown or other
gttaaatatttaagtatttataaattataaattttttttattagaaatagtgactatttttctcaaaaaaatgtttatgccatgttgtttgtgtattttttttctgcggcttttataaaaatattagattttaaataaaagtttataatatacgaaatttttttacaaaaatgttattttttttataaaacaaattgtaaaattacaaaatagaacaataaaaaataatagtggaataactaaaaaataacaatggaacagcagtgaaaacttaatacagtacacaatataaaaaacacagcatttttgaaaaaaattcgctccacaattaaaaaaaaaagttaaaaattttagtatatagtgtaaaaactacttttcttgtcatcatagtctgtatatttagggtaaatctatagtatactctcttaaatgggtgttttggtaaacctcccatctatttcactatttagaataattttttaatctaattttttttttcataatcgtatacgtnnnnnnnnnnnnnnnnnnttgtaaatttttagaaaatttcaagtagtttacaatgcagaaaataaaatttacatattttattacacgtgcgactgttttttcttatacatatgacaagtaattgtttatacattatttcgaaaactgtaaactattcggaattttacaaaaatttccaagtggtgttaaataataaaaaaaactaggctaaaagtttttttagatgccgaaacaataaaaaatctactaaaacgac

SEQ ID NO: 96812 - DNA, 739 bp, Cannabis sativa
gtttgacttgattgttgtacatttttcatccttttaatctgttgagtaatcctggtcgccatattttcctattgattgttcaatatcccagccaaccactcatctcgtggttgtcttttgttgatgaaccttggtgagttttgggggaggcgaacaccgaattgtccaggacttgcttcaacttctgtacgacggatcagcctagtcttcacgccagcccatcctcttcgagtgacgaactttctaactcgagctttgaagattgggaggtgagtagtgatcgttcttctaccccaaaacccgtagtgcagcaccattattactctgagcagatcgctggagaggggtacaaccgcttcatttgggaagtgaaaaaaggttggaggcgctatcttccgtccaactggacatacatctttcgcccaggtgttgttgatactcttcctgttggtcgtctaagttagggtaactttggcatcccaattgatgtccctactgttacggttgcacgccatacacatcagtatccgtctaggaggaggatgatggcccgcacaaagccgacaatgtggaaggtcaacgcatctgatcctcatgtggcctagctggccacattgccaagtcccgaacaagatctccctaccatggaggagggagatcatgagggggacattgaagtccaagagattgaggagcaggacgacgtccgtcctgccagcccttccgaggctgaggagga

SEQ ID NO: 96813 - DNA, 628 bp, Cannabis sativa
tccaaatcattccaccacacacaaagaatagtgtggactattaggataaagtgtataatgttcttgttgagttctaaatacatgagcaagaacagttgagaaaaaaatctttctttctttatctctctaattttgaaaatgaatgtcaaaagagttaagtctaatttctcaaatcaggcttctagtaatagtattaaatcacatttaattgtttaaataaatatatatctataaccgaattcgattactgatatttattagggaatctctcaattacttgagggaatatctcaattacttccatagggacatggtaggcgcctaccttgtctaaattaagataacgttggtgtcttttgtcttaacaatttttatcttgacaaattttgtcttaacaactttcatcttttccctatttaattaatttgaaaaattatatatttatacaaacataaatagttattatattgccgattcaaaatagatttttttgaacatcattatactactctttatcccttcccttgatagtatttcaaggtggcgattcggggactatggaactataattttaagttccaataaacaagattatttattgagtctcatcaaccaaataatctttgtt

SEQ ID NO: 96814 - DNA, 508 bp, Cannabis sativa
accaagtgatcaggttcccaaccaagtggggagtgaaagaaatatggggagcccaaaaagctgctcgtgattgttatcaaaactcactaaaataaaaatcggcaacattatagcaactacagtagtctagttttacctttgcaccggatgaacctagtatggaagacctagatgacgtgtgcataatcaaagaattcccagactataaagtctagattggaacaaagcttacacctgaggtttgagctaggctgatcgaattcttaatcaaacgccatcactgctttgcgtggtccaatgaggacatggcaggtatttgacacatagatgtgtaaataagtggtgaaaagctaaaatataactcatttacaaaaagtgtgctccaatagtgtgccaaaaagtgatgtaaatttgacacatagaaaattttgtgccaaatttagcacaataattattatgatgtaaaatttactctacaataaatgcactactttttcatttacattta

SEQ ID NO: 96815 - DNA, 529 bp, Cannabis sativa
ttttttctttgcctttatcttggttggaaacggctcgttagagcatccccaatggagtattaaaaaagtggtatattactagattttagcacacttagaaaaattatacttcaatagtactctaaaaagtgtactaaatttagcacaagatatagcattgtacaaatttagctgacaataaatactacttttttatttactataatgctactaattattatgatttatagacttttaacaaactttatttaccatattaccaataattgtatattctcaataaaatatgaaataatcatcaatataattaattattttttccttattttatattttgtacattagaacacaattgtgtcaaatttaacacaaacttatttttttgtgtcaaatttaacacaaattttagatctaatgatatatattaataagggccaagattcaacaattaagtaaataaatgtccattttttaaaaaaactaacaaaatatccattcagttaaaaatttgatgataaaattacaatta

SEQ ID NO: 96816 - DNA, 887 bp, Cannabis sativa
aaatagtatacactggcacgtatttgtcatgcttcttttgtttctttctatcatttgacggttccttaattctatcctttctctttggaacagaagcccccaagttatcgattctcgtggaagcaatttttgttgaagcattgttgggtttgcttcacgagcttgttttcaacaaattcatttcctttcgggcttcttccttccagacaaacacctgagccctttcattgaactcagtgatgcttctcaccggacgtccttgtaagtcatcccacaactcgccccctgcggttaatggatcagtagggatccccacctaaagggctgtaagttgcctgctgtcatccaaatttctaaccctagcagaagccgtgctaaaacgacttaattatgccttaagtgtttcgccaggctactgctttatattggttggcgaggctgcttcaggttgcttatccctagcagcctgaaattgcttcttgaaatccctagacagctgctcccaggaagttattgaatgatgagtaaacttgttaaacaagctactcgctgccccaacaagcaagatggggagcaaaatacagcttcaattattcgtcacattactcgctcacattattgtgttaaaattattcaaatgggagaccagatctgtggttccgtcataagacgagacatatccagatagtttccctaattcccccacttgatatctcttgaacttgtcctccagcttatttacccgcaattggattcgatcctcttactttggaccaagttattggcgagggtcaggtttcttccgattcaagtgctctggcagatctggttgggagtaattgctagcaaatcttttcttacttatagatcgcgtcttactcattgac

SEQ ID NO: 96817 - DNA, 581 bp, Cannabis sativa
ttcgagatatagccgcggccacactgatctagccacggcccactgatcttaccgcggccaaaattgcattaatctgaaaaatagcgttttccttggctccgctcgtcttttactgtacttttgcatcttgaggcctctgttattcctaagaacctgaaaagcatagaaaacaagcgtaattccatcctaaaacagtgaaaagtggtcataaaatttatctgaaatatgggctaaaaatagcctaacaagcccctactttcgacaaaggcgtgttgttggtattatccaaccactaatagccaatctgactgaagtagaattacccaatccaattctgctttggagcagacttcaactcaaaatagtatccaatctcatacggagtaggctgaggtcaacctagctctgcatagagaacaaacatcattgaaatgtacttgatacctttcagggtgatttgtgttgaacacatctcaaagtaagcagctatgtctccaaaatatgggtgcaaagacagcactacccctgctaaatatggtgctatgaccacgccagtcaattgagggccagcgatgcgctcg

SEQ ID NO: 96818 - DNA, 691 bp, Cannabis sativa
caattgctaaattttggttgggttttacggaaaggaacagggagatctattagtgtaaatgtgagggattttgtaagaggaaggaaggggggttttgggtccaaaaacttggagctttttaatcaggccatgttggcaaaataggtatggtagctactgcggaatgagaattctttagtggctcaagtgttgaggcattcctatttttgtaatggatatattttgaatgccaaggtgggttcttttcctttggtggtttggaggagtctgttatgggggagggagattattttggagggttatcagttgcgtattgggttggaaaatcgagttcgtattgtggaggatcgatggctgccaagaccttcaaattcttattttttggttgggcctatcttattgccaaacattagagtggggatttaaggttgccttctggggaatgggatgttgagttcttaaaagctaattttcataaagatgatgtctctcttattcttagtttggtgcctaatgcgttagattctaaagatcttattttatggcactataataagaatggagagtatatagtaaagagtgggtatcaagtggctataaagaagaagaaaatagaggaggggtcgaatatggacaatgtcaaacaatggtggacgtggaggtgagcttttggtttgaaggagctaccaaa

SEQ ID NO: 96819 - DNA, 528 bp, Cannabis sativa
gagggcatggtcaacaccaagaacaaggagattaataaacctgctgctgacatctctaggctagaggcatactctactctggaggagtaataaagcactgaagcttagtaaagaagaattgaagcttgcccttgatggctagcaggccattaggaatgagtatgttggctagtcatcagagatcatctatgagattaagctacacaatcctagggttgatctttcctacatgggagcatctttccttgagagcacactggctcaagggaaacagttatatgagaaaaggatggagacagaccagaccaccgcttagctagaaggatcatcattggggcagtttgataaggccatggccgatacacctactgaggaggttgatggccagggcattgaccaggtggccgaccagcctatagaggccatggccggcccacatttggacatctggacactgtaacttctaactcgactccacctaaacctccacctaattctagaattataattatccttactttagtttaa

SEQ ID NO: 96820 - DNA, 808 bp, Cannabis sativa
ggtaaaatatttccaacagtaactccattgagcagcatcaaaggttgaatcttgttatgaaggaattgttgtaaaaagaagtgataaagtggttggattatggtattgtgtacccaattttagatagttcctggttcagctcagctcaatgtgtacctaagaaaggcagagtcacagttgtggctaatgagaataaggaatggattcctactagaactattactggttggaacgtttccattgattatcaaagttgaacaatgctactcaaaaggtcatttcccgctgccatttattgataaaacgcttgatcatttagcgggaaaatagttttattactttcttgatagttattcaagttacaaccagatttctatagttctggaggaccaagaaaagataacttttacttgtccatatggcatcttttcctttagaaggataccatttggtttgtgcaatgctctcactacttccaacaatgtatgatggcaatgttctctgatatggcagaaaaaattctcaaaattttcatggatgactgtctttggagagtcatttaatgattgtttggataacttggagaaagtcttgaaaaggtgtgagtaaacaaacttggttttgaattgggagaaatgccatttttatggtaaaggaaggcattgttttgggccacaaaatctctcacaagggtattgaggtggacaaggctaagttagaagtcattgaaaagctaccgcctcataccacggttaagggtattagaagttttttggtgcatccggggttctatagaagattcatcaag

SEQ ID NO: 96821 - DNA, 622 bp, Cannabis sativa
cggatcaggccattggctagtagcttgtccacctctttttccagggcctctgcctttattggatcaaggggaagccgcttctactggactggcggcatgttcggattaatgttcaagacatgggtaatcacatgcgggcttatgccggtcatatctccttggcaccacgaaaaaacattcgtggctgccctcagtgctttaacaattttatctttctcctcctgttctaggatctttcccagtcggaggatcttggtggggtcgaggtcgcatacttgcacttcctcgacgtcttccataggttctacaatcttttcggatcccacacggggacccaactcatcttcttctgcgaatcctggctcaatattttcacggaccattaacaccggcaaatgggccgcgacattataacactgcctggcctctccctgattaccccacactgcccccaccccggcttcctgggtagggaaattcagacacaagtgccggatggacgtaattgcgcaaaaatccactaagcccggtcggccaaggattgcgttgtatgcagttgggcagtaccacaaaggtgcagtacttgaaagtactctgaggtgtgtcctggcacaaggtgact

SEQ ID NO: 96822 - DNA, 504 bp, Cannabis sativa
ggagcgtgtcgtttagcattggattcggttgctttgatgaagcactgttttgtcttagttgagagtgattcgaagaaaattatcaaagcgttgaaaataatctacgctttttggaacattgataattatattaatatttgtaattaaccctttaaatattttttatgctgtaatttctcgtttgtttccagatgttgtaattttgtgacccataatgtgactaagtagatttttgctcagaatatttcgggtatggtagagcactcctgtatacctgaccttatcttttgtaatgaccaggaggtctaactctttctattttataaacgctttattataaaaaaaaaataataaataaatttaaaattgaggtttttatatagaaatacatagaaactaacagagcgacttaaatcacaattaaaatctatttagcaattcacatcaaaattatttgagaaactagtagaacaacccaagccgtaaattaaaaaaaaaaaatta

SEQ ID NO: 96823 - DNA, 616 bp, Cannabis sativa
  modified_base (26)..(26): a, c, t, g, unknown or other
agttggtgaaggattatgattgtganatcctttatcaccctggtaaagccaacgtggttgctgatgccttgagtagaaagggtgaaagtcaaataaatatcgtgaaataaatctcccagcagctagcaaatgagatgacccgagctaagattgagctggttgtggggctgttagctaatattaccatgcaatctactcttttagagcgaatcaaagaagcacaaatgcaagatccagagtaggtaacaactgatagggtttgggctgggaaggttggttacttttcagtggatgaaaggggaatgttacgatttacgaatcgtgtttgtgtgcctatggagatggtattaaaagagagattatggatgaatctcatacgactccttactcaattcatctagggtcaacgaagatgtatcaggatctaaaggccatgttctggtggctaggcatgaagaataacattgctgagtatgttgttaaatgtcttacctgtcagcacgtaaaggctgaacatcatatgcctgcagacttactgcagccattaaacataccagagtggaaatgggaagatatagctatggacttcgtggtaggttttcctagaaccacggga

SEQ ID NO: 96824 - DNA, 957 bp, Cannabis sativa
atctcaagaaattctgtaagtaccatagagatattggtcacactactttggagtgttgggttttccaggatgagattgaagagctgaccaggaggggaaaattcagcaaatacaaaagaaacgtggaaagtcatccccgagcggatgacaaagaggaaaaccaaaacgtgagtggctcgagaacgcctcgcaatatattgaccatcacaggcagaccccatatcgcaggtgactccagaaagtcgcaggagcgatatgcaaaggaagccaaggagaagccactcaccaacgtgaacaatctcagtgagcaaccagagaaattattcaagagagaatgcgacgacatcatgttcatggagagtgatgcgagatgggtccatcacccgcattctgacgcactggtcattgtcgccaatattggcggagacaacgtccaccgtatagtcgtgacaacggaagttcattgaatctcttgaacttccaagccttgaagcaaatggggttgcatgagaaggatctgcgacctcttacgtcaagtatatacggttttactggcgatgtcattgcgttgaaaggaatgattaagctctcaattaccttaggaaccgcccccgtagtagccaagtcaatggttgacttcgcggtaatcgaccaatattcggcgtacaatgccgtgattggtcgaccaatcttgaaagagatgaagatcgtgacgtcgatctatcatctcacaatgaagttccctactcccgctgtagtaggctctgtgcgaggaatccagtcagactcgcgagaatgctacaatgcagcagtcaagctcgcagagaagaagtcagtaaatggcatctatctgttagaggcactgcctcctcgccaggaggtccttaggattgaagaagtgccgcacaaagatggaccagatttggatccgaggatcctcgattatgccgcaaccgc

SEQ ID NO: 96825 - DNA, 638 bp, Cannabis sativa
gttctggattggtcggttagttttcaaattgcaccaatctagaccgaaaaccgaattttggatttttatatagaaaaaaccgaccaaaccgatcgatcctcagccttagttacagtggtttttggggagaagagaaatggtggttatggtgggactgggagtaaggaagagagaccagaaaaaataatatgtaattgttttaatttttaattttaatatttatttttatttttttattttaaaatttataattattttaaataaattttataatatttaaataattaaattgtaaatttatgtggaccaataaaattgtgccacgtgtacattatgtacacgtggataatccaatatggcatttaacttttaacagataaaattagatggaagtgctaaactgttaacgagtattgggtattatgccgccaaaatttaaattttaaagattaaataaaagtattaaagattttgccgcaattaacccaaaaagaatcacaattcttcattcacaaaccaatcaacccaatggtactttccactacaaaatagtttagacattcaattcaagtattacaaatttaattatatagacactttcactccttaagaaaacataagtgctatgaaattataaa

SEQ ID NO: 96826 - DNA, 592 bp, Cannabis sativa
aaaaaaaaaaaaaaaaaacaagttgtctatgagtagcactcattagggacactcctagaaaattaaaaacaacctctaacaatgatctaaagacataagaataagtatctctcgttgaaaattattgagaatcatggggtgtcatctcaaaactaattggcaatgagtggagtagctcatgttcttatatatggctcaattctttactatttattctatgtgggacaatgtccacaataaaaattagcaatcatagttgctaaacaaattgatttaacctactgataggttcatatataattacatcatcaatgtcaaacatgttcttgaaaacttatttttcttcctctaaaagctccacatgaaaaaagtatttccacttagaggagagcaagaatggcgagtgatcaaaaaatggagaaaagttggctttaagaaaagtatttataagtaaatgatagtaggagaaaaaagaattacagctctgaatgttaaataaattattaagataccttttttatttcttggaaatgaagagatatccagccaaaactccaccaagaaatccgcatccatatcctataacaactgg

SEQ ID NO: 96827 - DNA, 824 bp, Cannabis sativa
gctattaagagaataatggtatgtctcacgagtacatcctatgcagttcttcttaatgggaaaccactcaagaaatgccttccctcacgcaatttacggcaaggtgatcccatctcaccttttttattcctgtgtttcgatgtgctttcacgattactacaaagggctgaagaaaaaggagatatcaaggggatttctattgcccgttgtactactcctatctcacatctcatgttcgctgatgatactatgatatttgcttatgcaagtaagaaggcggttgtttatttgcgtgagtgtatcaagaagtatgagatgtggtccagacagctctgcagtaagaataaatcaagcattttgttctcaaattgctgcccaaatggtaggaaaaagaaattgaggatgagcttcagacaaagataacagaagtggggggtttctacttgggaaatcctatgttgctgtccaaaaatagaagcaacgaattctcctttgtcattgataaattgaagtcaaaactagaaggatggagattgaggaccttgtcttactcaggtagattggtggccatttactcggttgccctggccttgcccgtttattctatgtccactttcttactcacagtaattgtgtgtaggcagatggatgctcttgttaggagattttggtggactggtgggtaggatagatatcattttcttgcttccaaaatttgggagactttatgccaactgaagcaaagaggtgttgtgggattcaaaaaatttaaagataatatcagagctttagtggctaaactggtgtgggaaatggccagcaat

SEQ ID NO: 96828 - DNA, 590 bp, Cannabis sativa
aatgacgttaaaactgacaaaaaaaactggtttttgtaatagtgtgttctacttatatttataaatagaaatgtcttcatagacttttcagggtataagccctaacattatcccactaagtttacttttgagattttaataagatcttttgtcttcacaaacaaaaagataaagaggtttcataattaagcaaaaaatgtatagttgatttgatatatttattttaaaattatgtgaaacccgttattaaaatatactaaccataatatattatatttttggggtgtttgccactatatatagtgtaaaatttatgttaaattttgttcaaaaaaaaaatcagttaatattataattaacccttattttgacaattgtgcttcaatgctatatgtgtaaaattcacttaggaagtcaacaaaagctttaaatttttattgaaagcatatgaaaactctattttttcttaagaactctattaaatataataattatattaaatatataaataaaatataaaacgttatcaattacaataaggagtggcacaagaataaataaaaatgctaaattttgtgaatttgatataa

SEQ ID NO: 96829 - DNA, 669 bp, Cannabis sativa
ccatacccccttacgctcttcgagttttcctttgatgatgtgctttattattttattgactgcttcggtttgtccattgctttgcgggtaagcaactacagaaaatgctcttttaattcccaagtcgtcgcataattgtcgcatctccttacaatagaattgctttcagttatctgagatgagcttgtaagggatgccgaatcgacaaattatggagttgtagacaaactcgcgtaacgtagtcgttgtaatggttgcgagtgccttggcttcagcccattttgtaaaatagtctactgcgactacagcatacttgactccgccttttcctttaggtagttcaccgattaagtcaatccaccacacttcgaaaggccaaagacttgtgatagaatgcaagttgcttggaggttgatggacatatgtggctattcgctgacatttgtcgcatttctttcccaaagtgaaagcatcttgtcgcaaggtatgccagtaatacccttgtcgcatgatttttagagcaagggaatcacctcttgtatgattgccacaaatacccccatggtacctcttgtagtatatagtcgcagtcttctccgtcgatacacttgagtaacggctaactaaaacttctgcgatataaccttccgtcatatataacatatcggg

SEQ ID NO: 96830 - DNA, 764 bp, Cannabis sativa
ataaagtttgcatggacattgggaggtgtttctttgagaatgctttgccttttcactaggataagagtccttcttttttcagtatgtgtcactcaattggagattaagggaggggattgaaaactcctagtatgtatgagcttaggacatggatattgaaggaggagatgaatactacaaatattatagttgaggatattaagcagtcatggccactaacaggagtttcaataatgtctgatggctggtcagacattagaaatcgagacataatcaatattttagtcaatattcccaagggcattgtgtttcttaaaagtattgatggttcttcatttagtaaggatgcaccgaggttatttaaaatgttagatgacgtcattgaagaaattagaaagcatctagttgttcaagtagtcactgataatgctagtgcctacaaagcggtgggcacagttcaaaagtgataaaaaatagtagtatttaatttaaaaattatatattttatctataaaatatttaaattaaattataatattgataatagtacatatattatatatattttttataatataattaatttgtagtaaaataattaagtattattgttaatgacttttgttaagaattataaagttctatctcaaaactaattgataatgaatggagtagtcatattcttatgtatgactcaatactctaccatttattgacaatatttacaatagctttcacaatggcttgagaggtaggtggtataa

SEQ ID NO: 96831 - DNA, 582 bp, Cannabis sativa
gtgagtaaataagggtacaatagaatcattttcgggtgaaaatgatttttctgttgatgcaagccagtaaccgattcggaactttgcaggtgccattatatagtagaactgttacacaagaaaaaacaatatagttaatgctttaaaaaaaaatatcaaatatcacataacaaatataaggtcaaagaagttgtagccctaaaaaataatattacatatttaacatatttctttttatttagatcattaaagatatatgtatattaatatagcatgtctaaacatatcaaatatttagctagctaggcttacctataaaatgatatataagcctttttcttcttttctagtggtttgtttgttcacttgaatatcctatgctatttatagagtttttcttatcactcgtcatgtgcatggattacttattcttcacctaacattatatattgtcgagatgcatgaagtatctaactctttgaaacttatctaatattgcatcagtaatttactcactttttattatttaattaaaccccaaaccaatttttttgtccaatttttcatatgctttttatttta

SEQ ID NO: 96832 - DNA, 548 bp, Cannabis sativa
ttccgccgtagtcacacaatccatgatgtttttaaaacttctttatataattttaatataattgttgtgagtgctctaaatatgtactgtgtgtgtgattttagaggtcagaaaaagtgtatactaacttaatattaagtataatgcacaataagtttagttttattttagctggtttttttattattattatttgataaagaagatcatttttttatgaaaaaatatttaatttaatatttatttaaaaaacacattaatatttaaaatttattgttagttataatttgaatgtaaacgtaatattttaaattttataatactttccatttaattttttagaaatattattcacttttcttttttttttaaaaaaaaaaataataataaaaagatataattttagtaattccaaaaaataagagtgttacatggtaatttttaaaaaacataaatattttttttattttattatttataaaagaaaataatataatagagaaatatttttgtaataggtacaatgaatacaaaaaataataatagaa

SEQ ID NO: 96833 - DNA, 638 bp, Cannabis sativa
gacccacacccacacacacaaacatcacgcatggctcgcatgtgagccctcaaccagtgcacacacacggacacggacacagacacacacacacgcatggctcacatacgagcccccgaattgcacacgcacgcagacacacacacgagcacaactcacagggttggcctgggatccgcttgaacgtatcccaaggcctgctagtaccgttggtgactttaagaaatgcacatcgagtgagtaggtgaatcgaatgcgccctcattaatccttgggtcacgaggcgactaatcccaagggttagcagcgctaattttcgaggttaacagcataatttgaattacaattagagaaaaaaaaatctagactcaatttgcttctacatttgatatttcatgccaagcactcaataaggaatattcatgaatggttcaatttacttaagttactgtcattacttattttcttgaaaaaggtcacccattcaacattatctaaagttaaaaagatatcatgtcaatcccatcacccgatcactgacctatgagaggctagagtcataagacataaatttaaaagtcattcctcaccccaaaggacaaagcaaaagaaagttataaagaggaatggaaatttac

SEQ ID NO: 96834 - DNA, 883 bp, Cannabis sativa
  modified_base (852)..(857): a, c, t, g, unknown or other
aactaggtctctgagccaaaaagccatatctaccaaaaagaaagtaacaaattcagaacacaagttacaaatattcaatacaagaaaaaaggaaaaaataaatggtacaatcaactattaattaccatcatcctcagaagaggagtcatctaaactatcattagctattgccttgcctttgcctctaaatgtaggcgaggggcgagtaggtcttacagaactctggtctcctctactataccgaccctacccattgttgccggcctggcaatgtgaggatcaaaaggtggtgctctacggtaagattgcttggttctggccatatgtattagtatcaacctcgagatcactcaaaagttgctagagaatagactggatgctagttcgcaaaggcaagactgactggacctatgataatgcagttgtcacctccctagaccgatctcaaaatcacctacatagaagagacaaggggaggtgagaaacttggaaaagtgacaaggtacaaagaaaactctagctaatcgtacccaagggtacttaccagacaaattacatcgtaccaggctgggtataagagaagtaatgtctccagtataacaacttagaggaatggtgagtcttaagttgtgcgttcgaccataatagactcaccattaagtctcatacagagtttctaagaaaactacgtgtgagactaaggttgtacatgcctacaaggcctaaacgaaacccttattgaggttaaaaaagaacaaaaacttagtcgcccgcttggaacctaggccttggccgaccagggttcccaagtagagagagggtcgaccaggattctgttgggttttatgcccnnnnnnaaactcatttcaatataatcagaatt

SEQ ID NO: 96835 - DNA, 1637 bp, Cannabis sativa
agatcaagaagtctctagtgaatcttgtaagttgtgagccactgggggacaggtcttgattcatgaggccaatagctaggaatgcatccttgaatagtagttttgctgaactaccattctctatcaggttgcgggctactattttgtttgtagttggcacttcaatgactagaggatcattatgcgagaagtgcactggtctggcatcctctttagtgaaggtaatgggttaatccatgagcctaggccttccgcaaggtaattgagtcactttccatacttttcatgattatccaactcttctacatatcactttccatgcagtcctctagatatcatcgctactctcctgttaggtcaagggggatttagaggcattcctggttgtactgagttttatgctggcaagggaatttcgcactaggagcttaaggtatacctccttgaggtatttgacccccagcgtgtctttcttgcatgtgtggtaactagtctcgtactcagtcgtggaggtgtgccaattgtatcaaatttttgatttcatctttcaagcatttgcactcgttaatattgttcttgatttcattgtgatattcacacttcttatttgggtccctcttagaatggtcctggaatataggtggaggctttcggtaagacacattctgatgtgcgactaaacacactcgctcttgggtgtccctgaggtcgttgtattatgcatactacgggtcgtacctggatgatttattgcctttattatttttagtctaggtatttccctttgcaagtcttttactctgtgcagtgtggtgagttggtacagtgctcatggctagagacgctatgggagttgggtgtagaacaaaggctcttggtgctacactttctgccgaaggagctctgtatttggaataggctggcatgcgactgtgttttgcgagtaagccaagtggacttggaattgcacacttgaagtaggcaccactctgggtggtgttgaagatccagtaggtactcctcacgtgtactgtactccgtaagtgttattcgaccttccggtcaggtaatatccaccaaatactgtgatctgtgcttcttccatattgatgtatttttgggctcacttttggaaatcttgcaggttggctgcaccttcttgttgaagctcgttccaaaaaagggttcccactccaatgcctgcttgtagcaatcctagctgttgctcgtcattaactttcttggttttagatgcttcttctttgaatctctttataaaggttttcatagtttctgtaggcaacttcttgatttaagtcagagcagtgacttcgtggtttatttttttgaaagccacaaattgcctccggaagttagtttgtagcttactccagcagctcacggaacctaattccaactttttgaaccattcttctgcggatcctcccaaggtcaatgggaagcacaaacactttgcatcatcatcactcactcttaacacggtcataagtctattgaattgtgacaaatggtcactggggtccgtgtcccccatgtattgttgttggtattatgtttatccaggatcttaaatctatttgcaagtatgttgatttaacaacctaatattgaacttc

SEQ ID NO: 96836 - DNA, 617 bp, Cannabis sativa
tccttccaacacacataaactgacaagaaatccatagctacccaagactcctcaaacacctacgcgtttcagtgaaaaacaacaaaaccagcttccgccttcaccacagaagcatccactttgcagcactagaaattctccttcggttgatgaatacgtctctgcaagcataagtctagcacctcctcttgttcaaaccagtagcggtcgcaagaaaattccttgtatctcacgatatagtctgtaaatcccaatccagattacaagatttatccttgaagatcatgtcatttctccatttctagattgtgtcacaaacacaaccagtaaaaatgattagctcaaaatcctccaagttgatccaccacttgccaaagtctataagatttgtccaattcatgcagtcaattcgaagctcccaataacttctaaaccaaatcccacgagtgaaagaacaatgacaaaatagataaaaagtatattcaatttccatattgcagaagcaacacacttgttgttcactaattctgacaccaagtcgtgccttagtaggtaggatatcagataagattttccaacatagtaaattcaagtgagggtaaaggctcagcttccat

SEQ ID NO: 96837 - DNA, 897 bp, Cannabis sativa
ctcggttggaatgtgtttctaatgcagaggaagcttgtaaattttgtgttcattgatttatctttctagctttaattcatctagattcacacttaaaatcaattactttgcttttagaataactagaactttcaaaagaggactaacgcacttagaacaatgtcgagcttggagactattgttgttatcttttgaaattgggaatttatctgtaactttttgaagacttttgtcgtgcactcttaatgggtattacccatgaatgggtagtattggaaaaatttgagtttttataattaatttttttatttcattaaaaaaatttctcaattttatattatatgggctgagattattcaattgggtgaaaaaaaaaattaagaaaaaaggtttttagcaaaaaaataaataaaaaaatgttgatatgacttaagtattttgtatataaatatatttttgatataatgtaaaaagagaaattttttaatattttttcaattaagtagctaaattaagcataaaaattaaaaaatttcttttattagtcgttattggatcaaaatctaatgttataatatttttaaaattaatttttatagttaaatttatttagttttcatcaataggtaatactcattgagaagtgttccatatatatatataggatctttatatagtagtgataacaaataattactatttgtagtaatttatttataacctttagattttaatctaatggttgatactatgaacaaaaatataaatataataaattatttatgtttttaaaaaatacaaaataaattgataacttgttggtgacttgttgtatgaatatgatttttatgaaaatacctatttgatttcaacaatttattcattgctttttttttt

SEQ ID NO: 96838 - DNA, 634 bp, Cannabis sativa
gaggcaggtgaaggaacaagaggcccgtcagaacatgtctaaggcacagaggatgtgacaaaatatagcaaaaaatcatcatccttcccctgacaagtagaagtaagtgaagatgaaaaataagatgtattttccacaaagtaacatcaatagaaataagatatttgttaagattgggacaataaaacacataccttttttaaagacgagaataatcaagatatacacactataatgacttaagatttaatttggtgacatgtggacgaatatcttaagcaaaacaaacactcccacatacccgagggccaactagaaacaacgacttactaggaaaaagaattttaaatgaaatctcaccattaaagcactaaggatggcatgcgattgataagaaagcatgttgtggaaactgcatcgacccaaaaaggtttaggaactttcatttgaaacaagagggcacgtacaatttcaaaaagatgtttgtttttatattctgctacaccattttggaatgtagtatcaacgcaagaagtttcatgaaacatgccattagagatcatataagattgaaattgagcagatgtgtattccttagcattatcactttgcaaagtatgaacagacacttaaa

SEQ ID NO: 96839 - DNA, 589 bp, Cannabis sativa
  modified_base (219)..(219): a, c, t, g, unknown or other
gttttaacttgcagaaaatgagcaaactttgtgaatcgatctaccacaacccagatagaatcgaacaatcatgtggttctaggtaaccaaaccacaaagtctatcatgatgtcctcccacttccattcaggtagggttaaaggctgcaacaaccctgctggtctctgatgctcaaccttgatatgctgacaagttaggcatctcgatacgaattctacnaaattcttcttcataccgctccaccaaaagtaaggtttaagatcctgatacatcttggtggtgctcggatgtaagcaatatggggtagtatgagcctcttcaaagatttcatttctgagttccatactatttgggacacaaaccctatctttaaacaatagcatcccattgtctgacactgaaaaatctatggtttgaccagctaaaacctcttctctgattcttactaactctggatcagtcattggagcaaccttaattctttctaatagatcagattgcagcgccaagttgtgaagcttgcctaccacaaactcaatgctagatctgaccatgtcctctgctaagtggggtgagatctgaatcatgc

SEQ ID NO: 96840 - DNA, 531 bp, Cannabis sativa
  modified_base (446)..(447): a, c, t, g, unknown or other
  modified_base (484)..(491): a, c, t, g, unknown or other
tacccttacaaaatcttgaagcaagaactctacccaccattgacatcttccccataacattagttggagagaatcaatattttcccactcatcctcttttgtttcaaccaataagtcctttgttcggttgacaatgtcatcaaccacattgtcattctcaccttcaaccatcaaaacactcgagctttatttctcacactaactcgccacacagggtgaagaacaccaacgaacactacaaaaaattgctacttttagtgataattttttagtcacaatataattttttgtgattaaatatgacttttagtcacaacaaaaacttacttgtgactaaaatttagtatttagaaataagttgtcactaatttagttttagtcgcaacaagtattgtgactaaaaatacatgtagtcagaaaaatagtcacaacaaattataattttnntgactaatacctttagtcacgaaccttttagtcacannnnnnnnatgataatttataattagtcataatttttttacttttagt

SEQ ID NO: 96841 - DNA, 1322 bp, Cannabis sativa
atgtatatatgttatttggccctaagggtatttgagtaattttgggtatatatgctattcttaattaaagcaatttctagtaaatgaaatggaaatttttagtttattttcacacccccataactgaccctctccctctccctctccctatactcctcattctttcacttgataattggtgtgggagtggtttgatttaagcttggtgtgtgtggaattttgtgcttgatctttggaagagtttaaggtagtgtttctaccatttctatattgagtttattgttgtactttatagtaaaatatatgtgaatcatggtttatgttcttgaaaatgcatgcttgtgagatgtagattgattatggtgtttgtggccatagttgtgttgtaagttatggatattgtgtatgctttggattatgaatttgagaatttttagttgctgaatttgagttaattggttgaaaaagcatgctgagttttgatttattttagtgactttcttgtgtagcttctttaggtgagaatatgtgaattcttgctcatagtttggagcttagtttggatgttgctaaatctgaacttagagggttatgttattggattttaatgcatgaatttgtgttttaactctctgtgttgttgagttaaaattatggagtatgattttgagttttgattatagtttgggttgaattgagtgtgaattgggcttgatttttcgaagctgaaattgggtttttctgggtttggaacctaggggtcgcggcccagctccatgggcgccgcggcccgcctctggtttgtggcctgagttttaaacccaggtgtcgcggccccatgtgggggtgccgcgacctgcccccttgtttctgggcagattcgaacgcgatattcgaatattcatagctttgtgatacggacttcgtttcgggagttctatatatcattggaaagctcgtttcgagctctatgtgattatctgtgatttgaatgccaattttatattatgtgaaagtagaattagggattaaccctatacttgtaaatcttggaatttgtgactaggattaccggtacttggtcaggagtacctggggatttggaatctccacgttttgcaggacatcaagtaagacagttgttagcacgcagagttatgcgcggtggcgcttatattgaaaatgatatatgtgagtaattaaaaactggaattagggttattactctaacataagcggtttcatggcctagggttattaccctagagaattattattatgtaattgttatgccatgagattacaatatatgaacagattca

SEQ ID NO: 96842 - DNA, 683 bp, Cannabis sativa
  modified_base (127)..(131): a, c, t, g, unknown or other
attaaagaacatatgcttacaaaactcaagctatgtattaaatttaaaaaatattcgtataaattattctcatttttttatttttttctaacttcttattgttaacatattattatatataatatannnnnatataatatatatatattataattttgtagagacaatttaatacaataacttgattagtatatatattatgacgttaaaagtttgataagataaattttttcttctttattaattgttaaaactttattaggctaatcttttactttttattttaatatttaataatgatgatagtatacagtatggtttttgcgattttaaggtcttgcggtgcagttgcagtttagaaattataaaaattgcatatgtaggttttggtttgaaaaaataccctaaatccgcaccacttgcactgcgaacacccttaattatcaaaagttttgttgtaattaaaagtaagactttttgtaatgtatactgtttttatttaggtgcctcaaaatgagagaaggtttacatttttttcctttcaattcactgttttctctctaggcaagctaactttccagtctccctctcaaagttttctaccattggactgtatatatttatttatatatatagatagatagattgttgcaatgatcatataatcatataccaaaatattt

SEQ ID NO: 96843 - DNA, 666 bp, Cannabis sativa
  modified_base (26)..(48): a, c, t, g, unknown or other
tcgttgtagaaagttcatatttaggnnnnnnnnnnnnnnnnnnnnnnntagatctaagatcctggtaatataagttccaacagttatagcttaacctactgttgtcaatgaatcgtcggctatgggacacgggagcagtgcattctccacatccacttcttcgataaatacccgacgataatctttgtgtaggtattcatccatgtaaatggaaaactttccatctttcaaatatttctccttgacaatgtggcccgaagcaacctttagtaccatccaactaggctccaacaaataatgcatccatcacggtaaggtttgtaaatccaaaactaataagcaacaattcaatttgtaagttgaccatatttataattttacattagatcaattcgtaaaataacattaagattacctcttctgaactaccaccagtaggtgaaggtgctgttgttagagcaatttgctctctaaaacgtggtggtgatggagtagagacattagcagcacccgacgactatgctatgggatctggtagaaagtagacattggccggacccaatggttgtgctacctgatcggaggcaaggtcaacatgggattgttcatttgatgctcattgaacaccagaaccagatgcaacgctgctatgttgggaactaataa

SEQ ID NO: 96844 - DNA, 743 bp, Cannabis sativa
aactattaattaataactaattaaagattaaaaaattattgatgaatgtttatacatttttcctatttttttaactaattaaaaaaactcttccactccccatatttcattaatttccaccaaatatcttttaggtttctattttgtaactcataattatcccaatatttaaagatgaagaagattatgcatttctcctaaaaagactcccaaattttataagtctacttcactaaagtattttcgtatgtttcattttctacaagaagtcaatgtgcaagacaaaaactatgatttctctatataaacaagacaacgaaggtcttttacaggtatttttatgggaaatttacaccacacaactaaaacaattttatatttacatttttagtttgtcactttttttttcttttttacgtattccaatgtttttttttttcatttttacggtgtcaggagagtggttgacgatcgtggcccccacttgctactagttggggggggatgtgcctcttggcgcgtttggagcttattttgtcattttttttctaaaaaacaaataatgcttaaaaattaaaaatgatattaaataacaattataaacttaaaacataaaaagaaacgtataaatgttgctattgtcagttgaaagtgacaagagaatcacttaaaaaataggaatttttacataaaatgtcatttttttctgtttttaaacatttatacggttccatagtttcatt

SEQ ID NO: 96845 - DNA, 716 bp, Cannabis sativa
  modified_base (321)..(321): a, c, t, g, unknown or other
attatttgaacataattgaaatttgttctatgaaaaattgaacctaatatattcgaataaaagtacagaaagtaaaattgcataaattaaaatgacacacgatattttctacgtggtatcagtaatcattagggtgttacactatttcacggggccacgcccaaatataagattcattagtcaaatttcaacaagtacaaagtcataatgacttaaacgaaacatagactccttctaatgattttttcgcaagcatgatgtaatcctatttgctgaatgaatctccttaagacacaaaggtttgaactcccttcaaattanttgatgaatgcttgcttcctcctggtgcaaaacttatagaaattttctccccaagatagcggtgctattgcttcctcccgatacaagacttgtagaaatcttctttcaaagatagcgatgcttgcttcccaatgcaagacttgtagaaatcttctcttgaagataatgatgcttgtttcctttcaatgaaatactttgatgaaccttctcccgaaggctgttctttacattcatcactttgaaatttactttacataaaagtaatcacaaaaacacacaaaattcaccaaggaatatcacaacaactatatcatttacaaaagaaacgctattttctaaaaatataagaaattaagaagtagaatcttttgctaatagtttaggtgatatttata

SEQ ID NO: 96846 - DNA, 594 bp, Cannabis sativa
gatcctttatcacacctaaaatatattgtgatgcagatggacctgtagaattaagaggtgatgtacggtgcataatttttcctgccacactcgcagaggccgtccgacaatggtatttcaaactacctctaagaaggtttaacttatagaatgtcttctcatcataattccatgcacagtttttctcctctcgtcaacttccctcgcaccttgaagatctggccgaagtaaagcaaatgccaggagaacctctcaaagcttatattagcaggtttatgacagatgctacaaaggtgaaggggctaactaaagaagggagactggttgcaatactggggggcattgaacctcttggagagttgtggaaggacataaagaggctaactgtgggatcaatggctgaatttctagattgggcaaatgggttcataaactcgaagaagctgttcaccgtgtggatactgtcgggcaaaagaaaaatcaactacatgccacttcgacagggatgtccgtccagaattcacaatatccgagcagttcaaattcgaataggaagaggtctaacaatgaaaataagaaaggtaatggaaagaa

SEQ ID NO: 96847 - DNA, 614 bp, Cannabis sativa
  modified_base (461)..(464): a, c, t, g, unknown or other
tttagaccttaaaatcttgttttctgggtttttctaacccagtggccgcgaccagatttatggtcgccgtggccataaaacctagaagagagccatctttttcccgattttgttttagccataacttttgactctgttttggacgttctttatatcgttggaaagctcgttctgagatctttttgattatctgtattttgaatgctaactttatattttgtgaaagtaaaattaggaattaaccctatttgtgtaatcccaggttgtgtgactaggattactggcacctgattaggagcacccaggggtttggaatctctgttattgcgtgacaacaagtaagacagtagtttgcacgtagagtatgcgcggaagtacttatgttgaatatgatatatgtgagtaattgtaaccgggataagggttattaccctaatatgagcggttaatagcctagggtnnnnaccctagtgatataagttgagtaaatgctatgccatgctaaatatattattataatgagatttaagggttatgcgttcaaggcataatcgagttggactcggtaaccataaccgagatgaaccattctttctaaggccttattgtattta

SEQ ID NO: 96848 - DNA, 553 bp, Cannabis sativa
  modified_base (30)..(33): a, c, t, g, unknown or other
aactgtgtaattacctccaattacatccannnncaattcccaggtggctttccaaattacctccaattacatccaattccaattcccaggtagctttccaaacgcgcccttattatttttatagctgaacaagttaaattgggaaagacacaacaagggggcttaaccaatgagggatggcaaggggtagaaaaagaaatgagtttattgtatggagataaattagataagactaaaatgaaaaataggatgagaactttgaaaaaaacttatgctaatgaagagaatgctatttaatagtggctttgggtgggatgaagaaaatcgaaaagtcactgctgaggatgacgtatgggagcaatatcttatggtgagtaattatttttcttgtttaatgataaaggagaataggtacatgttactaattattactattatttttgtgataggctcatccaaaagatgctcaatataggattaagaagttacctgactataatactttggctttaatttttagagatgttgttgctgatggtagtaatggttgtga

SEQ ID NO: 96849 - DNA, 702 bp, Cannabis sativa
tttggggggagaaataaggttagagacattacttttgaggaggaatttaattcaaacttagtttctactatcattttagactatgttcaggcttccacacctgtcattgattaagaaatgaatctggaacctcaacaagataatgttgaagaactcccaaatcaagatgaggttattgttccagaagaacaaattcaatacccttaagaacaagagccattgtagaggtccaaaagagagagaagaaatgctatttcagatgattattttgtatttcctcaaaaacatgaggatgaaattggaatgatgaaagatgacccaatcaacttacatcagaccataaaaagttctaactctcaaaagtggaatgatgtcatgaataaagagaataagtctatgcaagacaataaggtttgggaagttgtctcattaccagaaggtgtaaaaccaattggttgtaaatagatatttaaaaccaagagggatggatatggtaatgtggtgagatttgaggcacgtcttgtagcaaaaggctatactcagaaataaggcattgatgatacaaaggctttctctctggtgtcattgaaagactttcttaggataatattggcacttgttgctcactttgaccttaagttacatcaaatggatgttaaaatattatttttcaatggaaacattgatgagacaatttatatg

SEQ ID NO: 96850 - DNA, 599 bp, Cannabis sativa
gtgactatgccaattctgatgacttttccaaagtttgttgtcggtgccggaaaagttgttggagtagctgctatcgtcagaaaattcgtcagaggtggtattgtcaacggaaaaatcaccaagaaagtggtttcttcatcgagaaaccggttttttcatcaagaaattggtttcttgaagaagaaatcagtttcttggtattttttcagtgatttttttggcaacaataccaattccgataaattttctggcgctggcaacaacttcgacgactttcccggcaccaaccgctactccggcgactttttcggcactgtcagcaaactctggtgacttttccggtatcagtgacaaataaacattcctaaacaaataaaaacattaaatatgagagtggggcttctctctatccgcactccatcagccaaaatggcttcaaccactttccacgtggcgttctctcgtctcatcacgtgtccacatgcaaccaatgagagggtgacatgtagtagatccgaattaagttattttgattgcaaaaatatccacatgcaatttgtaataagtttaattgcgcattagtccttttacccttctat

SEQ ID NO: 96851 - DNA, 502 bp, Cannabis sativa
ccagattcagacttaaatcttaactcgaacccagatcccgaacttgaacgtgcgggtctgggttcgagtccgggatttggatccaaatttgggattcgggatccgagtctttgtcggggtttggagtaggggtctggttccggggtcgaaatctgactccgggtccaaggtccgggtatgtgagcaaaaatataaaatataatatgttaaaaaaaaatatatttttgaaaatagaaaacaacattttggtgttttctttttctaattttttaaaattcaatttttgaaaaaatatttttaaaaaatttggccaaatgacctctattaatttttaaaaatttaaaataatttttaagatatgaaatcaaacaacccctgaatttcctattagcaaacaaaaaggagaaagcaaagagaaaactagttaaactaaaataaaaaggacagcctatatccatcaaaaggtgggacacatcaccgccactcacaaatctctttatgc

SEQ ID NO: 96852 - DNA, 798 bp, Cannabis sativa
aaaattataatattctattttttttaaacatttataatattctattaattctaaaaaaataataaaaattattaattttttttaaatataagattaattaaaaaaatattaattttacttaaaaaaaattaaattattcctaaaaaatattattaaactttattttatttataaacacgttgttaagcaaaaattttacatttagattattaaaaatgaatgcaaaatataattttacctacgctaaatttatagcataagaatttattaattttagttcaatccatccaagatataagagtaatctcttaattacaatccttttatttaaaggaaacaccattcgatttcaattacgatgatattaaataattggggtaatttgggaaaaatttgaggtgaatttggaattgcagctgaactcagtcaatttaattaaccgagctgcgtacataccttctttgtgaaggatcaagcctcttgtagtttagaatatggtatttttgaatttgaatataagaattcccgtagatgatcactctcaggaattctttgctgtttgaaaatctagaaaaattcttaggtggatggccttttatagaattttgagatttgtattttataccattttacggtatcagagattgcacttagtcttagcaactaagttgcctatgtatccttttataggaatcaagtcaaacgtagttccaaatgtttttttttttttttttttgtgtgtgtgtgaaaaattaatccactttaccatttttgttggggctatttacaaaaatatgg

SEQ ID NO: 96853 - DNA, 541 bp, Cannabis sativa
ttacaatttttttttttctaaaaatgttcttatttttttttctatgtttttcttatcaattatatttttaaaaaaattaatttatttttcatgtagaaatttttatttacaatttttttttttgtaaaaaaaatgattttatttttctttgaagagactctgaaaaccagagttcttgagctgagagaaaggtgagatggaaaatagaaagaagtgtaaaacagatagaatgaaaagtgaagctcaatcaatcgattggccttgttgatctctttatttatataggtagattgatacaagaagttagttacaatgatatccaaattagctgtacaacaacaacagtaaaaagataactaacttactaacagaaaaaattagttagttatgaacagtattaactaactaaccgactaaccacctacatctccaataccccccctcaaatgacactgggtaagaccaagtgttaatttctctcgaaagaacaaaaaaggagatgttgccagaggctttatgaagagatcaacgatttgatttt

SEQ ID NO: 96854 - DNA, 2517 bp, Cannabis sativa
tgtgtcgtaagtcccaagccatagtctgactcgttgtaaggagtccttgatttcggccacccatcaccccgatggtctctggcggaccccgacgaatctccagacggttggtcggcgtggttgagccaaatcgattgaaatccctataaatttttgtttttgtttgagtctaggaaaaaaataattacattcaatgtgtatggtcaaagtgtgttttgccatgattattttttttgtcaaaaactgatgacagttaccagagacagttatgtgattggtttctgtttgtttgtgcaggattgaacgatatttgctcgccaatggtaatacttcttgatgattgtgcattgcacgtaatttctacctaatatatatataagagaaatataaaatcgtaataccactctaaaattactttaatttttcttccttaattttttatcttttaatgtttaattatatttatatatcaatcgaaaatatatccttctattttatctattttttaatcatattaatctatataaaataaataaattttttaattataattgccaaataaataatagcttcttaaatcacattgaccaattttttttgtcaaggaaaaaaatcaaataaataaataaaaaaatcaaatataacaaactatagacacactttagtgttagagagtcccatattaagtatgtgtgaaaataaattatcatatataaaataaataggttacttaattttgagatgaaatctcattcaccttattttaaattctaacataatattagaacaaaaagagccacttgtgataaggataatgatgtcacattgctaatgtgtagaaatataatagaatatataagatgaatggactactcttcccattgccaatcaattttgaagttgaacctcattcatcttatcctaaatcctaacacttaatctagtaactatttctaaaataactattattttttaaataatataaataacaatatttatttatcaaatattgatttagggttattttctgtgacttctcattctctactctctcttctcaagtttctaatttctcaattgtctcttttgtaagtggtttgcatcgggaaagctttaatttacatgtaattatcacagagacattgcatcgtaccccgcagttctcaaggtacctacattatgcagtaaatctcattaattttattaaggttatgattatataatagtattcaaagttttcattcatgtcatcatatatatatatatgtagatgtatattcattcaatttaaagagatgactcaaaaagatatattttttttttccaaaaaacattactatttaaggtcacaatttaggtttttaatttcaacttaagtaataataaatatatatataaaaaaatattattctttaaatttttgatcggactatccaaataagtcatttattcatatatcttttttaatttgatcattttgtatagattttataagtttactttggtgcctttcattcaatagaggattttaactacttataacaatataacacacaatttttgaacatgctcttcaagaatattataaacataatacatatacaacattaataataaataaaattatttacaagtaaatgacaacattgaaaaatcatttttttttttgtaatgtgtcagaaaattgacaaaatattcatgtaattatcaatagttagcttcacgaaagaaaaaaaaaagtgaaatagctaaatttgctaactttaaattagaccatcattagcaagattgctattgtagcactaattatcataaaaaaaatatattttattttattttaaatctatttattttgctattgtttgttgtatcttttaaaaataataaaaatctctatttctatcaaaaatgttagtcaaccagattttttttttaaaaaatttgttgcctttcttttttcccaaaatacgtggacgcggataagagtgacacgtgggtatgaaagaaccatcactcacgaaaatcaactaagttttaaacaaaaaaggaatacctcagggaaggtgcttcccggaggagagcataagacacatctctgccctccgggaggctaaggccatgagaaggcatgtccgggaggtaaagagattacttgaacaatcatttcacatttaatgccgcatggggggagacgtattggaacttctataaaagacgtgacagatggcgtaaacccctcttttacggtgattacacaacaatcaatgagtctagtgactgatactttatgaagaatcacatcagtcaagaggggataaaagattatatccacctaactcctaagatacctacggtgtaggtcatgtattacctattttgtatctcctaggaatatgtgcccctataaggctaacacagaaagacaagtgatccattcctagggatctgccaagaaaaatactataaataccccacaaacagattgaaaagggatcgatcgattttattgaaggaatc

SEQ ID NO: 96855 - DNA, 721 bp, Cannabis sativa
agcgagactctgcctctaatacttatgttaaaattaatattaatcactattaacgatagatattagtagcgagtttatcactaattttttttttaatatctaacaattttattatttcatggcattaaaataaatttaaattaataaaaataatattattagcgacgagatctattaatgctttactgctagctaatagtattataattaattatttatatattattaatactattattagtaacagagttcgttgttaatgttttgttgctaataaaatttaaatcaaaataagcactaattttttcgctaataatatatatttttttaaattttgcacgttattagtagcgaactatgttgtccgtcgctaataattccactgtgccttattgctgtagtggctaaaacctacaaatctttatattatatattctaagttatgccaagttgtatatgattaatttgttctttattttaaataaatcaaaattatgaatataaagtaacttggtgattggattagatcaaaactacaaatttagttaggtataaattctaatatataacacttttatccgaccacttgcatctcaattctcaacatttgaatattttaatttatttattttttcctccaaaagaatataaaatagaggataactattagatataagcaggcccggccctgggcataggcgagctaggcctgtgcctaggg

SEQ ID NO: 96856 - DNA, 607 bp, Cannabis sativa
aatatgaattcagccattttttttattttgaatgagaaaaaataacatattagaattctaaattttgatttttggatgataatcacgtgtacataagtatataaaactataaataaaaaataaagaggaaaaattatcacaaataattaattaactagaagcatttttcataaattgtaatcacttaccaccaaaaaaaagtttatatatagataaaaactaaataaagatgtaatttgttttaaaaaaaatatataatgatcttgaaaaaaaaaaaagtaatataataaaaattaaataaagatgtaattttttaaaaaatatataaggatattttgaaaagaaaaaaaaaactaacgtttatgtaatttaattagattaaatataatatttgtaaacttaataaaaaattaataaaatgggagaattaaggagataatagatatatgtatttgaaacaattttagagtatcacatcaccgcatcatacttctccatatctattctatataaaatgtggctatataatagaatcgtaattccgaaaataaatttaggatgaataataatttttttaattactattacaaagtataataataatttt

SEQ ID NO: 96857 - DNA, 564 bp, Cannabis sativa
ctacgtgatatgtaatcaaacctcgtgattttaggggatgatcgttgtaaacagattacaatcaactttttaattaattgctcactaggtaattataaatagtgacaaacaagatcaaaaaatggacgaaaaaactcatacatgagaggccttgaaaaacaattagaaattttaataagattgactggttgactatgcagaattttaacggcaaaaccacgtaaaaaaccctgtgttcatacttttacttgtatagattttattttttttttttgtgtgaaatcattattgtgaggttcaaatttggttaacgaaaatctgcgttaacaattgacaatgtttttcacttattgttttttatttaatttttattaaaattatgagtaaaaaatttaaataaccgctctcaaagtacaatttattttctagtaattttatgagttgtaaataaaactgccttctgttataaaataatataacataatatagaatagatgagaggaaataagaagatgaagagagaaagagaaagtgaatgagaatttctgagttttttattccaat

SEQ ID NO: 96858 - DNA, 550 bp, Cannabis sativa
agttcacaactatttaactgggcctggcctgggtgcgtgaacattgggcttcaaaatgcacccgatagaatttagcgattatttcacaaatatataaaaataacaaaaaaattaccgaagtacggttgttaattttttgatgttacttgttgttaatttttttattattttttgttgttgttttgatgttattttcatgttacttctatgtaagttttttgttatttttatagaacaccgtaaaaatataaaaaaatctttaaacataaaaacgtaaattttttacaaaaaaataatgttttatgtaattatcccttaatgtaagtagaatttatgggttttttttttaagttttttacttaaatataagatagatttaattttgcctatttttatgacatttgttgttttttgaaagataacacaaagatagaaagagagagaaacaaaacctcataactatgcttagaaaacttaaacaatcattcaatgaggagctctttatttatatgcttcaatttttcagcatgagagagaacaattttgttaa

SEQ ID NO: 96859 - DNA, 558 bp, Cannabis sativa
cttggtcttcgacatttggttgacaggggctgtgtgaatctgattttttttttttgttgtttaggtttattttgttataagtttacactgtgatactttgaatatgatttgggtttatttcattctaaatgaatactgtatcaataagctaatttgggtttcttttatttgtgtctttgtatttttttattaaaaaatgatatgagtttgtattaaggctcatataatttgtaattttagtttaaaattgtgtttataaattgtattacattttgttaataatttcaataaatataaatattttgtattttgtattttgttattttattttttagttttattattttaggtgaaattaattgtagtaatgcacttatttaaaattattattattatatttaattataattaatatttataatatataaaatctaaattaaaagaattaaatatatatttttttagaaatatctaatatagtggcactcttggtgtgttactatatcactaaaaatattaataaaaaagaaaaaaaaaagaaaaataggatatagtgac

SEQ ID NO: 96860 - DNA, 531 bp, Cannabis sativa
tgaggcattgttggtgctagggctagcagtagttggacacacacacaaggttgtggggctcccagtaaaaaaatactacattaaaaaaattaaatatttttcttttcatttgaaaattatagcacaaaaaattgaaaaaacccccacaaaaataaataaattaaataaagtaaacctaaaaaaaaattaataacaattaagcccccacataataaaaattttgcgtccgtcactggttattttacggttattttttagtttttctacaattgtttttaattgttctgttttgttgttttacggttgttttaggttgttttataaaaatacagtatttttgtaaaaaaattcgtgtggcaataaaactataaacttttacctaaaatttagtatttttgtgaaaagtccaatattcagtatttttgggtttggatcggccagttgtaattgaattaaaagactttttgcatacccctagccacttgtataaatgaataatttttttttaaaatttgaaggggtatgaatttt

SEQ ID NO: 96861 - DNA, 597 bp, Cannabis sativa
  modified_base (73)..(76): a, c, t, g, unknown or other
agaatttatacattaaacaataatcatgaaacaaatcatgtgaaccatgaaacataaaatgttatttctgatnnnnattaattagtaaatttgattataaggaaatgggttttacttaaggcacaaaacccaacataaagaccatcttgctattcattagctgtgttgagttgagagtgtgtattgttgtaaagggtttgaaatttgtataactcatgtccctcgagtgagccatttcataagagcaagactctatttctgttcatgaattttgtccctataatgtaccaactctgagctccatcttcaatcaataaaggcaatgcctcaagacagttctacccaaagaatagatccacgcttcctgcttgtgatcgaaccttgtaattcatttgtttacatactctgtttttaccattcttttctatgcattgtcagtttaatttctctttattattctttgatttttaggtgtttgttatgttcttggatggtgattgattcaccacatttatatcattaattctcttacatgcactattggtctctgtatgtacatcaacttaagaagtttctgcctccactttagtccctcca

SEQ ID NO: 96862 - DNA, 512 bp, Cannabis sativa
aaaataatttccaacaataataacactgcttatctgctgtcaaatgtctgataacgattggtatctgttacctccttggttgtaacattttcaggagacctctgactcatggctagtcaagttttcccttgtctttacctacaccagaaagcacccgtgagtcacaacttagcaagaaaagcggataaaacataatcaacacataaagcataatcttataataatacatcatatagactaagtaatcattcaaccgtaatgccataaagataataaattagttgtcttataagacaaaccaatcttgatgctttgtaaagcatccttactgctcattattgttatccgcatttttgtaagcatgatatatggatcttaatcaatgaaggccaaggagtcatcagctgcccagcctcctctattgatgcttcgggaaaacaaatgcaccaacttcgcggaaagagcctaagtaaacttagaacccataaaagaaaagagattgataataatga

SEQ ID NO: 96863 - DNA, 521 bp, Cannabis sativa
agtaaccttttttaacaattataattaagtcacctttagtttagtttcacttgatgtcttaaattttgatgggtctcgtatgttttgtttcttgtgctttcttctttcatgtatttttttttttctcatatatatgattgttttctaaaaagtattttgggcatcttttaatgaagctacaagtgatctcgaggagcaaacaaaatctctaaggagccagaatagagccccaatgcctagattgacattcaacttggagtgtgtagttctgctcctcaaatacaaattatgctccgggcattcatcttattttggttaaattggtatatgagacctcatttgcaatctcgaataccttagaagtattaaaacaagctcctcgagaagcacccaacacctaagttgatgtatgacctgatgcgctaggttctacttatcatattctgattttgtttcaagcatttgactattttttatagtaaatgagagttacgacttgtgataggtcaaattcacacttt

SEQ ID NO: 96864 - DNA, 534 bp, Cannabis sativa
  modified_base (469)..(474): a, c, t, g, unknown or other
catattattttgtaataattctcttctctaattttatttttcttaaaataaaaaattatattttaaaaaaactaatgtcaatgctctaagtaatatgaaaaaaagagtcatatttttgtaaatagttaaaaaaatgaaattatgatcaaaataatatgagatatgttaaaagtaatattataaaatataatattattgttggtgtaatttaatattaattttttttatttaataaaataaaaaaaaatcaaaactaattataaaacgtcatatcatacaaaatttgatatcgtcatatcatagaaaacttgctatctaataacaatgcttaaatataaggatggcaattatacccacgggttcgggtacccgcaggtacgggatttgactttcgggggcggggcgggtatgggtttaaagattcattcctgagtcagaaatggagtggggcgggggaatagatacccgnnnnnntatgatatatgtatatatttaagttttaaaatcataactactacaattaaaataacttca

SEQ ID NO: 96865 - DNA, 619 bp, Cannabis sativa
gtttcgagggtcattattagcattaacgaactgccctttcatcttctacttcacacccaaccgttagatttcccaaccattggccctaccattactgggttctaagtataaaatggtagttcaggctggacatattccataaacttctggtttttggtgaatttgttttatccagaaattggattgttattgtcctgcaaagatgtcccatccaggttcagaaatttatcccgcaaaacttgtagctctggaatatacgaagcacctatctttccccacattcccaaaaacatcaaacctcagttatgaattggaaacgaaatattccaagactgaagatcattcaattaatccaaatcaaggagatattgtcgattgctacaggcgattcttacaagggatttctgaaagtaagcatcattctttgtaaatggtggtctgatctgaatttgttttttttttttaccactgttgcttcattgatctttttcctttgtctctacaggaatggacgtagattttgagatcgtgttcaaaggtcctccccaagctgacaagaaatccaggaagaaggtgacccaagttgatgaagtctcgagttctaccaaagaacccaaat

SEQ ID NO: 96866 - DNA, 558 bp, Cannabis sativa
aaccactttaaaaactcaaactgtaaatttgaaaaaaaaaattttaaaaaaagtatataaaataatttctctaatttttttagtaaagatatcataaaaaaaaaacttcaattattattatttttacacttagaaaaaaaaattaaaattaagtttccttatgtaatctacaataatggcagcgctaaatataatctgtgttattattataattaattttattttaacttttgtatatgaaataatttctttcaaattaaggtattcttttaatagatttcaatatcagaaatagcacacatgtcatcaaacttaatattttaaatattaccgaataaaccttataattgaatcaaattgtccatagctgcaatgctgccgactatgtgggattgaaaataatttattagtgtttgcatgaaccaattaatatgctataactaaactaaactaaaataactaaggcaattactcatcaactttggatgtaatattagcaaaaactaattagccctaacaatttttgttttgtttgtttgaatttctcacctatattat

SEQ ID NO: 96867 - DNA, 512 bp, Cannabis sativa
  modified_base (33)..(55): a, c, t, g, unknown or other
agttcatattaagggtgttaatcaacatacttnnnnnnnnnnnnnnnnnnnnnnnaaaataatttccaacagcgtattgcccatctaggtcatgaaatgttgttcacgtgtaactcagatggatatcatgtcactctgtgcagattttaggataacatttgcccttcaagtacccgtgagaactctttgttcgaacgtggacttattctatcactaagcctgtcggatgggtgacacgtgttcagtacgtgtaccattcttgatccaatacgactgaatgaaaaagtgaaaattttagtgtcccttcagtaatggggcatttaatgcctcgtcttgaaatttggacctcgattggcacaacgacagatattgaatatcgctggctgacatgcccactatagaaaagttgtgggtggacttagaggcttagtcaaaagggcaaatgacgtctgcacaaggacttaggaggacaaatgttatcctaattattttgcccacatgacgtggcatgt

SEQ ID NO: 96868 - DNA, 601 bp, Cannabis sativa
tttggacatccacataattaataatatttataacaaattttaattttttttttccaattatacatgactttgtaacatttttttattattattattacttattgcgcatcgtttaggtaagattttcctataatttgctcttttccgttttctcaaactaaataattcttgtttatttgtttattagtaaatatataatagtgtagaagactatacgagtatacatttgatattaatttttttgtgttgttatttttactttttttttataaatttttgttaattattattttatttttcttataaactttgcttattagtaaataatagtagaacgaatcatatgagcatacatttaggcaggacaactgatgatcttagctttaacaagtaaacttatactacactatgtatttgtttaaatataactttttttgtatttgtttaaatatataattgatgaaagtaaaatatatgattataacctacaggttttaacgaggtttacgtatctgtggcatgtcctctatgtctatagtatatatatatatatatatcgaacataatcataccatatgtataggatatttatatggggata

SEQ ID NO: 96869 - DNA, 800 bp, Cannabis sativa
aatatttcgtgtcattttaatttttgtaatttcactatttgcactatttttatcatctattaggtttggtttctgctggagtaaattttgatttagttcaaataattttacaacagtttcacattaattaaaatgtttgttaattcacttggtaattataaaaaacgtaatttcaagttaaaactgaatacacgaacattttagtagctaaagtggcaggccttgaggtgatcccacacaacaagaacgacattttagttaggataactttagatattgtggcattttaaagagaattgttgaaaggcatcacagatgcttagcaccattctcggcgtcataccactattaatgtaattaaatattagacctcatataacttaagaaaataatttttaagaaatatcgctaatcaattatagggtgctacctataaaaagtgttaagcaccattttttttattgctggcacctcaaatgagagcccagaagtagaactacaaactagacactacaaagacagaaaataatcgggagaaaccccaagtacaaacaagaaaggaaaggatgaaactcctaactgaaataaaaaattggactacaaaactaaaccgaagacaaaaccaaaaagactaggaaaataaaaaactactaagacgtcacagccatctgttcaaccattgagcagggagtcgtcaaaattggacaggtcaatgttcccgaaatgcttggaactaactgcccatttagtcacaccattctaccttcttgggatccagttaacttgccaaaggttcaaag

SEQ ID NO: 96870 - DNA, 610 bp, Cannabis sativa
acttatggaaaataattaatttagtgtttgtgttaaaaaaactcaagaaagacacaaagttgaggtggatttaataatttttacacaagttggtgtagcttggatttagtttgcgcattgttgagacttcaaatcaaaattcgatcatgttgtaatcgaattctagaaatactttgtgaatagggtatttttgatcatgttctgtggtctagacttggtacgaacaattcatatttatgggatttgttggacatgatcctcaaaataggagtcaagcctagaatattattatatagatcgtgtcagggttccattataaaaacaaatagaatttggtaattatgggtgagatcgatcggtttgtacacttaatattctatacaaaattatatgaaaaattagtaagattaaaatttaatacaatttattacttagtatcattaaataatagttataatttaatttatatatataatttttttaaatttttctaacatgcaccgcgaagcaggttatttactagtttacttttaaaaactaaaagcgggtacaaattcgaaccaataaatcaatcccttaggtaattatcaacacaaaaaaaaaaaaaaaa

SEQ ID NO: 96871 - DNA, 682 bp, Cannabis sativa
ttttgttgacattattgtttgaaagaatagttttgtacgcataagctttagattaagcccattctgtcatgttatctaaaattatgtctgtacgtgtgatatatatgataggaaagataagcatatgataattgatatgaataatgcttgcttgtagagtttgtattgctctgaagcagttgttatggttggtcaatgttaatgaaatttgttattgaattcaagttataagttgatgctaacaaggatagattgtaagaggagacttacaaggttttctttcatctctatagaaatacttagttgattaaaaatttaaagctttctctgtatctatgattttctttgtatacatgattgattaaacctctttgtcattaattaagttgttgttgtctctttgcatgtacattttatatgtttgggaggtttgatgaaagcaagtgtggttgctacgaagtgtttagtttcttgcaactcttgagttggtgctcaaggactagccttgaagcttttgcctttagtacaacacactgcataaaattgttgcttttaggttgggagttatacctataagtctcactctagcaaccacccttcacaataaagttgaaacaaaaaccaggcctagattattttgtttgctttcaccttttgctggcttttcgataaatattgaaac

SEQ ID NO: 96872 - DNA, 703 bp, Cannabis sativa
gattgactttctttgaaaacaaccatttgttttttttttttctttttttgtaatgaaatttgtgtgtaatttggttctatatagaacttgtttgctggtagtttgaggtttttgagtactaaaatgaagaaagaaaataattgtacctctttgggggttccttttggctaattctattggattttcaactaaggaggtgtttatttgggaggaatgaaaatataggaataggaatgggaattgtttcttttccattctattttattttattaccttcaaccaaacgccacattaattcaattatcgaaattttatcgttgagttaaccaattatgtagcatctatattgagaattcaagtattgtatacgtcattagtccaatcctttgttttgtaggaactacgtgtaataacgaatttgcaaaatgaatcatagattcgaatggagataaagagatttattgttattgaccctgtttcatcttaattgttatttgaactagtaaaagttatgtcttaagtggagatggggaaaactttgagtgtaatataaatcatacaagtaatgtgagacaaaacacacacaaatttgttcttttttttaatagatttcaattgcacatagcattattaatccaagtttctgactttgttgaaacttgaaatacatgctttattttattttctaatacaaaattttcct

SEQ ID NO: 96873 - DNA, 3887 bp, Cannabis sativa
atttaaatcattaattatctactagttccgatgatttaaccatgtgttcattacaattatactcccgttgaaatttcatctaatatactccagacaccgagtcctcacagtggtttcccaccttactatttagctaagtacccaaatcaatactatgattttgcatcaaatacctttatctttaggatatgattcaaattccttaacatacaacatggaaacatcatgtatactgacaatgttaatcataagggtaaacgagaaattattaatctaattttctcgagaagctgtaaaagtcttggggatcctagggcatatttttcccttgtcccaaaaatattttacttcgttcactgatgatattcatagaaatacatgattttccatactcggaatctcagtattttcgagctacagatctacatatctaaggccttattgatctgatgatctgacttcggatctagatattatctggtacgagtttcaaaataatatttcatatcattcaacatcttataggaaccatccttaacatacattgataattgtttgttgtctaaaaacattatcaaaggtagatacttgttttgtgagtttttataattcatcatgtaaacttgcaacatatttcttagcattaaaattgtccttcagactggccatctatctacgagtagaaagttatactaaacttcagcttcgcgctcatgaccctctatagactttgttaaaacctaaaggtaaatttcgattttctattcgaaataataaactttagaatcgcataaggtcatactatttcccttaaataattttccatactagctcttataccaaaattagtattctatttcattttcaatcatacaaaagcaaacatgcttgcagttctaagtattctaattatataaatttctagtaacatctccctgtttcactcgagaaaatttagtaaatcataataacctttccagtttctgatggttaaacctagtacactgttaaattaagcacttgaatacataatctaccacatcattttgcattgtacctcattagtaagtagaatttcaagtcttcgtacatcttaatagtaccaaaattttaacaatttaaggagtggtataagtttttcctagagtctctcttatgagctcaacactgcctgagacacaaactcgagtttattaatgtaacatcttgtgatctgatactgagaattctctgacttagtcagcttaaaacatatttttgagttttcactaaatttgtatccaccaattgagcacttctatttttgtttaataaatttggttgaagtgttaacttattgagtttactcatgcaaactccaaacttaacctgaccatgacaatcgttaactaaggagaaatcatagttgtactaaaaacccacctgagacatttcctacctagggttccctccactagattggccttcctggggtaatagagagtttcatagtcttaatctttgactaactccaaccattacctttgtcttattccagtctcttctgataataaaatatttcatattttcctccatagagatagttttgccaaaacctaaaagtgaaatcactattacaagttctaggtaataaattggttaaacgttacttatgctccttcaactaacgagaagaataagcaataaccctaacatcttgcatcagaatgcactccaaatcttgtctggatgccttacaatgcaccacgagttttcttgatctgatgcgtaagctaacactaaaatcataatcaatcatcattgcttcagctctcgaatctaattttcacatttgtttggtcatacaaatagtcgtttcttcttgattaaccctgtaaagggcgtaaagatcttagaaacccttagacgaggcaatggtagtaactatctaaatctagaaaacttctaaccttagtgactatctttggcctttgccagtcttcatcaaattaattatttcccagataaactgtgatcccatctttaccaattacgtgcccttgaaaggcactcagaataaccaaaattcatacttcttaatatgatatacacagtctatgcgactatagtcactacaaactatctgtagatgttgctcatactctgtttctgattaaaaaatacacaatgatatcatcgatatttactacagcacatatcaagaaaatccatgagtaccctgaacaccaaattcataagagctaccggtgcattggttagtccccaaagacgtcaccagaaatttataatgaccacacctagtatgattggcagtccttaagatgtcctccactcagattctcaactaatgatagcttgagtgaagattagtcttggagaagactatctttctttgaagccgatccgaccaaccatccatcctaagtagagggtacttgctctttatcatcaacttgtttagttcttgataacaaatgctcatatgaagcgagccatctttcttcctaacaaacaaaactagaacttttcagggtgatacacagggtcaggtaaaccctaaatcaagcatccccctaaaatcataactttaattccttaaattctgttggagttatactatggggtgtcctagaagccacctctacttcaaatgccaaaataagaacaaagtctatctttgttgtagtggtaatcctaaaagttcttttggaaatacatccaagaactcttgtaccgcactaatatccacaggtcaaactgtctccactaggtggtatctaataccaccacaaggaattctatacatccaagatagtaattaattgcttttttgaaggcaaactaagatcaattttcttggagccattcagacacggtaaggattaacccaaatgtgatatgccatcatctcaacatcgaaccaacttacccttcaaaacgtcagaaatgacgaccttcagatctagagggatagaatacactaaaagaagaggttgacaaattattgaccaataacttcatttgagaaccattttatccctcatggatatctaacccaaattttgtcccaaagccaaatgggactggagaacttgcatagatttttttgacttgaataaagcatgtcctgaagattgcttttcactaccgaggattgaccaattggtagatgcaacagtaggacatgaactaatgactttcatgtatgcatattctagttataaccatattaaaatgcatatcctagatcaagagcatacaagtttcgtaataaatatgggactgtattattataaagtcatgtcattcaggttaaaaatgctggagcgacataccaatgtcttgttaatggtatgttcgagaaccagatagggcgtaacatagaggtctacgtagatgacatgttgatttatgcttgtggatgttgaattaggtgttttggaaggtttgacttcatttagggaagttttgagcaagtttcgaagctcttgggtttttctgcagaatcgtttctccaaaaatggttaaccattttcctaggaaggatcccataaaatagtttactgttttgaaatctggcttatcgattttagtagttttttgggagccttagtttttgtgtttcctcgatatttaaggtattgtcatgctatctatcaacttctagttttgagtttaggtccccgagaaggttttagcaagttgtttacccgatttatgtgattgtgacatagggcctctattcagcgtgtgaatttctatttaggtcgactgacacacttaaatctggaaatgaggtaagattagtataaaacatgtatatgtgtatgtatgtaaattgcatgctatgttatgtgattcatatactactaacactagtacggtag

SEQ ID NO: 96874 - DNA, 950 bp, Cannabis sativa
cattttattatttttaattcatttatatttttaccatattctatttatactaatctttagtggtaatttacctctttgtggagcccgtttactaccgtaatctcagtataactaattgggcgacatcatatatttttatgttgaaaatattttatttgaatttaattttatttttatttgaagtgaaagagatcatttgtagcataaaagaaaaagaaattgaaaagaagtaaaagtatggcccaaaacaataaaaatatggcatttttacaagaaaaacaaatcaaagaaaaagtccaaagaaaatcatcacgttggccccaagttctctctcacattctaccacatgtcacgcacgccttcggcaaggagagccctacacgtttggaaaaatgttaaaaggtaccaatagtgcgtgtcaatagcgattggtgcaattaattataaaatataataatttttaagcactattaataaccaatcgcaaggtaacacatttaaaaagtgctaaagattactaatgttagtgtacaatagcaatgctctacatgtttatgtttttatatacttgcatcaaccccttatctcctactctcctataggtgcaagtgaattgcactcttcactcttcaaccaagtgtctgctgcacactcctctctaccaagtggtttcttatgacataacaaattaactaacaaacacctttcaacactggcgattactcacttgcaactatcaataaaaatatgacacgtatcaactctaaatttaactatttgttcaatgatttatgctttttgaataaggaaaagggatttattttctcaaaagatttatggagtatgatctagatgaggaacatcatgatcataatcatatactagtacataaggaatattgtaatcatgttcatttcttttaaacttttgattatgtatgtagagagttt

SEQ ID NO: 96875 - DNA, 727 bp, Cannabis sativa
ataattattttatttttttagcctatatataataattttatatatgaaagattatactttcttttttggaatataaattatttatggattagacatgaagtatattattattattattattattattttgcattgtattatttattttaatagtttaatatttttaaaatttaaatttataagtaatacttttaaaaagtgtttcctatatatggattatgatttaatttttatttctttctatatatatattcgtcattttaaatatcaaatggtgttaaataacttaaaaattgagcttgtggcctgctggtagtacgaagaatgagctagctatagtattaattcaataactacttaatatttaagctaatatatcaaataagtttattctataagtataaaatagtactatatatctatacacataagaagccttcactaaaatttaaggctattatttctatatatggatcgatgcatgacgacattatatactaaaggtttaggagctgtggatggagagtaactggcatggatgcaatattattgggttagttgagaattaacagccttcgagaacacacttactactacttccttcaggttaaacaggaaaacaaacaaagtaatatacacatttacatgaagatggagtcatatcatatcatatatagctggtcattaaaatatgccaacattcaattttggggttattaataagggt

SEQ ID NO: 96876 - DNA, 798 bp, Cannabis sativa
tgtcttgaatggcccgattttgatgtggaatcatgtccaccaagctaccgattgggaggcagacgggagacactcttccctgaagtgtctgcaccaactccaataaatcatagagaagggtggtatcatacaccacggaaggggacttttccatcggttgtcccgagactcggagactccaaatcataattatgaaggttttcggagggtggagctaaacacatttgatgtctagagatactctcactttgtcgcgtcttttcttgttctccccttcacgattctcggtcaagagatgaacgaagcaccatcggcttccccaaggcccagaaatctcaatcccatctcttccccttgatcatcccatcttttcttgttctccccttcatgttaatattattattgattcaatctatatctatattctatatataaaggaaacttattgagagtgatggggcattacataagagctttctttcaaagtttctattttctcaatttttctattttttctaatttttaatttcatatatcatacactaatttgattcattagtaaattttattaaaaacaaaaattccacatggtttagaaacttttgtgcgtgttgtgttatagcctatatatagtttactatttgttccactttagtttgtcttgaaattaatgttgtattatttctatgggtgactaaagaatttagtcttgctcaattaaatttttcattagttatttagtagtaatttttgtaataattacttctaaattacatttatttataaaataatttaagt

SEQ ID NO: 96877 - DNA, 702 bp, Cannabis sativa
tttagaaaatatagggtccgttttatcatttaacaaaataaaaagtccaattagtaacttttgcaaaatacatggtccaaaatagtatttactcaagttataatgtgatatttgttatatgttattcacatgatatatatatatcttcaaaatatataaagcaaataattgaagccaagtagtagcactaatatgtagtaaaattaagaattaattaatattaacaaaaagattatcttataattaagaacaaaagaaacacaaggtgctccccatagggtggaaaatgggaattggtattttcctattcctttccccgcacaccacgctatacgcacgatctcaagctatatataaaagtagtcaaaaagaagacataattataataataataattataacaataataatatcatcacatcccaactttatatcatttcaaaaagagtgcactaattaacactatttcattattaaattgttaaaagttatagtgtaattaagtaggagactctatatcactgtagaaaataattttagaaaataatttttaaagaatattgataactagtcgtaaagtgtcacttatagaaagtattagatactactggtatccaataacaatgctcaataataaaatatgtacatctttctctctaagtttccctctaccagtttgtaacttacgcttgacttttttgt

SEQ ID NO: 96878 - DNA, 617 bp, Cannabis sativa
tgtggtttttaagtgggttgctatatatgtggattttcgttgtgatttaggctgttcccatagttgctatggtagtttttatgtggaattttgtaaaaatacgaaaaaaaaaaaatatatatatattttgaaatttaaaaataaaaaaaatcccctattttctttactaaaaatttatttaataaaataattatttttattttattatttaatttaattttagaaaacatgtctaattaaaacaaaatacgattagtattaggcacaggaggtgatttctgttgtcgtcatttagaggaataaatcttctatctagagagtgcatgttatattgtgtgatattgtcttaaggccagtgtggtttttaatgctaagttcgtttagatttctagttgtcttaaatttgttgctcatcgtcttgcagcctgggtctctttggttggcctacttcgtttgtttgcaactaaggaggttgaaccattcacgtgtttgttaataataagaaaaaaaaataagatgacataatcgtattaatttatggaacacgttcaataacttttctcacgactcaggaaacattattattcccgtcttacttttttagtctattaattaag

SEQ ID NO: 96879 - DNA, 527 bp, Cannabis sativa
gtgtttttaaggaaccggtgtggggtacatgagataatattttgcacaaggtagaagtagaagggtgtcccaatttgcaatgccaagtattgatgtcattagaagcataattatgtaaggcagagtgtgcagaaaagggagatagatctttattgatatgtaacaaattacaagtagtaggactcatagtattgttacaatcaaagaattgatcattattataacaggcagtatcttgactgggggaaatcaagttggtggtgagataacattgttgatgttgctgagatgattcagaaccttcactcaacatgtataacccttctttacgccttcctttgaggagaggagctccggtttgcttgtccttaacaaaacagcaatttctatgaaattctagaaatatatcattatcatcaacaagtttagaaatgctgacaagattcttagtaatattaggaacttgtaataccgattttaattgcaaaggacaggaacggttaaaggagggaagaaaggactgacca

SEQ ID NO: 96880 - DNA, 1040 bp, Cannabis sativa
atccacaatagtctcataaggaaaggaaaattcatcaaagactacatctcttgagatgtaaagtcttcgattagaatcaaggcatttgtatcctttttggttgagactatatctgaggaatgtgcaaggtgtagatctgaaatcaattttgtgtttgttatatggcctgatattaggaaaacacttgcatccaaaggttttaaaggttgtgtagtctggctgtttgttgaagagaatttctaagggcgatttgtggttgagaactgaggtaggtaatctgttgtgtatgtacacagcagatctgaaggcttcatcccagaacttgaggggtagggaagcttgagccaacaaagccagaccattttcaacaatgtgtctgtgtttcgtttggccaagccattttgttgatgtgtagtggggcaagggtgtctgtggtggatgccatttttagtgaggtaagtggaaaaagacctgaactcaccccccaatcagtttgtagagttttaatagatttacctagttgcaatttagtttcctttttaaagttgagacagactttaaaggtatatgatttgttctttagtaggtataaccaagtaaatctagagaaaacatcaacaaagtgtatatagtatttatagccattgtgagaaaccttgtgagaggggccccaaagatttgaaactacaagttgtaatggttctgagataacagtggtggaagcttttgggaaatggaacttatgtattttgccaagacaacatgcaacacaaactgaaaaaggagaatttttattactaacaggcagattacaaagctttagaacagtttgtacaatcttttctgagggatggcctaatctattatgccatagtgtgaaatcattttgaacattaggattacacttgtggcaactcgacatagacacctcagaattttgaaaggagacagtgaagacactcttgacactaggactgctacaggtttgaggagagtcattcttaatgattctttctttgagattcgaggaaactagattg

SEQ ID NO: 96881 - DNA, 628 bp, Cannabis sativa
tttattttattttttattttaaaattataaatatttattttaaaatcataatatttttttttattttttttcttcttcttctaaatccccagtaatatctaatccccaccccaacacatcctgactccaacatccattctcagccaaccacaatccatccccacctcacaatggaccaccaaaaacccactcaatttaattttctagttattttaaaaaaaattaatttaaaataaaaaaagaaagctctaatttttatgatgttaaacttacttcactctctttctctagcacatctgtacaagacttcccacatctacattttcaaaattttatacataaaaaacattttccgaactaatcattaaatgggcattaataaaaggccaattaggatttttcccctcgaactttgacatgtaccaaatcatgctccctgaattttttttgccgttaaaagttccccttgaactattgagattgttatatttaaggacttttgtctaatttttataaaaaaattccaacatggatgaaagttccgggagtatgatttagtacttgtcaaagtttgaggggcataatttggtagatatccaagtctggggagcatagtttagtacataaa

SEQ ID NO: 96882 - DNA, 1030 bp, Cannabis sativa
tgcatatcaagattcaacctcacaatgtactcactcaaaatgtggattttagatctatatgtttaaaatgtgtattaactttttgttatagaatttttttcttcgatcagtgtaaaattgtgaaagcaacaggtacataatgaattaaagaaatatttgacagagaagataatatacacttacaatttaattaaattgatttgtaaaatatctaattatcttatttgaattaaattacatttttttgaagaatcaactaattaaatatctacttttgtttaatatctttttcttattttggtattaccaatgtcaggttggactttgacttgcgccatcaatttggctcagcttctgaagatataagtttcacttctacccataggttagattattatataaatatttcaatttattttaggtcaaattgtgtttatttatgaatttgactctctcaaaaataacgaagaaaataacaaaataatatagttatataatatcatttatatcatatagagaaggaaagtgcacataacttaaaaatgaaccttttattttatgcaaactattgcttatatgtgtataatgctaaataaaagttatacttataccataaatattaaaagtgatacatcaaattagaatggtgagctatgcttaagctaaatccgtgtcaacaatggggataactgtaaattaagaaactctcgactttactattcaatgtgtttgcagtgtgtgtggtgtgtttttttaactattttttcaaactaatttgcacatgcaatttttacaatttagctctgcttctgaagatatagtagccttgtttattagcaaacttgttaataactaatctagttggttagattagttgtaatcacagttgttagctttcttgttactatgttacttcgtgtaactatttttagttttcttttcagtcgattcatttagcttgtataaatacaattttctctgtaattcttatcagacttaaaatttaaatttaatctaattatcaattcat

SEQ ID NO: 96883 - DNA, 775 bp, Cannabis sativa
ggacccaagagttaagatgttatgccaatcgttggtagcatgctccgagcagagttgcaagccttcagtgccaacctcggggtgtagtagacatgagggctcgaggagaacaatctctggattaaaactagagactttcacctggtgcactgacccagtcaattgctcgacgatattccctgcaacagagacctcattctctttctgtacagacttggctggctcgatggtaagctggtttgaggacttcttcttgttggtagtagttttggtccttttgggttctttggtagaacgcgaggcctcaccaacttgggcaactctcttcttaaacttcttgtcagctgggggaggacttttgaagatgttttccaaatccaaatccatatctgggaggcaagaaaaattcattatcacttaaacaaaataaataagtgaaaatgggaaaaactcccacttgagaaagttaccaaaatcttcagaagatgacgtgggaggactataatattcactaaactccctagatcctgtgatcataaatatatcataagggtttagtggatctaaattccagcttgaatttatgtgacttgacctatccaacatggtcccatactgctcgacgattccatagtaagaactagtgcagctagtctgaacgtgaaactttgggtaccaactatcaaacctatgagttatgcgatctatgaggaggggattccaagtgtaaaatttatatcgattatctcagaaagatactaaggtgttacattcg

SEQ ID NO: 96884 - DNA, 668 bp, Cannabis sativa
cagaatataagggatgtcccaatgcataaagcaaatcaaccaaatcctaataatacaaggaatcaagaacatcgacgagatgttccacaaacttcccatggatttattaactctgggaatgaacgaactgacatgccagaatcatctcgcatgaatgattaagcaaggcctccttgactagggaatcaaggattccctcgtgataatgagagaaatcctagaaaccaaccaaggtcaagtggtcttcctccgagacatccgtcagtgtccttctcgcccaaatggagaaaatgtacatatgtacttaagtagaggacgtgtatctaatctcttctaaagaagaatgccgatgcgagacgaagcaagctcaagcacgatgaaattctgtattttaatatttccagatttattatttaattaaatgtttaattaaatgcggaataatgaaactggtagtgaaaacagtttttccgtagttacagaaaacaactctgtaactccagaagaaaccagaaaaataaacggtgtagaaaagtaaaaacacagaagattttcgtacgtggtttaaataatcctttcagattgttactagtccacagggccacgcccagagataagattcattagatcggtctcaataatacaaagtaattgacttatgcataaat

SEQ ID NO: 96885 - DNA, 744 bp, Cannabis sativa
gggggagggacttaaatttttaatttttctgttttatttttttttttaggaatgggcaataagctaaagatagttgtatgctgttgttgattgttaagtgtcctgaaattgtaaaaattgtgtgcttaattctgttaactctttggattagtttggatgcttgtgaaacctgtgtatggatgcaatttgatatctgtgaaatatgttataattgatttactatggtttgtggtaagactggttggatagcttagaacttgcatgccttattctctcaaggcgaaatccttgacaacgttcaataggaacatgatttggatagtttgagcctttcaagcctaccataaaatgaatatccttagtgaaccctgttgagcctaaacctgttttgtttcttcacccattgaaccaaaagatttatccacactgttgtttgtgtcttcaatacattttcaatgatatcataagctttacaataagtttgggggagcaaaaatacatagtgtgtgaaaggatagaagaaagaaagcttgcgagattgagaaaggtaaaagaaaaagaaaaaaaaaattgtaaactcagcatcacttgaaaaaataaataaatgtgactgaaatgagaaaaatatagcaagaatttcaatgatgttgggtgaatgaaaaaaaaaaaaagaaaaaaaaaagagaaatatttctcaatcgtggttaattgtgggaacaattcgggaaattttaatttatggga

SEQ ID NO: 96886 - DNA, 609 bp, Cannabis sativa
tttggattcaattgttagtttgttcttttcagtcgtgcaacttgctcaatttttttcttttttgagaaatagaacttcattcaaggttaagaaaggggctgaagccctacacgcccagcggacgaatcgcataacctcacaaggagatggcacaaatattggctaaccacaccaatgatggaaggagcaaaaagctcaaggctcacacaagagcatttggagggataaatcccaaaattgtctaagactaacgccaccaaaaagaaaaggtgagcaacatcaaaaagattaattaaactaaaatacacaaaaacaaagaagcaaataacatagaagaacttcaaagaacacccccaaaacgcagaggaggctgccagagagcctaaaacaaacacgccaaagacaaagagttgctgccaacttccaacaaggaaagtccacactcagtctcccatagcggttctgaacggtgaaggtgctaggacaagggaagcacatccctttgggtaagactcgaatccccccctttacatctacaacactcctaaagctaaacaacaaccaatgtgcaccaaagctaggacacctgaatagaaacccacaaggaaa

SEQ ID NO: 96887 - DNA, 672 bp, Cannabis sativa
accaaacactgtagtaaaaatatactaaaataaaacttatattttggctctaaagtatataccatattttagatctcattgcaagcttcgaaacagtatatagaacgtccaaaatggacacacgtgtaaaaagttatgacaaaaatacaatttctgatgtcctaggaattttcaaaaacggtgaaatatgaaaataccagatttctcactcaccaaaacactgccaaaacttatccaaatcactccaaatataacagggcacatatataccataaatattactatctttgcgtaacaaaaattaaaattgagcccttaaataaaaaaatgccattaacgttgagactaagctttaaaaatttctaaactcgatttctaactcaaaatcacctcaaattcaacaagtaaacatctaaactagttccatagctaccaaagaacaattctataagtcagcatctccataactattcgaattcacgaaacccttatataaaaccaatcgttctaaacttaaaatgaaattcaaccataccttaagcttttcctctttaaagattttctattccgctactactagagcttagatcgctaggtttcaggttaaaaatcaaagaaaatggatcaaaaaagattagggttttgttaaacgaaaaaacaagagagagtttc

SEQ ID NO: 96888 - DNA, 1169 bp, Cannabis sativa
gttttgctaatctatttccttaatgatagggtattacaatcctcttcttttaattttattttgtgatactttgatctcagatcaattttaaagagcacgacagctccttgtcgttgatgaaaaaggtcatctatccttggaaatgggtatttgatctttatggtgaccttttttaattctctataatcgatagacatatgcatgctacaattcttcttttgatgaataggactggtgtcccccatagtgagtagctttgccaaatggtcctttgtccaacaactcttgtagttgaagctttaattccttcaattctgtcggtgtcatcatgtagggtgcttttgatattgatgtaatttctggtgctaacttgattacaaattcaatttatctatctagtggtagtcctaataaatattttagaaatacttcagggagttcacacactattctaacatctcggggtcctagttggatctattgctttgtctactatacttgcgagataagcttgacatccattttgaatcatgcttctggccttaactgttgtgatgataggggtgtaaactctagtgatatctcccatgaaggtgaaatgtgcattcccttctggtttgaatgttacaatcttcctcctaaagtccatggtagctccaaactttgctaatcaatccattccaagtataactttatagtccttcatatcaagttctatgaaacctccaaggcactcccttccttccaccattatgggtaccgcttgaaaccatcttgaagacatcattaatcctcccaaaggaagtgttatgacaaaactattgacaaacatcttaacgtttagtattatcctatctactatatcttgtgacacataagaatttgtggcccctaaacaaataatagtctataatttacaccaaatacaaacaagttgacttgttaccaccttattgctagcttctgccacaccttgagtgagagcaaacacatgagcatggactagatctttgttctcttattctactacgttgtttcgttgcagataattcctcttgaagtggactccttgtccacacttgaagcatttcttatcgaacttgcattttccaagatgtttacggtttcatgtagaacacataggcttctctttctagttgtgaggagta

SEQ ID NO: 96889 - DNA, 1082 bp, Cannabis sativa
  modified_base (197)..(197): a, c, t, g, unknown or other
  modified_base (293)..(294): a, c, t, g, unknown or other
aaggaaagacagtgagtgaggtgcaatgtgtacccatacctttgtagggccacctaatataaccataagcactataaccaattactgagtttaaaataaccaattacatgtgcacaaataaaaataaggcatgtggacgcaaaaattttaacttttagttataacaaaataagtgattaaaagtaaaaaaattgtgnctaattataaattatcattcatatattgtgattaaaaagtctgtgactacaagtaaatgtgtgtttagttacaatacttgttgtgactaaaactannttagtgacaacttgtatttaaattctatattttaatcataaataattttttgttgtaactaaagtcatgtttgataaaaaaaaaattattttattattagaaaattgtcactaaaaaattatctgaaggtgatgtttttttatagtgtgtacaattaaatttttaaataaaattatttttagtatgtaaattgtttaatattattgtacatattataactataatatgagatttgtgatataaaaaaattgagttataattaaaaacagaaaaaggcatgttgggcaaatatatgatatggtttaatggtccaatattaaacaagttgaaaagaattggcttgtttttaaattgttcttcttccacctatggcaacttggttttgattatatgattaagtaacgcacgctttcatgtgggctttgtctctcttactagctaattccctttttgagctttattatttttttttatttatatataagaatcatatataataatgataacaaacaaattgtggtagtagtagtgttagaatacataatgggctaagcattatcccttttgtttcttggacttttaaggaaatttagatctagtctttgctttagggccactctcccaagtctcaactatacaaaatgggccattttcctaatctttacaaaagttctcttatatcatatttttcatgtgtaaattagtatatatgatgttgattactaaatgatctattacaatctttgtactagctacgaatttactataagtaattaattatatatttg

SEQ ID NO: 96890 - DNA, 798 bp, Cannabis sativa
aaagttactccaatcctgaacagcttttctttagtctgaagacgacccaaggaggcaatttagctgataaattggtgcgttggaagactaagtctagaccagactatagagttctaggttcgaacttgatttttaggccaaagtttattgtagaaattcgagacaacatacggctctcgaatcaaatcatccttatccatcttagactttatcaaatctttcactattactacttgtcgccaataccaactagaattttttggagctacatagcttaaccaatcactatttttgtaattatatgagtagtataatggtaattatataaatataaaattgtaataaagagtgtaatatatagtaattatataatagtgattttattaagattatgtaaaccaaacatatattatatatagaatgtggaagggaatcgccgaatgtgaatattgttggcacgatataagccacaaccatacacttcatccaaatgcatctctcagtctttaccctccattgctattgctctttccaacaagaatatgattgttgattcaattgtggaggatattagaacttggtattatttattggtgttggagccattgttagtgtttttaatgctaagatttaagtatgtgttgcttttgtgtaacaatgatgctcattagccaaatatgcatagctttataattggtattttttcttcaaaaatatatataatattaggcgaaatataaataaatttgttatcatctcgtgaattgaaacaatgtaaactagatatatatttagatg

SEQ ID NO: 96891 - DNA, 647 bp, Cannabis sativa
tattttcttttatataaaataatattaatagtgcttctattaaaatataatgaatttgtgttaaaatggccttggattagtttatataaaacatattttttaattaatttttatgtgggttgttatgtaaattttaattgcgatttaagttactcaattttaaagtgtgaaaattaaaaaaaaatccataatatatttcatttaaatcttattaataaaaaattataaaatatatttatatgttggggtttcatttttgttttaaattcattatatcttatagttaatatggtatagaatattcgtgttaacgatcttaattttattattaccactaaaaattttgataatgggtaaaaactatgtgatttcattaaaaaaaaacttgtagtatgtgtttgtcccactaaaaatttgtggtgtttatttattggtccctctcaaattatttttggtgtactttgatccccttacaaaaactttttgtggtcgtctttgtgtaggtcaccatgcaaataaacaaatggtggtttatgatttgtatcaacatattaattagtatgtaaaaataatgaattcgatgatgcatttgaaaatacttcatgaaacatatacattatctttatttctttaaattttgaaaagag

SEQ ID NO: 96892 - DNA, 525 bp, Cannabis sativa
  modified_base (396)..(396): a, c, t, g, unknown or other
agatacattagttttttctatttatatttgtatcaaactaagatacattagttttttctacaagttgcaaattaaagaaaaacttaggagtttggtgcattttaatttactaataagatatcttttcttttctttttttaagaaaaaaatcttaatgattttttatgggtttatctacaatcatagattttatattattatgatattgtataatactaatatgaatttaagaattaatcaatgcaaggatggttttttaataggaggctgaaacaataaaaatagatagaattatttttccattctaatttttcactatcaatgttcattctcaaatagggacgaattttttcaatggaaatgaatgagttctaattatttattgttaatgttcancatatataatttaaaaataaatatctatgccataagtataactactaattgtgaatatactcatattattgttaattaattttcagaaaaaaaaaatccatcaattaatacttttacactatttttttc

SEQ ID NO: 96893 - DNA, 554 bp, Cannabis sativa
aaaaaataaaaatgtgttctttaattacttttgttttttaataattttgaaaacaaaaaataaagtgtgttttgtaatttttatttttatttttatttgttgatattatttaagttgggtccgtgtttggagacggaattgggacccgagctagggtccaagtctgcgtcaaggttggggtttggggtcagggtttggctccaagtcgggtcgagatccaagttcggattctaaggtctaggtttggggtcagagtccaaaatattgtttaagaaaaaaaaagtagtttaaaaatattttgaaagactttttttgttttcaaaattttgatgctcaatcaaaaaattaaaaagtgaatagttttatagaataagattttgaaaacttttttttttatttttataatttaataaacaaaaagctgattaaaaaaaatattagaacaaataattctttgatattatttttttacgaaagaacattcattaatatatttttggatgtaatattcattgatatttgacccttaatcaaatggaaatttacttgcatca

SEQ ID NO: 96894 - DNA, 607 bp, Cannabis sativa
ttccttcttcaactttgtaattgtagctcttgtagtgctgctttatcaagtgtgggtgtgggtgagcgtattatattactacagaatgtgattatggtaaatttctgcaggaacttagtggccaacgattttgtattcgacacctcaaataaatcgtaagtatgatattaactgtatttctgtagtttcacaaacttagacacttctttctactgattttttttttttcttttaagagttcttgctggattggaatgccttcagagagactttccatgtaatagaaatactgcaccttgtaagtgtctttcattcaacttatttgctcgtttatagggcactgatattggcacttctcttcaatatgctatatccttttgtccattgaattttatttgtcgcttaggcaagttactcatcatgagccttaaataatagtccatatgtatccctgtgttatctctgtgcaatggaatgaaagatcacaagctgaatgattcaaggctgaattaaaatacataatgtgttcttaactcacccgaatagatcagaaaaccattttttactgtatgaatggttaccttttgaacctattgaatttcacaga

SEQ ID NO: 96895 - DNA, 559 bp, Cannabis sativa
atatattcatgtatttatcgttatgtttgctgaaattttattactgtaaattgggttttatgtattgaaaactatggggagtttcgtttggtttaatgtgaatggtttcttagattctcaaatgggtttctaaatttgttgtctttgttaaagtttctgtttttggtaaaaccaattagaaatctttgatagtgtgtgcattgtactcttgaatccctacttgtctaattggtatgtttattttgaatatgtgcttttgtacagattaaaaatctaggttgagcattgtactgttcatgtacatttgtattgagtggtggaattggttttatgtggtcttttagggtcttaaatgggttattatgaacctttttttttcttcttctgggtttgtaaatttatttggacactttttgatttttgtggagctgttaatgcatttgtgtgtgcgtgtcttggtaaagctagtgagttcagtatagtgtgtttaaaattgtaccgtaaaataggtacgatcataccagcactaatgctttggatcccatcagaactccgcagt

SEQ ID NO: 96896 - DNA, 506 bp, Cannabis sativa
caattcacaactcaatcacatgacacaaacacttccgagctttatacacaagaacactaatggcttgtctttgaatttcttcctttattgctttgttggaatgagtataatagtatttaattacaattgtatagctaattatgctctctctaataatattgtaatgccatattggattggctctcttccaagttgtatatctgcagctttattagctacagagtagcctttgcccctttgggtgtttacaaaaatataatctttcaaaataataattagataaataaaaaatttccatcaaaaaatatatttgaaagtgaaacgatattggatttttatatatataaatatacataataaaaattgtgtttttgtacatgttaaaaaatttctttaaaacaaaaaaaaaaaaaaaacgattgtaagaatctttagaagtagattgaaaacttattaaatttgtagtaacaaatattagaatatttctaattaaggaaataaaataa

SEQ ID NO: 96897 - DNA, 813 bp, Cannabis sativa
  modified_base (448)..(475): a, c, t, g, unknown or other
cttcttcttcctcttcttcttcattttttttttttccagaaatcaaacccccccaaaaggaagaaaatccagaaatcagatctaggttgactcaagaactactctaattgttaaagttgcaggaaggattcttattcagcctctggaaagttctatatagttttttggcattgtaccattaatgaattaactactagtgttacttcctgactaacacaaaagtagttgtcaaaaagtaaagaatccagtatcctaagaggagtaaacatatagagagaaatttcacaatattaaagattttgtgacaaaagaaatataatggtagagaaagttcgtattgtatacaacctgtcagatcctattacagagaaaatactatatactacacttgatctggatattaaggtgttgagattatttgaaatacactttgttttatattagtgcnnnnnnnnnnnnnnnnnnnnnnnnnnnntaaataaaaccaatttcaatataatataatttactaattaataaaagatcaaaaattattttattgcatggttcacataatttgtttcataattatatatttaatgtagaaatgctattaagttcagaatatatatatttattcacaattatagtgttgtcaacacagtggaatataatcatgattatatgcttaaaagtttaagtcctgtgatttctcagtacgctagatttagactgacatgataatcggcgataaggtatagttacaccttagataagtattatgtcctttccagtgtattgtcaaagtatgccagtatcggatgcatggagtat

SEQ ID NO: 96898 - DNA, 573 bp, Cannabis sativa
atactaatttaaataatttaaatacaaataacaattattttactcaatctcatgatttaataattcattattttagatcactcgaattatgaatattacataatgcgtaaacacgatcatgtgacaataacaactaattaataattttcaaggtaggtacgtccaagattcaacacgttgagaattttactactcttcatagtactgttgatatataaatacatgtagagagagcatttaaactcattacaagaactgtaataacagctcgctcggtcatatttgtaatattacaacttcaaattaatatataaccgttaactaataactacctcaaataataaagtactgttttctaactgcaatcagttacacaacgattttcttatctcaacacagcttatcactatatctatcgatcactagtagttacttacttctccacacacccactcactctctctatattaattaataactaaagaacatctcccataccaaagaaaatcaagaagaagaagaagaagaagaagaagatcatctaacaataatggatacgagtgagaaaccaat

SEQ ID NO: 96899 - DNA, 503 bp, Cannabis sativa
acgctaaatgcctatctataatttctttttaaaaaattcatctttagcatcattttttgttttagtgtcggagttacaaccgcaatgcaaatatttgtgtcagttaccaattgaagcaaaatagtaagagttgacttttgtgccggtaaataactctgactagatgcattgatcgatataataatcctttttttttattaatggtagaagcaaccaatgcttttttacttttcaagcttaagcatattaaatcaaaggtggatttggggaagttggttaaagatccttatgctctgttcggttaaatatattatgccacatcagcacccaaggctgatatgaccattgctcattgtccaaggctcaaatgtaaatagatgttgagacattaaactctttctctctctctctctctctaaatttctataaagaattcttcgagctaatgtttagcttaggatgagattgtaaaatttgtgtgaatcaccgttgaagcattgcaa

SEQ ID NO: 96900 - DNA, 543 bp, Cannabis sativa
acctattattctcttgtaagctctcttatataaagagcatcaacctaaacctaatttccctaagtctcaagcactctaagctcccaagctctaagtctgaaaccctaactctctctctccctctcttctacacgccactggcattgtcgaagagactaagtctccttcatctctctcacttgtgatttgcctattgattctcactaatgtaatcttaagagagccacttcaaaatccactagaggtgttatttgagtggtattatctttagtattaatacaaccaaaaggggagtatgtgattacccgctaactaatgggggcccctctttaaaaataatgtgtccctttactttcttgttcttattgtgttcatgtggtgatatcaatcataaatatgactctgctactggttggccaaaattcaggtcaacagagataataccattctgataacaagtattgtggattctatagtggctctcttaagattgcaatagtgagaatcaagactcaaatgtcaagtaagtgagatgagggagac

SEQ ID NO: 96901 - DNA, 1184 bp, Cannabis sativa
  modified_base (423)..(438): a, c, t, g, unknown or other
tcggtttggtcggagccaaagctatcgtaaacttctctttctccgtaacaatggcggaatacgacttaaatcaacgcatagctcccaatctcgaccgacacttggtctttccactactcgaatttcttcaagaacaacgcataagcagatcctcaagtccaagattgagcttctcaacaatactaacatggttgattacgccatggacatccacaaatctctttatcaaactgaagacgttccacaaggtaatttcattttctgtacaaatcaatatgcgtttcaagattgatgttttgatgtatttgtgagggctgggtctgtaggaaaagaagaagaaagaagaagaaaaaaaaaagtaaaaaaaaaagtaaaaaaaatatttttttttctgattttttaaattttttttaatatttatannnnnnnnnnnnnnnnaatattacgtggaccactaaaaaattaccacgtgtacaagtgtgtatacgtggacagtccaaagtggcacttaactgtgatttttggacggatgtgtgtagagcaaaacggaatcagggtataggtagtttagccgccaaaatttcgatttttgtggttaagtgttacaaacagtaaagttcaggtggtttagccgccaatatccctttatatattaaaaaaaatagtttaaaatatttaaaaagtagaaaaaaaaataattaaaaaaataattaattttttttcttcttcttcttcttcttttttctttctttttcttctttatctttcttcttcttcctcttcttcttcgtttttttttttccagaaatcaaaccccccaaaaaggggaaaacccagaaattagatctgggttgactcaagaataacctctaatgccggcattgttaaccaaagcatcaatccgcccaaacacctcccaagccctctacacagatttctctattgtgggtccatcagcgcacacatcaagctcgactgccatagctctgacgctacttgaagaagaggacgaagtcgatagagtgaggctattgatttcatcacacagggacttaaggcgatcaacgcgacgagcagcagctaagacgcggtaaccggctttagcgagatcgacacaaaagtcgcggccgagaccagaggaggcgctggtcaccatcaccaccttcccctgaaggtccagccaa

SEQ ID NO: 96902 - DNA, 733 bp, Cannabis sativa
  modified_base (650)..(677): a, c, t, g, unknown or other
gtaattaattaatttattaattagattaatttgcactataaatacttaaatttacggataaattaaaaaatatctctttttttttgttccattaattaaaaatattctcatattatattttttttaaaatatattcatttttttttttgagtgagttgcccaatatactctcactccctacttaagtcttgtatataatttacttaaggggtttaatgaggatatcatctttaaaagtgggtatatcttaaaaaatataaaaatggaggtaaaaataaaaacaaataaagtaaaatgggtatatcatgtaattttctcttaaatttaactctcggttgtgaataatacctagatttaatttttaacagtaataatacttaagttataattctaaaaattccataaatacttgaaggtccggcccaaggcatagacgagctaagcttgtatctagggcccacctaactctaggatcccaaatattttattctccttttaaaaatatatatttttttattgattttagaaaaataccactttttttttcttaataagagctcaaaaatattttttttcctatgagtcacttaatttcaccgaccttagtacctggttgttaagtattcacatattatttttttattggtatnnnnnnnnnnnnnnnnnnnnnnnnnnnnaaaatttaatgactttgaccaattaaaaattatcacgtgactattgacttgacact

SEQ ID NO: 96903 - DNA, 615 bp, Cannabis sativa
aaaaagtgaaaataaatttatagattacgattttagaaaatatttttacttttctaattttaaaaataaaaaacttattaaaaaaatattatcacacacctaaaaaaaaaaaagagataagatgatatgctaacaactcttcttttgtcttgttggattgggtaataatgctagggtagtgtggtggctttcttattttcttttttgaaataattaactaaataattaataaaaataagtataattaagatttggaagaagtgaccaaattattgccaaagtcttattcaaaatcatgttatgagagattaattaatttctccaattcgtattaattactatattagggtggcattattagggttagaaagtgaattagtttagactttagaatggtgctacatgtaatgagtttcttgtacttatttttttaaaataaaaatcattgcaagttcttattgaaataaaactaaaattataaaaaaaaaataaagtttttttcttcttcttctgtaaactgtaaactgccaaatgatttaaggcaacttttgttcacatatgtcaaatgtccaaaatgtatattgatgttcttattcattaattattattattatt

SEQ ID NO: 96904 - DNA, 548 bp, Cannabis sativa
atcgacctcatagtctcactgcgtaaggggacaggcagagttcaatatgccatggtggcagtcgactacttcaccaagtgggccaaagcagagcccttagccataataacatcaaagaaggttcttgattttatggtcaaaaacagcatttgtcgatttggactcccaaagaagatagtgttaaactacggaacatagtttgacgtgacctctttactaatttctacatcagacaaggaatcattaagatcttaatagtttcctacccacaagctaatggacaagtggaagcagtaaaccaaactcttaaggatatgctaaaaatgcctagagcaagcaaaagggaattggcatgaacaactacctgaattacaatggccctattgaacaacagaaaagacaacaaattgttaaacaccctttgatctagcctacgagtacaaagccatgatacccatagagctcagacccccatcccactaaagacttacataccactagcaaatgaatcatcaactgttggccaaatccttggatggaatggaaga

SEQ ID NO: 96905 - DNA, 514 bp, Cannabis sativa
tctatgggtgcaatggatccatagcatttatctcaagaacaaagattggtggagctacaccagtccaaaccaagggagctggtattggaggcagctggtggctctaaaagaccaggtatgctcttcacccgatatgcagcagttcaggggagtaacttaccaaatctctacagggtatcgaattctatgtcccattcaagagaagaaacaatagagtaaattggtttggggtaggttcaactctcccaaacatagttttgttttgttgcttgctgtccaggggagattgaagacaagagagcggctgcacagaaagaatatcattgaagattcttcatgtataagctgcagacaccaggtagaaacaattgaccatctattttttcactgttacaggtcaaaggaatgtttgcagggagttgggagctggttacagtggagaccagctgatataactctcttcagagtgattaaatggctggagagacttaaaggctccaggttccaaaggttg

SEQ ID NO: 96906 - DNA, 845 bp, Cannabis sativa
ggttgaaacttatctgcatcaaaactaattttttgaagaactttaccgtaattttttttaaatattttatgtcttttaaggggattatatattatctcatgatttaagcatagacattcaaattttcttatatttactcattttttaagaagttttttcatttttacatttcaaaacaatttttttttttttgcatttttacggaattatacataaaaactcctattgcaactagcgttgcaacctaaattgcaacaaaaaatcgtacagaaacccttattgcaactagcactgcaaccactttagaaactcaaaccgtaaattttaaaaaaaaaattaaaaaatagtatatgggtaattcttttttttttaattatttattaatattattatatttttttaaaaaataaccctaattaatttctgctctgcccttaacgtgtcacgacctccatttcttccacatcctctttcaccaacgataaggggcgaccgacgcgtcttccaccgccgccgcctcctccgcctccaccgcctccgccttcactgtcgcaatcgacgctgcgaccaactccttcaccacctacctcaatccaacacctttattaaccctacagaatcagaatcaaaatcggtatgttaaatttctatcatttgcctttaaatctgccctctgttctctctagctaacttttcctcattttgaaaaccctaatcgccatggcagattctatggctcctcgtcgcttttccgttctctcggcggtgggtatggtactgtttttttcttcttatttttatgcactttcatttatttgtaatcttgtttattgctaccagcacta

SEQ ID NO: 96907 - DNA, 527 bp, Cannabis sativa
  modified_base (39)..(42): a, c, t, g, unknown or other
ttcttccctttctcttgaatgcccttagcaggcctcttnnnngaatctgcgacaggagtaaccaccacattgcttttcaacttctgagaagtcataggagaagtcgctgctgtcccaggcttcaacttgcggttaagaataggagcaaacttcaagaaagtcatttctgcagttacaaagaaaaaataagggttaatactaataaggatgaaactataatgcactagtttatgtatgcgataagctacctgatgatggtcgaggagtttgcttgaaaagacgtttatcagttcgctcttgttgctttttcagaaggttccttatacactggctctctccagagactcgcattctcagggatcagtttgtgttctcgcagtttagcagtcatacacaataattgccaatcgcgatcttgtataggaatgctcccgagaatttcagctgtctctctacgagttgcgtcgagtgcaggccgagctggtctatctacgaaaacaaagaaaaagagcgagttagcttaagat

SEQ ID NO: 96908 - DNA, 1379 bp, Cannabis sativa
tatcaactttgggtatccaaccccgtgctggtgcctaaaccaaacgaaacgtggcatgtctgcgtagacttcactcatcttaataagccctgccagaaagactgcttcccattgcctcgaatttatcaaatggtggacgccatcttagggtttaagctgctatccttaatggatgcctactccgagtacaatcagattgaaatgcatgtcgcgaattaggaatgtactagcttcaggaccgataagggggtatactgttacctggtcatgctgttcggattaaagaacgtcagcacaacttatcaataaatggttaaccgaatgtttaaaggcctcctcggaaataatacggaggtatacgtagatgacatgctagttaaatccaaaacaggcatgggccatctagatgacctcacggagtgcttcaaagtgctccgaagatacgggatgaagcttaatcccaagaagtgcatcttcgacgtcaattagggaaatttctaggatttatcatttgtcaacgcggaatagagataaaacctaaaaaaatccaggccttgttgaatatgccttctccaaagaaacaaaaggatgtacaaagctttaccgagaaggtagccgccctaagtcgattcatgtcccgatcgaccgacaagtgcatcccattcatcaatgttatgaaaaagtttcaaagatttgagtggactgaagagtgtaaagaggcattcaaaaaactaaaagaacacatggccaagccgccaatactgtcaaaaccagttcacggagaagacttgtttctgtacttggccgtctctgaaaacgttgtcagtgcgcccttggtctgggaaaaagacaaagtccaacgcctggtatactatgtcagtaagcgcatgataggggccaaaactcgatatcccttgatcaagaaattagccttttgcctcctgatggcttcaaggaagctaagaccctacttccaggcccatcccattaaagtacttacaaatcacccacttcggtaagtcttacaaaaacttgaagcctcaggaagactctttaagtgggccatagagttaagccagttcaatatacactatgcccgcgcgtctccataaaaggacatgccctggcagacttcataacagaatgaaatgaagcagaagccagctctagtatgccagcccaaaagatgccaacgtggaaagtgtatgtcgacagggcatcaaatgaaagtgcatccagtgccagaataacaatgatatcaccagatgggctttggctctaggatgacctatgctttgcattcccagcctccaataatgaggccgaatacgtagcgctaattccaagactaaggatggccaaaagctgtaggggccgcg

SEQ ID NO: 96909 - DNA, 511 bp, Cannabis sativa
cttctgaagtcaaaaccagaagccgtaggaaaaaaggaaaagcaaatgccaatgagttatcgactggtcttggaaacctcgacaagatacttgcaaattgcattgaggtcagtgtggaatacaaccaaaattttcgatgtggcgaggaggaagctgtaagcatgcccccactgtcatcatgaggtgcctggtgtggaactaccgtgggctacgtaggcctactacagaaagaacccttcagggtctcatccgcaacagcaatgcagactttattttcttgtctgaaactaaggtggatgtgaaagcaatgaggttggttactaatcggctgggattcattaacttatattccctctctgggcattgcaggttgcttctgtgttgcatggaagaggggagttaattgtcaagtagtgaaaatttatgatgatgggttctgtatttctgtctctgctgaaatgggggctcctacttggcgcttgttctacgtatatggtactccgtactactc

SEQ ID NO: 96910 - DNA, 783 bp, Cannabis sativa
aaaagcgagcacacatcctatgaacattctaaacaaaacgtttaggaagtttaaacaaattcatagtgcatatgtaggaatagactgaatgacgaccttgatcagaatctccaaacttgccatagaaaataatttagatttccaaccattgagttttttccaaatcctatctcaaatagaattgaacatgcatgctttgttatggcccacaaaacaaggaagaccgaaataactatcatgaaaatctaccccaacaacacctaataaatccaccaatatttctctttcatgccttgtatcattgggactcaagcacacaactgacttagataagttaacaagttaacatgaagcttcaccatatatacaaacttagaagttgcttgaatctcagacaacacacatgagaagccttgaaaaaaaaaaaataaactatcatcaacgaacaagagatgggaggtcattgggccacctccaccacaaggaaaaccaaatagaaaactattatcacaatctcgattcaccaaacccgaaaggcccttcacgcaaagtaaaaataagtaaggagacatgggatctccttgcctaaggtcacgttgaggagtaatggagccaatgaccttcccatctaggagaatagaatattccgccaaaaagatacaattaagaacttttttgacaaatccacatgaaacccaagcttcaacatgatactctctgaaatctccactccatcctatcatagggtttaaacatctcaagtttaagtgtagaaaaccatca

SEQ ID NO: 96911 - DNA, 1294 bp, Cannabis sativa
cttggtcaagtgtagggttcagcagcgaacatgactttcaagcgaaggaatggtggaagaaacaaacatggtcgcggccatgtgaaatttatccgctgttccaattgtggtaaaggtggaaatggttcaagaattgtttatatatatgtatattttactttttataattatttattattgttaattttttttataaaattatatgaaaaataataaataaaaattattttgaacatttaaaaaagaaaaaaaaaattaaatcattagtattttttttaaaaaaaaaaaaataatcattattgtaaaaaaagaaagttgtcacatttcattcctatgtcaaccaaaaaaagtaatattcatattcctaagcatcatcataacattactgcatgtaaccaaacacattaatgttgctttcttaggtttataatttctttcattactctcccagcaatgttaaacttactcccatgaaatgaaacctgcatacgaaacggttttgaagaataagaatagaatatgtcggtacgtgggttttgcaccaattttcaatttgatggtataggtctaattttcaatttcagtaataataggcctatttgagagttgatcatcaacattcatttattaatattattaattgaaaattgtcaaatgatgatggctcttgttttccactaatattaaattattattattattaaaataataaattaaagtaatacacaattttttagatcctaattgagtcctcttgatcggataaataatttcaccatcaattataaaatcacaaacatcaaattctcctccatgtttctgatgatgattaagattaataaaagggcttagagtattcattcacttgtgttcattttctctgttcagttattcttgcttaagtgtcattttaatttctaattgtattctgttttatttttttggtttggatcatcttgttacactattatattacataacaatgagagttgattaaagttgaactataacccccatataaagaagttccatacatttttgagttgagaattaggtgttctttcttttttattgatggtataggtctaattttaaatttcaataataataataggcctattttagaaactacaagaatatatgtaatggagggccataatatattacaattaggtgttctttcttttttattgttgtacttccttatgttggacttatgttgcaatttaagttggatttatgttacaattaggttggatttatgttgggttgtaatattttgaactaatatatt

SEQ ID NO: 96912 - DNA, 722 bp, Cannabis sativa
  modified_base (647)..(654): a, c, t, g, unknown or other
tctgagcacgctgaagcttgcccacgtgaccctacatacgctcgtccctgatgctgtagacgccgagggagatgttgcaggcgccgagggagatgctgcagctgaccgagaaaactcgatcaaggaggttgcaagcctctcgtgcgcgcatatgggttgctagcagcctttctgggctgcacgtgcaacctcctaagcagccacctagtttcagcccaaaaattgatttttgggtgattttttatcttcaaattcataaaaatcaaaataaaatattattttagtatatttaaacttaaatatcaattttgtaaattaataatatttaattttaatagattattattaatttctgatattttgaggtttaaatttaaaaattgattattttatttttatttatggtgagattttaatttttttaatatttatattttatttaattataaggttagatattttaatattaggtatattttaaattaaatgatagccttatcttttaatttgaaatattatattaaaattgcattatatgataaattaaataattaataaatttgaaattaacctagataatttttatagaaattctaaccataatattttcaaattaaaaaataggttattttgttaaatatttaatnnnnnnnnaattataagttagaaaaatgatactttacatctttttacttatcagaaatttataaatagtattttaa

SEQ ID NO: 96913 - DNA, 527 bp, Cannabis sativa
cagccaattaaatatttatacagtttatgaaaaaaaaataataaaaatacatggtataattcaaattgtattaaattctctctaaaaaatgaagctaaacgaaacagaaggagctagacaacgaataagtaccaccagtaaacaaagaatactattatttccgatgaatcaatctgtgaagaagaaaagtatcaaaccaaaaattaattattatcgattaatgaacgattctgaaaaataaaaaaattgtttgaaacaattgaaagtttccaaagctcttgctgctatattaatggttcctagaggtaatgatatttatttaattatttcaataattcaattgaaatgtttttggttttaattatatgataattgaaaagttagtgaaaggtgttctagaaaatcaaatattattttttgtgatgatttctacatatatggaacaatctttaatgtctttgatcactttatttttatatatatattttattttttttgttaagtcactttatttatatatattgaat

SEQ ID NO: 96914 - DNA, 680 bp, Cannabis sativa
tgctgagattgttagctcaggggttcttgccagcttctttgatggcaaaggggtctctaaatctaaactaaaagccattcttactcagatttggaaactcagggggaattggaagttcaagacaatgaagccaggagtctggggcattttcttcgacaaaccagaggctgcgctgaggttctacgtaatcgacattggatcattaatggaaaactcttgatccttcgagagtggccggaggatggtgactggtacaatgtggatatgaggaaagctatgttctgggccattgcctcaggtttgcccaccccttacctcaacggagttaactcccgtacggtggcatcaaaggcagggaaattcattcggagtgatcaagcagacacaaggacagttgttcgaagaggatttttgaaatttcaaatagagattgatacctcatttcaactctcagctggttttttttctggatattaagaggggaaggaaggagtggattcagttcaggtacttcaaactccctaagttatgctacaattgtggttatcttggacatgataagaaggcatgttttcgatcgacagccttagctttcccacctgaaggagatgcggtcccagcttatggtccatggatgaaggctgaatcaacagtgtttagttgcttcaacactagaaacc

SEQ ID NO: 96915 - DNA, 590 bp, Cannabis sativa
ttgaattcatggctgttgggattggtttgtgagtgaggaagctaaaagaacttagttttcttcacttgagcatatgaatttgaactagagattgaactactgtactttacagcttgggttatgctatatttatgctattatactgttctggaaagtttggtttggtttgaggagttttgggtcgaaattggagaagagaaacttttgttcctggtctgccagaaccggtcgaccagttggttctggtgtaccagaagtggtcgaccggttgcttgtaggggaaatttttcgggtttcctttaggttcagttttggcccgggaagttgtgtaccatctgttttgaagtaaatatgggatgcttgacctaatttggagttgttgggcgttaggttatgtttgatttctaaactagggttttaatccagaatttcgagttaaggtatttattgtgtttcaattgtcgtgacataggaccgaattccctagcttgttttccactcggatcggcccgtacacgtgacttctgaactaaggtaagaaaagtggtaagcactgtatgtggataaaagattaatggttgaatggaagt

SEQ ID NO: 96916 - DNA, 608 bp, Cannabis sativa
gattacgtcttttaaatagtttttttaatgatatccctgatgggatgtttcggtaggcctcttatctatttcattatttatgagagttttttaatttaattttttttcataatatgttatagttatttaaagcacttgtaaatttttagaaaattctgaatagtttacaatatcaaaaataagatttacatattttgttgcacacgagactgttttttcttatacttgtagtaagtaattggttaaactttacttttggcactgtgaactattcaaaaaaaaattaaaatttacaaatagttttaaatagctacaacgtatgcgattataaaaaaaataagactaaaaaactatatcctaaatgtcaaaacaaataagaaatctactaaaacgaccatttaaggggtccactacagaaatttcttaagctttattagtttatttcttttttaacattttaaagttaccaccacaagaaggaaaaaaaaaaaaaagaacaactctctttgagtatttttaatgaaaatacaaagaaataatcaaagttaaaatatatatagttgacttaatgaaaaatattctcaataccattatatatatatatatat

SEQ ID NO: 96917 - DNA, 528 bp, Cannabis sativa
atttgtatgattatttataattttgtaacttaaaatttttatttacgaaatacatttacaaaaatttaaaatacaaaaatagattttagttagcaaaatgtaataaaaaagacaactaaaaacaacgaaaaaatcaacttcacaataattataaattaactataaataaactatataacaacaaaaaacaatcaaaaaaaaaaaaaaaaaactcacaacaactataaataaactacaaaataactaaaaaacacaatttattatttttattgaaaatatatttttataaataaaaaagcttaaaaaaaaaattgtattaaagtattaaaattataggttgaaaaaaaatagctatctgctagggcttatgtattttttagaataattgtataaaaaattatatatttacaattaataatttttagaacttaaaattatcatgatcaaaataattcgctgtaacatatataaacttttatatatatagttaataatttgctatagcattaaaataatcaaattacttga

SEQ ID NO: 96918 - DNA, 560 bp, Cannabis sativa
ctgaatttcccttgaaacaaaagatccttcatgtcagatcttttatatctgattctgatctgatcacacttcgtgtgatctaaaccttatcggtcagagtgtctaaactgatatatctcttcatttaatccctgggaacctagttcgcataacaacaaacccctactcccatatcaaatctaaagtggatctaaattccaaccaaaatgcttttactaagacccatactatggccatagccagaagggatatttaaccattccaaccataacttctttaccatgtcttcttgcagatcgccaaacctaacgatcaaaattaggtaaactgggcgatggtgttaaatataatcttacaccgcatacatggaaatttagacatgttcttatatttgctataatatagataacgtgtttcctattatgctttcctaatcatgcatagctgaaataaactacagaatatgtaaaggcttactgaattgtgagtcgagcttatctccaatgatgattgtacatatcttgacggtcttcggagaacaacctggtggctctgatacc

SEQ ID NO: 96919 - DNA, 2233 bp, Cannabis sativa
attataaaaatgttttttttttttgaacatgcaatcattttaatccgaaactttttcaaaatttaaagagtttaaagaaatagtagaaggagagaagtcgggaagaaaattcgatgcctctgaacagacagcggcgccggtgaattcacaggttggaatctccgcctctgcattctccgaacgctgcttctttttactctctttcccttgctttggttcatttctacccacttgcaggccgacttaaaacaatcaaagcagaaaacccatcttcctaccttgtttatgtggattgcaatgacagtcctggagccaaattcatatattcaactctagacctaacaatatctgatatcctttcccctactgacgtgccttgtaagattgtgcaaacgttgtttgatcatcacaaagctgttagtcatcacggccacacaatgagcctgctttcaattcaagtgaccgagctagttgatggtgttttcataggctgttccatgaaccactccgttggtgatcgaacttcctattggaaattcttcaacatgtggtctgaaatcttttgaacacaagagtttagtggtaataataatattaactctatctctcgcccacttattttgaaaagctggtttttagacggtcatggtccaatcatcaatctcccttacactaaccctgatgagtttattggccgattcgaatcacctctattaagagagagattcttccacttctcagttgaatcaatagctagattccagcggcgccgatgaattcagaggcgccgctggaatctccgcctctgcattcttcgaacgctgcttctttttactcttaaaaaggcttttgaacatcttatttacggctcctttaatttcttgaagcgctccttttcttttggtctcttggtcgtctttgaacatcattaaactcaaagcgatatgaagatgatttggtattattggtgtatatctcatgttttgagttctctgtacatcagaaaaagaagatcgatctcctcatacttagagttctccgtacattagacaaagtagaggtgggcccactctatttccataaatgacttatttcacattttatttattatactgattttttactttttacttgttactctctgcaacctatggtaacgtacacacagtataattgattttgataagactatttatttaaagtcctcttttttttagaaagaaaaatatatttatattggtttgacttttaaaaggaagagtatatgattgtttatttttttggcatgatattatctgcaatttatatccctttctaatcgaatttaaaatctaatattctaatttatagccattaactaatgtttgtaaaccactttagtcataatctatctatctatatctatgtagggtatgagcaatttccttcaattttttttgctctcatttgtttacatttttgttaatttttaacattatttaattaaaaattagtggcttttcattcttataactctcattccatcaaaaaaaaaaaatcttggtctcttttactcatttcgttgtttggggtaatctaatttgaattcacatttcaatgctaaaattgttttcggtccattttcttttttgatcatatgaatttctttgattttgttgtttggattaataatctgattagaaatttgatactctcaacaaaccaaagttatggaattcatccatttcagtatacatatttttcatatatatatatataggtagatttacagtgaatgaatatctatataaaacaaagcacaaacaaatgtttatgttatgtgaccttcttcctttaatctctattgtgtctcaatttttcatgtttaataagctttttaaactatttttctcagcattcatgtataatgtttttcagttaatttagttgtttctcatttaattagttttatattattaattatgaaacttttttctccgtttaatttctatgccctttctgcccattttactctcttcctacactcttttgttatggtgcatttagtctgttaattaactctgctcataaactctctctttgattatattattgtatatatatatatatattatgtgtgttcggttgcttataaatttatgaaaagacaatttttgaaaaagatatttgatttttgtaacagttttaagttgataatatatttgtgctgttctagattttttcagcacccaaa

SEQ ID NO: 96920 - DNA, 1353 bp, Cannabis sativa
gtatgaaattctttaaacgatgagtgatcaaaccaattacatctttaccatgtatagaatctatagatggttaatctataaacaattgagcggagacatcattagcttaatgacttaatgattgctatatgttcccaggttatagctatttacaggatcattgattattgagttggttttatgtgtatatgggcttgtaattttgaccactacatgttgccatctctaggtattggaaaatgtctcttttggtgcatcctgataaatgcactcatcctcaagcgcatcaagcatttatcaaattaaacaaagcatttaaagagctacaagatcctgcaaaggtgagtttttttgcagacgaaatctactccaaaattagaaaaagataactttctacacgatcaattttcaccgtgacatgtccttctgttgttgtcgtcgtttagcatgtaatttggtcttcttttcaatattgctgtctttttgtagcggcaagcactggatgagaaaatcaaagtaaaggaggaacaagagaaatttaaggtaaaagttctaacttcaatgttacaactcggtctgattgtaattgagattgatgtcattgctgatgtttcattttctcttcccctgctttaggttgaattacgagcaatgcgtgaggctgcccaatggagaaggacacaaggttagttgattgagggtctactgctatatttattttcttactacatgtttgagtttagtatgctaaataacaagttgaactagtacagttttttcataatactatcgagtgaattaaacttcaggttttagaaccaattgaatagatggcattttgtaatgttattttcttttaatgtgttgataattcatgattttgtacttgctagctgatcttactaagacaccaaatgttttggcaggtatatccatggagggggatgaggagctcctcgcagagatggaagttaaagttgctcctcagcgagacgagtggatgacaaatttacctccagagaggaaggtaaggtctcggatcctatatttcttttcatgatataggcatcacatttctccctccacagttcataattttggagatctcattgtcatcggatagtcctttcccgcacatccagtaattatacatgagtctgataaaatcaattatcaaaacttatcattatgatttattttgctccctatttctgttgttagaaaggatgagtgcttttaacttgtttccatttaaacaaacgcttgagtgaaactgaagcttcatataattatattcagccatttttttaatataattataaatttttgccaaggtcataatgaaatgctgtt

SEQ ID NO: 96921 - DNA, 525 bp, Cannabis sativa
  modified_base (362)..(362): a, c, t, g, unknown or other
agtgagaatggatcactatttataaggctacatgcttgagggaaggttttccttttgcttacaatgtctataattggtatgaatatatacattacatatttaggatacacagattgtgggatttggacagcttgccatatctgtgtgatacgatccctgatttatgaggattgctattgtgcttcacaatgcaaattctggaattgctaagtgttgatatgctgctcggattgtccactgctcgtctaggaggacttcgttcgtgcaggtatatgcggtgttctgttcggaacatctcttttgggtagttatgaagaattggatccatgtgtcacaagcatgtgatgccacgtcagagtgcnaaaattgggataacatttgccccccaagtctgtgcgggacttccgaagttgcgcggagactacattcgagctgactttacatttgaatgggtgacacgtgtcgactgcatctgttcatgattcgatgtgagtctgaccaagcgtcccttcggttttcggctaa

SEQ ID NO: 96922 - DNA, 634 bp, Cannabis sativa
  modified_base (347)..(371): a, c, t, g, unknown or other
atgtgaaattgtcagaaaaaaaaacttgtcagaagaattaaggaatgtacgtctctttctttgaaaataatagttagaaattaagtagtatacggtaaaatgtagtgaaatgtatataaaatgtttgagtacaatgttgaaatttagaactgaaatgttgttttttattttttcgttttaacttctaaccacaacattaaaagttaaaaaaatatttataatttaattacttacctatttaactgttctattggagcagttttgtgtcaaatacaccataaatgttttttctttatggagttggcctaatcctttatcgagtgatgtcatattattattattattannnnnnnnnnnnnnnnnnnnnnnnntattattattattattaatttatcaatattaagagtgctacagttgcttcccattagtctaaccgtagagcggccccaaagaaaattatcatatgatccacaattgagaaataaaatgaaaactgagctcaaacagagaatacaaatttgagaaccaactcctacattatcataacatcatacaataaaatcaccttttacactacccatttgagaataaacactacgaatttcaaccggtcacaccatatgtctatttaagt

SEQ ID NO: 96923 - DNA, 573 bp, Cannabis sativa
gaaatgattatatatatgattctatattttggtaaatactaaatttattatgtatgttgtgttgtgtacatttattaattataatcttattatggtcttgcaataaaaataataatactatccaaatttctgtacaattatattatttatttggttgaacgtgaagcatattttcttgacggataatattatgatacttcaagtcacaaatagaagataagatgtcggaacaaatatatagtcatccgactagtttttatcacacgggttgtttgcatgtaccgatcatggaatgtgagttagtaattttagagatatgtcttgcatatctttcagtttgcaaatcacggcataatccctacatgggatagatttgaaacttcaaagaataaagataaccagtctaagcttcccactttgcttattgtaattatggaaataaactagtttcccactttacttattattggtttagaaaaatcaatttcatgtaattaattcctataaatagtggttccatctcaccattcaagaatatgaaatatatttagagagagaacactcaagagaaaa

SEQ ID NO: 96924 - DNA, 664 bp, Cannabis sativa
accctactcctgatggctagttatttctaggaagctgagatccatggagctatcattgatcaagaaactcaagtgagtttgatctttcatcattgttttgaaacatagaggtgtcacttgacattctccaatcaatattttttctccggcgacgagagcataaattaggtagatggcagcgttttattttcttttcgttaagtattctcattgctgcttcatggtgcccgttctttcattttcactgctgcattttcctcgtgtggcgttggctttggttttacacagtcatacactaatctttgtatcgagatttctctgtaatgggagaataatacaaggtttctttttttttttttatgtggcctcctttatttttctcgttgagtccaccaaatttatacaaaagcccttattgttcggactgtaataaatctcttgtccattaatggtagtgcgggtatttaagcatccattgatcctacagtttacatctatcctaattttcatgcgacctttgagatctttcaaggtattgcgactctcaattttttttttatatttgagattgtgtgacaatcttccatcttctcatggtttgattctgcccctggtattcttgcaataatgactcttcttgttgtcgttatttgtaatatttgaa

SEQ ID NO: 96925 - DNA, 654 bp, Cannabis sativa
agaacttatatattaaacctataaacatgtacgaaacatatgaataaagcatatgacaaagtcaagatatgattcttgatccttattgaaagtaaataagattacaataaaattgagttttatttagggaataaaatctcaacaaactcccacttgcactaatataaaaccaaaagtgcatttcaatttaatttatatacttgatgtccttatcaagtgtagtatttggcataaactatgtaatatgatctgataagttgtattcagtatcaatccactccatcagcatattttccttggtcacaaaaaattcataattttgtgaatttcccatccgtatattttactcctcttaaggtaaaagactatttactatttggcaattgcatttgtgttatcacaaagtcacagtagtaattatttcatgtttggaattatgcaaaagtttttattgaaccttcctgagtttgaataattccttaattgcctttagggcaaccttattattcagccatactggaagagttaatgattttgaattggtttttacacttctctgaaattcactgctccacctccaaagtaatcactatctcatatcaaaactttctagcattgacaaaagtctataaatttgatttggtgtagcctaag

SEQ ID NO: 96926 - DNA, 754 bp, Cannabis sativa
attttggaaaaagtcaaaatatagaagctttagatctcttcttcctctttccaactcatcttaaatcaactcatttggagtttgtatgtgaaagttatgcatattaaactgaaagatgctgaagttgtcaatttgttttagtagtcacgaccaccattttccatgcccgcgaccctttttcatggtagccactatagtcgcgactaatgattttgggtggaaagcttgtttttcgaaattaccctatggtcgcgactaggctttaggtagtcgcgactatgggctaaagatgagattttagggcagttttgtaatttccccattcgaagatatcttcattatttctatataagggttttgtgttttagaggcaaaggaggcagaaattaaaccctagagctgaagaaggaggcaaagaaggcaattatggcgacccggagcaagatcaccaactagttctttcttcccctgtttatgtctttatgttaatttttgtttcaatttttattaatatgaacatgagttttttaaactaaattcccaatttagtaatatgatgaatgtcagatgatgtttcttcaatttagttaatgtgattattagtttttcttccctatattgtgtgatttgttcttatttgttttaattacatattttagactggtcatcttgaatgtgatttatgatcctaatatgaaatctgagaagtgaatattagaaataatcttaaaggacaaacataagttttaatgta

SEQ ID NO: 96927 - DNA, 941 bp, Cannabis sativa
tggtgaaacacccatctcgctctcttacgagtgcgaatccatagtgccagtcgaggttgggacaggatctctacggagagatgtttttaaccttagtggtaacactgaaaattagttgtttcaactcgatcttctagaagaaaagtgcgatcaagctcatttgaagaatgcggcctataaccagtgaacaactcgttatttcaactctaagattaaagaacgaactctacgagtaggctatttggttctgcggaaggtcatgccaaacacaagaaactcagcacatggagtttttggtgacagttgggaaggaccatacctcatcgttgaaaaaattggtagtgcgaacaatcaactattagacctcgatggaaccgcgatcaaaagagcttggaatagtgaaagtttaaagtattattatcaatagtactagcactgtaattatacttagctaatttttttttgtaaatgtcctcagtatagggggtctagcctacctttatactattgattattataataaaattctctaagtttttaatattctcgaattttaatttttttgcaagttgagcactaataatctgaatattagattatatatgattatgagggatgtttatccttgaaggaaataaaattaaacttagaacacacctcactccctaccatccctctctctttcgaaacacttagaaccagcaaggggaaaagagctttcagctgaaattcaagatatttcaacaacggttaggagttcaattcaaggtataacactttagttgtcttctctatggttttctttagctcaagataggtttatggcatgttttttgtgatttgagattctgtagctgtgtagctagtttgagtttgaattatggggttaggataggtttatttaagttgttttgagctgagatagttgcttgtagtgagag

SEQ ID NO: 96928 - DNA, 871 bp, Cannabis sativa
aaatctacccccaaacagagcaggtcggggttcttttatttctctcacccggacaacaagtggctgacgggcaccgtggagacggaggttagcaaaatttggcattttattaacgagtactacttcgtggccgatattgggactgctcatactcgttttcagcagatccctgcatactggcgtcctcccttcacactggggcttagggaaagggcccagaaaattctccaactgctggaggctgcctgaaatattaatttgtcgaccacagaggccaactttgtgaagtacaagctttatccagccgattttattcccaagtctgtgaaggagaagaagaagaaattcaggtcaggccacgctgagggagtcaagtaagagaaagagctcattcaattgaagcgtgaggctaagttgaagggtgatgctagagccaaacagtatgctcaagaatattctgagcaggagatggaggctcaagaatattcaaagtaggagaggccacgcaagaagaagaagcctctcctgactaagcaaccgcccatagagcatgttatcactactacaaaaaatcttttttatgtctctttttcatgttcaacaaaaatggtgttgggcataaaatattttttggaagattttatgtccaactttgatggactagaaaaaaaatttatatcatgtccaataatgttggacataaaaaaataaaaggacgttatatatctaataatttaattagataattattttttaaaaaaattttgggtataatttttgtccaatattgttggatgtggtctaggtgaaccacgtccatcagtattggacttgagtgtaactttaacaaaaaggctaattaggatttttg

SEQ ID NO: 96929 - DNA, 661 bp, Cannabis sativa
gctaactttaaagacccgaaacataggctaattataacctaacagtggtggtggtgatgatagttttgaagaagaataatgatgaagaaaaaaaatagaaaaaaaggaaaaaagtcgaagagaaaaagaaagttcagagaaagacaaaagatttaatttttcttttatgatttatttcttaatttttttgctttttaataataattatctatcgggacaaataaaattgtatcacgtgtacattttgtctacattgacactccaacatgacacttaacacaaaaaatagatggaaatggtaatctgctaacagaatatgggtgtttgggagtttttccaccaaaattttatttttggggattaattactagtgaagtgaaagtattaggagttttgtcgtaatttactcaaaataatatacaaaaaataaaaaaccaataacaaaataacaagaatataatatcagaataacatgaaaatatcagaaaactatattttttgtaaataaaatcttaaaaaccacaaaatactaatactctatacaaccgtatttttataaaaaatttttgttatttttatgtatttgtaaaataattccttactaaatacattaaataaaaaagttcatttcattcttgtgactgaatgccattacatcact

SEQ ID NO: 96930 - DNA, 556 bp, Cannabis sativa
ctgggtttagaaaacccaaattttgggttccttgaaaatgctttaaacaaaaccaaatcttacttttattatgcatgtgatgtctaagtccacagcaaaatgaagcaagtatacacaatatcttaaaacaacacttgctcaaataacatataatcaagctcaactaaccacatgattcaaaaatcaaagctttaagaaaactaactcaaaatcaagcttaaactcaatatttacacacaaaatgctcaaaactacatgacccaaaactcaaaatatttagagaaaattatattatatacccattttaatttacttattttaatttttacgtttacttttacattctttaagttatacccatttttataaatgatgttcccattacaccctttaaattaatgtaaataatgtgttagacttaagtcgaagatgaaggtatattaggtaacccacttataaaagtaggtacaatttaatgaaatataatataagagtattttttattaatgaatacaaaaaagaggtatttcttaatttattcctaattattatggag

SEQ ID NO: 96931 - DNA, 657 bp, Cannabis sativa
cgaacgaacacctgagccctttcattgaactcagtgatgtttctcactggacgaccctgtaagtcgtcccacagttttcccctaacggttgatggattagtatagatccccgcctgaagggcggtaacttgtgtactatcatccaaatttctaactcttgcagcagccgtgctaaaacgacttaagtatgccttaagtctctcgtcgggctattgctttacattggttagcgaggccgctttgggtcgtctatcccttacagcctggaactgtttcttgaaatctctggacaactgttcccaggaagttattgaatggtgagtaaactcattaaaccaactgcttgctgctccaacaagtgaggtgggaaacaagatacagcgtaaattgtttgtcacattactagctcgcattattgtgttgaagttgttcaaatgcaagaccgaattggtggttccatcatacgaggagacatgcgagtttttaaatcttgaggtaaacggggtattcatgatatttgggttgtacggctcaagctcctcgtctgagtcgtatccagattgtctccctaattcacctacttaatatctcctaaacttgtcctccaattcgtctattcgcaattagataggatcctcatgctttcgaccgagttgt

SEQ ID NO: 96932 - DNA, 511 bp, Cannabis sativa
aaagacaaccaaaattctttagttggtgataatttggaacatgaccaaataaacgtaaaaatggtaagtcattgttaagtgcaagagtagggagacgatttataagatacgttgtggtagcaaacgcatgaggtaaaaatgtcaagggaagatgagcatgagatagtaatgcaagaccagtttcaactatgtatttgtgacggcgctccgtaaaaccattatgttctggcatatgaggaggtgaggtaagatgggagataccatgagacgttaggtagggattaagtttttcatattccccaccattataggaaaagacttgtattatttgtttcttgaagaatttttccactagaccacgaaaacgaataaaggtctcaaaggtattcgatttctttttaagaggatataaccatgtatatttagtaaagtggtcaacaaaaatcacatagtatttaaaattgtcatgagagtaaataggagatggccatacatcagtgaaaattaattc

SEQ ID NO: 96933 - DNA, 1482 bp, Cannabis sativa
agctttgttatggagggatgcgagtgaggtggcaattcaagggttctccttaaccacattgatgctacggttcagcagctggggtcttccccttggcatttcacaggagtctatggagagccaaaaagggagcttcagtttcagacatgggatctttttcgttctctcaaaaatgacagcaaccttccatggtgccttatgggagatatgaataatttgagttctcattttgagaagaaaggtggtaggaaatacgctgaccgaataattgaaggttttattagggccttgggtgattgtaatttgattgatttgcctcttgttggatgcccatacacttgggagaaagggagaaacatcagtgattggattgaagaaaggcttgatagagctttggtgactaatgagtggctgtctttattttcacaactggttcttttcaatctggaattctcaacctctgatcattgcccgttgcttttggtcttcaaaggtaatattccaactatttctcatcactcttttcgctttgaaaatgcttggctctgagaacctctttgtgagcagcttgttgagggttgttggatgggttcgggtattattaacattcaagagaaaattcaaaagtgtgggaaagtggggtcgggatattacaggaaatttttgtaagcgaatcaaccattgtaaaagccaaattcaaaactctaaatggggtagagatctgacttcaattcaacaacataaggaagggaaggataagatgtctgaagttctggctcaacgagaaatcttttggaaacaaaagttgaaacaattttggcttaatttgggtgacaagaatagtaagtatttccattccattgcaaactctagaaagagaaataatagtattagtcagcttcaagatagcaatggagtttgggttaattggaagtcggggttgccaaatatcataacaagctatttccaagacatgtttcgaacttctagcataaatctgggagcggttttggagggaatccgaccttctataaccagtgagcaaaatgaagatctcttcgtgactatttctgaggatgaagttaggaatgctctcttccaaatgcacccggataagtctccaggacccgacggtattccccagcattttaccagaagcattggaatattgttggggcggatgtgattcaatttgtttgggacttctttgattcgggtaagctttcagattcaataaatgacactcatatagtccttatcccaaagaagaaaaatctatcccagatgagtgatctaaggccgatttcactttgtaacatactatgcaaaattgcctcaaaggttgttgctaaaagaatgaagggtgttttgaaccaagctatctcggaaactcagagtgcttttgtgtcgggaaggttgatattggacaatgttatggtagcttttgaagtaatgcactacttgaaaaggaagactaatgga

SEQ ID NO: 96934 - DNA, 706 bp, Cannabis sativa
agtttatatttttttttaataatgtggtgtatttataattttatggggtgaaaaaaaaaactattaaaattgataaaaagggcttaacattttgacattaccgcatcttagtagaattatgagcgaggtatttttgaaagttaggcaaaaattgggtcatttttgagagaggggagttttatttgtacccaccagtataatgttatttttttttctaataaaatttatatatattttttattttttttttctaataaattatattttaaatattataacaaaaaattaaaataaggatatacattttatataaaatagaaaatatttgaaagggatatatttataagttttttgggtgcaaacaaaactcttttttgagagtcaaaatgttgtcattttttaagggaaatttgactaaatatgcctacataaccttaaaattttttccctaaacttataattaccaatatttgtaatctaggtcaactttaatgtcattcctaaattaccctccccatttacatcacctccctctctctcctctcttcccattccttcttcctttttcccacacaagctctactccaccaccacaatttttttttttccttctcttcactcattttctacactagaagctactacactacactacaacactacaagctcctcatatacgaaacatcaatgggtaaataattctttt

SEQ ID NO: 96935 - DNA, 604 bp, Cannabis sativa
  modified_base (347)..(367): a, c, t, g, unknown or other
gaacgcttgaacaagaaaaaaaaacttgatctttgctagtgactcgattcaaagcaaggggatccgatccatttgcggattgacgagttggaaaataagttcaggaggcatcgagttagacagttaggaaaataatcgggatgcgattctgtggaagaatttgagttagaagcttctaggtcaaagaggaaagatgactctaagaggtcgtctaaagataagaaataaaagaaacacgataaatacgtacccatttatactgtctataccgagtttaatgaaacttgggagagtatctatctcgcgcatgaacagaaggtcattttcaataaaccaaagcccatgannnnnnnnnnnnnnnnnnnnnacccaaccagacgatgcgagtaccctggggacattgggcataaaacgaaagaatgtcgtcagttgaaggatgagattgaaggcctcatagcgcgaggacacttccaataatatgtaaaggggcaggacaatgtccatgaccagctcgatctatccagcaacctaagtgacgagggaccataaccttcccctgagggaggaaaagataccctagctatcttaggaggataatatattg

SEQ ID NO: 96936 - DNA, 896 bp, Cannabis sativa
  modified_base (757)..(758): a, c, t, g, unknown or other
attggacatgaaccggcttaggatacttaaggcgtgatctatgtctggtctcgtgctcaccatcacgtacattaaacatcctagaaacaatgcataaggtacatccttcatctcttctttctctttcgtactgttaggacattgttcctttgacaaaacaaactttccctgtaatggaacgaatgtactctttgcatcttccatgttaaacttctaaataatctttttaatgtacctagactgcttcaagctaatagtcccttcttttcagttccatgagattgaactagcccaagctctttcatcttaaattcactcttgagcttggctttaatacttttaatcactgatttattttttctcatgatgagcatatcatccacatagagcaataggaacacggtcgtagattgctctatatttttgaaatataagcaatgatcgtatgcggatcgtttgaacccgatttgatgcatatacgtatcgaatcttttattccattatcttggggactatttcaaaccatacaaagatttgttaagcttgcaaactaatccaagaatccattcaaaaaagtagtcttggcatcaagttgttcaacttcaaactccaaatgtgttgccaaggacaatatcagccttatcgtcttgtattttgccacatgtgagaagattttagtatagtctataccttcccacctgagtaaaacccttagccactaacctggctttaaacctcactggttcattctcattgnntccctctttcaccttgagaatccattttccacaattttcttgttctccggctttggcacaacaacccaagtcttgtgtttctccgtagagaatccatttcctcatccatggcctgaagccatttagacttgtttccac

SEQ ID NO: 96937 - DNA, 526 bp, Cannabis sativa
ctaactccttagagttatctttcctctttgaactagaggctcctggattgtcagctttggttaagacggtgcttgtcgagaaagtgcttggtttacctcctaagccagtctttaacaacttcatctcttttcttacttcctctttttgaacaaacactcaagctctttcattgaactctgtgatttttttcactaagcgaccctgtaggtcatcccatagctcgcctccagcagtggagagatcagtcgtgatccctgcctgaagtgcagtaagttgggtactatcgtccatgtttctcaccctcccagcagctgtgctaaaatgacttaagtaggccttaagcgtctcacccggctgtttctttatgttagtgaatgaggacgcctcggtttgcctatcccttgtagcctgtaactgttttttgaattcattggacaactgttcccaagaggtgattgaatgatgagtaaatttgttgaaccagctgctcgctgctccaactagcgaagtggggaacaaaataca

SEQ ID NO: 96938 - DNA, 566 bp, Cannabis sativa
  modified_base (534)..(534): a, c, t, g, unknown or other
agaggagatgcgactgaagagagaaagctggggattttggaatttttagttttagggatttcacttttttttgcgtcggttattaactctcactattgtattttgcgtcatttttaactcactaatgcaatacacgagttttaataacagacgcaaaatgaaatgtaaatttttaaatttcctacttttttcgtcggtttagtttttagcgtcatatatctaaaagacacaaataacatattattagtgtcatttttaaagtgacgccccaattatttgagtactatttacgtcggtcaacgctatgaatagtagcgttgaccgacgtgaatagtgtattttgtagtagtgaaatatcaaatcactaaagtacccaactgctcttaactatattaaccaactgtcagatatgacggttggtggtcggttgctattattcagctacaacaattgatacttaaggtactattcaaccaatcttgaagtagtgagcttggagaaaataagaacagtaagagagagagagagagaganagagagagagagagagagaacaacttgagagc

SEQ ID NO: 96939 - DNA, 627 bp, Cannabis sativa
aacatgatgtacaattatgaaatcctgactttcataacggatcgaatgttggttctctttacgtgttaattttggaactcgaatgttgtgcacaaatttagatgggatctaaattatatttccactagtgaattattggtactaaaggataaaagaagtaattagaaaggtaaaatgataatttgaccaaaactaattacgaaccaagacatggaagactaatcactgggattgattatatcaatggacactatagtaaaactcagtaaatataactctatgattactatgtgttcgagtcatcatagaattaataaacaaggattatttggtggataaggctcaataaataatctagtttattggaggttagaattataggtgtatggtccccaaatggccaccttaaaacactgtcaatggtagggataaagagttctataatgtcgtttgagaaaatctattttgaattagcaaaatagtaattatttattttttgtaataaataaataatttttccaattaattaaatagggaacagataaaaattattaagacaaaatttgtcaagacaagatttgttaagacaaaagttgtcaggacaaaagacaccattcttgtcctaaa

SEQ ID NO: 96940 - DNA, 930 bp, Cannabis sativa
aaaaaaaaggtagttaatctaaaattgtcattaaatataatatatctaaaacgataatgttaatgctaaaattattctcccatattgaaatatagtaaactaattcctttttctataagcactccacatagcttgagcaatacgatcccgacaatgtgccattactgcagcagattcatctgataaattcagttcatatcttgatactccggtgctagctctttctgtgttgtcttcttcctcaaattctttttcttcccattctctacacatatgatcatgatgtgttcgttgacgaatgaaattataaagagcgtaacaagcaataactatcaaagtttgtcaactcaatctgtaacgtggcatcattttcagtataggaaaatgtgctttcaacacaccaaaatattgttcaatcacattctttagtgaagaatgacaataattgaacaattccttcttaccacgttgttgattacctctttattatattcttgcaagtgatatctttcgccacaatatggtagaagaaaaccttttgtacatgggattgcagaatgcacaacataatattcacctaatatgccaaaaaagaataattagtatatgcatcatcacattaaaaaaaaaacaatattaggctttcaataccttctttgggcaataaaaatttatattctagttttgtaattgcatctataaaatatcctagaattatttgtcgtaccttcccaaccgacagatacaaaagtaaaaaaatatgtcaaaattacaagcacacaagacattttgtgttactacacctttccgacctctgtagctgacttgctcatctttagggacacatgtactcacatgagttccatcaattgtaccaatacaattcaaacaatacaaaactattaattaccgataaatatttatacacaa

SEQ ID NO: 96941 - DNA, 575 bp, Cannabis sativa
gcctcaattatttaattaaaataatattttaaagtaactaaaaataccaaggataagtaatgtcttataaaataccaaacatatcataaaatgtctcataaaataataacgtagcatcaaatgtctaataaaactcaaacgtaaataaatatatttttgtttctaaaattagaataattcagcaataatgacttgatgatttagaaatcaccaaactcatcattgcttgagaaattgttgccctcatcatcatcaccatcataatcgtcactactaccacccccattgtgatcgtgaatatcctcccattcatattcatcaacctttaccaagagcttttgttttgctaagaaaaaaaaattataaactaataatcaataattgattaacataattcaatatgtaaattaaaataagaattagagtttatgaacccccttttgaactactttctgactggtttgaatttttagtcaaatgagtcaattccaattctccaagttgagtatccttattccttggccttgtccttgtcccattttcatcttcactttcactaacaagccattcatcat

SEQ ID NO: 96942 - DNA, 510 bp, Cannabis sativa
tggtttttatcaacaacattgggacactatatgacccgatattgcgcaacttgtcactgatttttttggttccgaatgcttacaacttggtctaaacgacacacatctggttctaattctgaaaaggaagtagttttctacaatgggtgacttgcaacccatcgctctttgcaatgtctcgtataaaattctttcaaaggttcttgctaatagaatgagaggattgattgatcatgttatctcaccaacacaaagtgctttaatccctagtaggctcatctgtgataacattatggtggcctttgaaatcatgcactacctcaaatggaagacgacacgaaagaaggggatcatggctatgaagctcgatatgagtaaggcttacgatcgtgtggagtgggattatttacgtgtggttatgcatcgtatagggttcgctggtaagtggatcaatttatttatgaaatgtgtcacttctgtaccatattccattatacacaatggtcatat

SEQ ID NO: 96943 - DNA, 593 bp, Cannabis sativa
aagaactgactacatgtcatcatctccaagaattcatctagccaagcctaaaacacaactcaagcttatgccaaagaatcaaattcgttagcatatgtacaacattcttgtcagttcaccttttgcacctgaataatatcctctcagctgcttcacaaaaaaagtgatgcctgacattgatatgcttcattccaatgattcacatatttgtcttccttcaatcccatttctaatatattctatgttctaaaagatgatcttttgaatgaaactatcttgatattgttttccaaataaacaatcattcatcacataggtcaaataagttacctttctttaaaagaatgaatttattcttttgctaggagttgcagtcccttttcactcatattactgagccatctatacaatagatttgatgaagaattgactgctacatttaatctgttcaagcaaaaaattcccatgattgtgtacaatgtgcaacacaacaacaatcaatcaatcaagtctttgcagagtttccatcttcatctaaaacagtcatcgagattagattgcggtgtaactctagaacgtgcctcacatgatgc

SEQ ID NO: 96944 - DNA, 703 bp, Cannabis sativa
aacccgcttccactcccatggagatgaacctaaaactcagcaaagacaaagggaatctccttcccgatcctacaatatttcgaagccttattggcaaattaatatacctcacaataacaagacctgacattacttatgcggtcaatcaccttagtcaattcttgacttgtcctcgaattccacacctccaagctgctcaccgcatcttgcaatacttaaaaacaacacctggacaaggattattttttccctcaaacacaacaccgtcggtttctgcttatgctgaaaccagtttatccccctcaaatgttcaagtttgtttcttttctgacgctgattgggggacttgtcaagacacaagaagatctatttctggctattgcctttttcttggcaactcccttgtgtcatggaaatcaaaaaaacaacaaaccgtctctcgttcttcggctgaaaccgaatattgagccatggctaatgcaacttccgaactcacgtggatcctcgctctcctcaaagactttggcatcaaccattccactccggctttgctctattgcgacaacactgctgccattcacatttgtgaaaacctggtctatcatgaacgcactaagcacgtggagattgactgccacttcattcgagagaaggtccaacaaggctccatcaaactactccatgtttcatctcaaaacaacct

SEQ ID NO: 96945 - DNA, 734 bp, Cannabis sativa
gcttgctcagttcatcgctgatgaacttggtgactttatagagatccatcctttatcccttctggaaagcttcggcccataccttcgtcttcgcgtccttctagacgttactaaacccctctgtagaggtatgaatatctgcttccgaagaattaccaaaaccaaatggattgctttcaaatatgggggattgcaaaacttttgctattttcgtggtactcttgaccatacttacaacaagtgtggatgttacctaatgagatgcgacaatttctcatccccctgaacttggctacaaagaagaccttcgtgctatgtcaaaaaatctgttaaaaaaaatccctttgacatgtccaattccaccctcatagaggagtatatgagccgtggcagcaactctaaacatggtctgcaacaagttgttgaatagtttctaaaccttggctcggactttgtcattcctactctttccctagataatgaaccgatttcatcccaaatcttaattgctaataccagctcgaccatgactttttctactattccttccccctatcatggtcacttcaatgattacttatactgacaaggggaaaggtatagcccaaccagatgactctagtttgcccacttccaagacttccaggtcccccaacaaaggcatcattatcctagagccttccagtacccctactgccaccacgacgggggtcaagaggactttcacacgccaa

SEQ ID NO: 96946 - DNA, 504 bp, Cannabis sativa
caagcctcgtgcgataagctccgatatcaaaatctagtggaatatcttttccatgtataaagaactcagcaaatgcagcaacaaaagcactacaattactgtgtaataaaacaataataaaaatagttaaaaataactgaaacacatcaacaactaaaatgtaacgacataaataaaatacacttgttttcctgaccaagagaatcaatctccactactcttagtggagctttcacatcaaaaccaaaatctgcaacaatctataagtataatcacaaatatcaacaaaaaattaattattcataaacgaaacctaagaaatttgtgaaaaacaataaaaacaacaaatcacactacaataagcattcaacatacataaatttaaaacaataaaaattaaaatcaacatcaagtaaaataaaccattaaaaaaagaaacatggttccgaaattgagaaacagaaaagaaacttaaaaccactaatacgaagtacagatgaaact

SEQ ID NO: 96947 - DNA, 620 bp, Cannabis sativa
gactaccaagcggatcaaaatacagaaaggattacactctaacgtgggaatcaaaagacattgaaagcaaagaaaaaaggttcatgcattcatagaaaaattaactaaatcaaatgaatagcgggaatggaaagcttacccacaacaagaaatcgttgatgaagaagatgggaagcttgaatcgtcaaaatagcacaaaaatcctaagaaattgatgctatgtgggtttggccctctagagagaaggaggagcttcttcaaaagttactttctagtgagggagtgaaatgtgaaaagtgaagaagagtttcccctaaaaaacttaaatagtttatgtgggaccattcacttgccacacatattcaacaaagagacatgtaaaaggagttagtttactacaacaaatgagatcagacagtcaagagcagacaattcaaaggctaaaaacgcagcaacttctacgcattgctcaactaaagctataatgaaggaaatagaaccaaatatatttttcataaattttttcttaacacatgattttcaagagaatgactatattagtgtccaacacattcaatcaagtgtcaatcttgtagacttattcacaaaatgattaccaa

SEQ ID NO: 96948 - DNA, 582 bp, Cannabis sativa
gccagatatcgcttttgcggtaaataaattaagtcagttcttgaagtgccccactactgctcactggacagcagcaaagagagtgcttcgctatttgaaaggtactatacatcacggcatacacatctaatacagtgacaaacttcccattgttggctactgtgatgtagattgggcatgctgcccagacgataggaaatcaatatccggttgctgtgtgtattttggtgaaacattgataacttggtcatccaaaaaacaaactgtggtagcacactcaagtaccgagtcagaatatcgagctttagctcagataacggcagagataacatggttggagtctctggttaaggaaatgaggttcaacttaccttccacactagttatctggtgcgataacatgagcgccataactctagcttcaaatcctatataccacgcaaggactaaacacatcgaactcgatgtgcatttcattcgggacagagttttacaaaagaaagtggaagttagacacataccaacacaagaacaagtggcagattgtctcacgaaggccttaactcatcctaaattttaggt

SEQ ID NO: 96949 - DNA, 945 bp, Cannabis sativa
  modified_base (44)..(48): a, c, t, g, unknown or other
taaaattgtacaaaatagtatcctaaacttaattatatatatannnnnttattaatataaccaacttgaagacaatttctagcaagagtagatacaaaaaatatactcagttttgtcataataactcgatgattgggttataattaatttttattttgacaaaaaatcatatcaatgtattattttgtacaattttaaagaaaatagggtctaatttattatttaataaaataaaaagtctaatcaattacttttataaaatataaggtaaaaagaaattaacattataggagcttgaacacttgctcccaaatatccaaacacaaccattacaccaaatagatatacaataattaattaaaatacctatataattcttttacttatttttaatatgcgagtatgaactacactataccacaaggctataagccgtcgagagcccaggctaaggagcaaagcgcacttgaacaaatgtgagagcagcgaaaggttatactcttcctcatgtttcattattcatattttatgtcgtaggacataatattctagatatctattatgaatcgttatcgtcttcttacttctctcttaactccaatcaaattcgaaaaatgagaaatcaattaaaagttagcggacctaaattaatgaataaaaaaaaaacaactcacctcacaattaccctatttttatttcataattatttcttttgctacttctctatagacatagcgatttagtttaggaaatctctcctagaactaaacataagagtttgctcgtgagatacgagtctagggcaaccatctcctcttatctccatgtgagtctaccacatatgatatatgttcattggatcacatttaatggatttggacccaactaatccaatccaattatttattgggtattggattttgtcatccgatctaatccaatcga

SEQ ID NO: 96950 - DNA, 685 bp, Cannabis sativa
  modified_base (582)..(594): a, c, t, g, unknown or other
  modified_base (634)..(642): a, c, t, g, unknown or other
tagcatctgatcacctcgcaccactcccacaccttctggtgtttggaatttcagtgataggtgcttgatcgaactaactgcccctagtccgatcaaggcttgacgacccaacaatatattataagccgatggcagatcgacaactagaaagtctagcataactgtggcggataggggtacctcacccaaggttaatgcgagcttgattatgccttgactggcaatactgtcacatgtgaagccgcaaagatttaccatgcaagggttcaatttagcctctttgagctccatcttcttcagcgtttccttataaaggatgtttactaagctcccgttatctatcaacaccctctttatccttttattggcgagttgaatagtaatcaccaatggatcgacgtgaggatatctcatgttcttctcattttcctccgtgaatacaatgggaggctcctcaatttttgccttcttggaaggttccagggcaaataccgaatgttcatcctttatttccttcacatatctcttttgggcattattgctttcccctccaatatgctgttgtgttttgtgccctaaatnnnnnnnnnnnnnatataatcagatttacttataaagatcagaaataacattnnnnnnnnnatggttcacataatttattttatgattatatgtatataatgta

SEQ ID NO: 96951 - DNA, 572 bp, Cannabis sativa
taacattatattattaccagaacactttgaatattattatatctacacatatcaaattgatcaaacaattccaaataagtatatatcaataaagtcttaattaaattacaacaatatttatttacacataacaaagtgtatcaaatactagtcatttgtaattagtatttttaggtggtttgtatgaatattgtatgtaaaaaatatacgtaatatgtaatttgagtgtgggtcaattattatcaaatatatattatgaatataatgtatcatttctaattataatataaaaaaaatgttagttttctctttttataattaatattaatttgttcttataaatttaatttcttactagttactatactttctgatacacttaaacaaaatatttaaggttggctgaggttaattagcaatattcatatattgatgtgaatcatatattggagctaataatagaattagctatatttatatatgtcagattatatgtatatatatatatagattaccccaatttaagagtagtgtcggagctatcaagatcttcaggattggaaatagcagtg

SEQ ID NO: 96952 - DNA, 516 bp, Cannabis sativa
tggcacttttcactgagtaccaactctgttggtcaaaactccaaaaccaacaatcatcattaagaaaggaattaacttgaatggatagaattaactcttggttgcctatcaaataaattagatattatgtccaaaatcccaagccttacctgcaatgcacatgagatttcctacagtttttccacagggtgttcagacatcacaaatggatttccctacattaagccaaggttcattgagaatactgatagagtaaccatcttgtactgttttgtgtacccctgccaccaatagcgattaagcttccattatactttgccaaatgaagcttgggttcacccccaactttgcagtaagaaaagtatcgaagaggaaatatcttgcgttgtagatacggttaacaagcgagtctttttgagtgagcaatctccacccctagttacccaatatagccaaattaaagtcatgaaaattgcgaaagcctaaaccccctacatgcttgtgccgacataaacg

SEQ ID NO: 96953 - DNA, 931 bp, Cannabis sativa
  modified_base (248)..(249): a, c, t, g, unknown or other
  modified_base (884)..(893): a, c, t, g, unknown or other
taaagttttttggataattttttgtaagtaaattgatagtgtggggggttttgccacaaattactctaaaatatatatacacacacatgatatctttcaacgtttatagttgaagtttagtgcaatgctgaatattttactattattattattattattttgagaaatcaaaatcattgtatatttgtattgcataaactcaaatttacaacttaattgcactattacggcctttataatctattcannttgtagaatctataaaattaattgtgttgtaaatttacaattgctcaaaccattccaagtctttttatttcattttttaggaaaaattaataaaattctaactttcacctcatctcgaatgcagaaaataggagtgttcacgaattggtttggtcccaatttttatagtttttgaaccaaaccaatataacagtttttttaatattaaaaaccaaacgagaccaataaatttctcaaaccaaaccaaaccatccaaaaaactatcaatttagttacaaaaaatcatccaaaaaacttttaggttggatggttttttacaagtaaattgatacttgggagggttttgctgcaaattactcttaaaatttttatttttattttaattactcattttaattttaattttgtaaaatatggtcacgtagaataattttttagtgacttgtcattgccacatcgacaaaattaggacttaatgaggcttaatagacaacaccttaaaaatgtaaacggaacaatattttggagggtttttccactaaaatatgaggttgaatagtttttggcaagtaaattgatcagtttttaatcagttttttgtttttaaaagtgaaaaagtgaaaatatttttcaannnnnnnnnntataaaactgtttttactttttaattttataattagaa

SEQ ID NO: 96954 - DNA, 905 bp, Cannabis sativa
tttgggtcctaggtcctagtttgattccaggtctgggttctggttcaggtcccggaagtgtccaggtccaagtctgggttcaggtttgagtccgggtccgatcccatgtcttgggtctcaagtcccggtctaagtctaggtttgggtctcgatctgggtctaggtctccatttcggtcccggtcccaatttaggtccaattcacgggttagaggtcttggtttgggtccaggtcccagtttgggtttggatttggttgttttttctggtcccaggtttgggtcctggttcggtttcggttttggtttcaattttgggtcttgggttcaggttggggtcttagtctaggtcggggtctgggtatgggtttgaatctcggtgtgagtttgggtcccgggtctgggtcaaggtccgagtctgggtccatgtctaggtcccttccctatttgggtcctaggtcaggttcaggtgtctatcccgatccttattcagtttttgtgttaggtctaagttccggtcccaattctttttttcggcctgggtttagggtttagggtatagagattagggattcaggttaagggtttagtgtttaggaattagggtttagggtttaagggtttagtgtttagtgtttagggttagggtttaatttagagtttaggggttaaggtttagggtttaggatttagggtttaaggttcaagcattaaggtttacagtttagggttcatggtaattaaaaataaacatatttatcattacttataagtaacgatgagtaatgataaaattaatgtaagtaatgataagtaatgattagtaatgacaaaattaatataattaatgatatgtaataataagtgttatatgcattttcactgatacgacacgtatatactaatt

SEQ ID NO: 96955 - DNA, 785 bp, Cannabis sativa
taaagtagtaatttcaccctatttgtattgtaattactaaagtagtaatttcaccctattttaaaatgtatgttgggatactaagtagtatttggatataaattgttatttttatgtttgataaattagagcatctccaataatattttttattttttagacaaattttatttaaatagctaaattgttaagatagtgaggtataatttttcttcatgttactcttattttaatagtttgtttgtaatgtgaatttattaaatataaattaataaaataataaaaatgtaggagtgcttttttattaaaatattattaaaaatatttagaaaaaagtaggagagagttccctatagattgtttattatagggagttactttttatattaattaaagagtatttaaagagtatggttgtagacgatgttagtaattacacagtttaatgatattaatcagctaaaaatagaaatattttataattatatagtgtaattatatttaaattttacggtgtttataaaaattgaagagtaattgagactcatcatatacctctagttatataattttaaacaaacatatcaaaatttacaattactttaaattatactcaacttaaattgcacagtaacttttgaggtgaaccattaattttcttttccgtaaaagagagaagtctgaactctgaagtggtcaaaaagcaatatttacttttttttaataaaatatgaaattggtgctcaagaagcaaataataaagagtattattattggatattagt

SEQ ID NO: 96956 - DNA, 688 bp, Cannabis sativa
tatctatttcaactcattttttttgtgagtacatgcagttatagtgacaagacctagtctattcaatgttgttaattcctatttgatttgggtaataagtaataacatagttgttgaaaatttaaaattttcaattcaatttttttgtatgcgatgatcaaaatcacacaacaattcataattgggttgcaaaattcttatcgcgagctacatgggacaaaattactcccaaaaatttaaacaataaatacatgacatcattaaacaacacttcaagctcgttaaagaattcctttgtcgataattgtttaaaaaatatgtgcacaaattaaatagctagggatcgaaatttgtccatacaaaaacacaattggtttaccgaagatcatcatatcaatagttagattgatcagataaaattattaatcattagaaacatagcaatatgtaaaaagatggctttagcgcgcaagttacactcatgataggcgagcaattaatgcacacatggttttggggtttgctatactctgtgatcttattcttttttaggacctgatgcttcatctgcttctttagcttagcaagacttttttcacactattgtgtcaaatatttcctaactgaattgcaaaaaatgacccattttagatgcccaataaaagttggacagattctttttacccga

SEQ ID NO: 96957 - DNA, 1273 bp, Cannabis sativa
  modified_base (1220)..(1225): a, c, t, g, unknown or other
tatcgaccattttaattttcttttagttataattaatgtggttttgaccttgtctactaggatgatttagatttttatcaatttttgagggatctctatcgaattatttatcagttgtttttatataaatgcagattaatgttgttgatagtacattgaaaatgattaaattggttggtgttaattattaaattgataattaaggttttgttttactattttagacttaaaactttttggatatattttgttaggatggtgttggtccggcgttttatgggattgaatggtagaaaaaaaaaaaaaaactcttcttctgcttctagtaaatcaaaaagtaatctttcacaaattatattagaagaaaaattatacctaaactctattggttgacgccacaaatttcatccccaaaaattatattaacttttaaacttttacatattaaactactcatttaactcttgtcttttttccatcaacttattatccaaataattaatattatactttaataattgagaaaattagtaattgatatttttgatttttcatcaatttctatagataactataaattaattttttatcaaaaaaaaaaaaaactataaattagttaactgatcaatataagtaatcgtatttgtatttattaaaagatatacctattttataatttatctataaacattactattaataataataaattagtagaatattctaattttcttgtataattataataatatatgtttaattactttctatgaataattatatattttctaataatcacataataattcaatataaataattatattgatagataaaaataatatgcatatattatatttaaatataaacattactaataattataaaatttaaatagaataatataattttcctgataattataataataatataattatttatattacataacttaatgattttcttgtataattatcatattttttttttttttatataagtagttcacgtgcggagacgtattgtttcacatttttttttttcttcggtgatttcatataatagccaaagtgaaagatccctacctctctcaaccatgttatggaaagaaatctaataactaaagaaaaaagtttcttaggatattataagggaatttgactaaatatgtttagattgttatgaaataatataaaataatataaaatagatgagannnnnnaagaagaagatgaagagagaaagagaaagtgaatgagaatttctgagt

SEQ ID NO: 96958 - DNA, 734 bp, Cannabis sativa
  modified_base (695)..(703): a, c, t, g, unknown or other
gttaatcatacataaatccccttaagtaatttttaaagaacgaaactttgtaattacttataattgattctctttattcataactaaagtttaaactttacattaataatgcgagttacatcatttatttattgatattagggtcgcaaatgttctacgttccagtagttatttattagcgagccatcaagtcgagccaatttatagactccgactccaactactacttcgatgacatatggaccgtcccagtttggattgaacactcctgctgatgcatctctcgtatttgcaaagactcgtcttagcaccatgtctccaacattgaatagtcttttcttgacttatttgttgaagtatcttgtaactcagtgttggtatgctgtgttggtgatttgggactcagttcatttttcttcaagtaaatccaaggataattttaaaagttcctggttttcttcatgattataaaactctcttctgtgagtcgagatgttcacttcaacaggcagcattactttcgagccaaatgctagcgagaaaggagtgtgtcccatggctgttttctcaatagttttgtgggcccaaagcacttgaggtagctcgtttacccatctgcccttggcagcaactagcttcttcttgatagtatcctttagggttttattaacgacttccacttgtccatttgcctnnnnnnnnnatactgacgagaagcttttgataattttgtt

SEQ ID NO: 96959 - DNA, 676 bp, Cannabis sativa
ttattattattattttaccaaataaataatatcaattgtgaaacaatctgaatcccattcagggactttattgaagtatatatagctcaacagagctaagaattacaaaagcaaaaccgttacaagaattagttaggaaactgtttttaacagaaaaataacagaccaaaacaacttaactaactattcttggttttggttatcatcccccctcaaacgaaaaggggtagaaaccactttgagtttggttttgagataagaaaaacgctccgtaggaagacatttcgtaaagatatctgcaacttgatcgacagtaggcacgtatcgcacatcaagctccttgtttaacaactgatcacagacaaaatgctgatcgatctcaatatgtttacaccttgcatgaaagataggatttgcagccaatgatgctgcaccttggttatcgacccagataacagggacatcaacaagctcaacctgaagttcgcttaggagagaccgaagccatttaatttctgcagcagtgttggcaagggcacaaaattcagattctgtggaagagcgagcaacaacttgctgctttttggcagacccagagattaaatttgtgccaagaaagattgcgtagccaccagtggatcgtcgatcatcaacacagctggcccaatctgcatcg

SEQ ID NO: 96960 - DNA, 1028 bp, Cannabis sativa
  modified_base (257)..(258): a, c, t, g, unknown or other
actgtcttgctgggcttggctcaagggtgctctactgtgcaagaaagggtaaaactttagctgatcagccatgagtttaggagttgggcgaagaatatatatgtccgggccacatcagaccaagcgggttaagggtctactaatgatgtattttgaaactctattttgccgcttaggtcggctgaaagaaaaagacttgtaataaagtttgtaaatatttttgggatcccagctgttgtaaagtttaaattattacnngttttattttcattctgtttattataaaagtttaaattccgcgccatttcggttagtaattccatttagggggttagggtttcatgagtattttgggtagcgtgcctaattgattagggcattacgttagagctaggttcaactcaaggtaagatcctttttgcttctctttgatttttgttgagtttaaagttaggtttaatatgtgattttggggttgtatcttctgttcgaacttgggttgcctagagtttatttctagtgtaatttctaagttgcttatgttgattaatgggtttttggtggttgttgttaggcttgggcaaggtttgagctttcaagctccaacttggttttttttatggaaaattttgattcagagttttgtagatgcttttatttgttgaaatatgattattggacctaagttaggtgttttggaaagtttgggaaggtttagattcgaattgaggtagttttggaatttttgggaaaacatgctgtaaaaatgggaggtcgtttctagtataacaacctaccatttttctaggcagaaaacccagaaaaatggccggccgtttgcttagaaacaacctaccattttttggggtactttttccaaaattctattttcagcgattttctcgatatgtaggatgtagtcatgttatttatcaataggaaaacttttagtttccaagtttaagtcctcgaaagtgatttagcggatcacttaccaattttacgtaaattgtgacttaggaccttaa

SEQ ID NO: 96961 - DNA, 608 bp, Cannabis sativa
  modified_base (87)..(88): a, c, t, g, unknown or other
atattattattgaggatgaaggttccgctgtcagagtaccagttgctgttaccacccctgtggatgttggattttgtgccctaaatnnaactcatttcaatataatcagatctattaattaataaaagaacagaaattgcattttatgttgcatggttcatatgatttatttcatatttatgtttaatgtataaattctaataagtccagaacatatataaatatatgcatatatttattcatgattatagtatcgttagcacagtagaatataatcatgattatatgtttaaaagtttaaatccggtcttctacaaatcactaagtatatgaaaatcggttgttattattcgggacaaacacaacaatattcttttaaagaagaatcacgtttcctcaaaaactaacctaactgacattttcacaaagacaaatcacttattttcttctcattttaatgagattgtaatcaagatacacgttaaaccttaaaaaattagttagagtcattgagttagttacagtttattaattttagttattctgttagctagctgactaatacaacttacttttcattccatcttctataaatacaatatagttga

SEQ ID NO: 96962 - DNA, 682 bp, Cannabis sativa
tatattaattatttgaatttataagtgtaataagccaaaaatctcactaaaaaaaagataattaagattttatcttttgaaaagaaaattatcaaatgtattggataatttattccacacgtactttttggtttttattaattaaaataaatgaaattaaattaatttgggaattttaattctatattgattagtatatagttatttgaaaagaaattgagaagaatgtattggataataattcatattacacgtacattttaaattttattttattttatttacttatttatttgaaaccaattttagattttattaaagataataaatgtaattaataagttgtagattaaaagtgggtggggtcattgattcaagctgtgtcacgtggcataatcagagacgtaggatttggtattattatatatttttaaccattattattattttgtgggatatttattgatttgaaattaatagaagattaaattagattgggaaataattaaataaatacgtatattaatttccatgcattttatagtcagggtatttttgtcattatacatcaacttctttatgactttgacactttttttattaactgaatttgattttttttgggtcaaaaaataatataaatttttatttatctcacaaaaatcttggttaaatccatttt

SEQ ID NO: 96963 - DNA, 698 bp, Cannabis sativa
tatcgactagtctcccttggagaggatctctgataagatcttgacctcttctagtagctctttcatttaacttccttatcaagtcactagcttctctattatggtggcctagctttgcctgatgacattagaggatgtactcctagtcatccatccatcttaaaaatttatgtctctattgtctgaatccattgcatgtaataacgcgtggttctttagtttggccgacttggcaaacaacctctctaagtctggccaactcaaaatcttctcataaatccacatgaagctcaccaatggctgactcaccaattccaggccctatttccccaacattataccgggggccaaacttagttatggttcccgaggggtgctccacattggccatacctttagtatgaggtgccaatggtggatctaccctgggcagtagaggctggtcattgggatcagtcaggtttgtagtgtcaagctgaccaattgtattggtcaagtttgttgtacctgttgagttggcagggttggccacatccatcaaattcgtggagattttaattttggttgtaacacaaacattaggatcaatagtcatagggccttgaggaagatctgatgacgtaggagttatagccaaagttctccctatgttaaccatggtgttacataaaatcagtcgataacactctcaatgaaag

SEQ ID NO: 96964 - DNA, 737 bp, Cannabis sativa
  modified_base (704)..(710): a, c, t, g, unknown or other
gatcttccttaagaaagagagtgattttggttcctatgcccaactgctcaccgtcgatccctggtaacagtgaaagagccaccagcctgagactctcaaatttattgctcgtcgttattgtgctggttgtcacaatgactttctcagcaaccaggtaagccgagtaaaacccaacaccaaattatctgatcatgctcacgtcagccccgacttgcaatgcctccacaaattctttcgtcccaaaccttgcaatagttcccaaattgttcaccaaatctacaaagacgccaacagaaatagttaaataacaatttaaaaaaaataaaaaaatccaataaatcgttccttaaaacagagagtgtggttacataccagcttttgtcatcctaatatcactgtcaataattgaaagggtcttgtttgccttatcacgaacaagcctaatgaatagttcaatttgcgcatcaagcttgctcttatctgttaagcacccaaacctgatcttgtccaatgcctataaaatcaaagtgaacacttaaatatccgttcgagttatctaatccaaattatacagatagcttccataaacattatatgtaaatacatatatacacacatttacaaacttcaactctaattttaagcacaaatttttaattagataaccctaatctcagtcacagtttgtgttgggttttatgccnnnnnnnaaactccatttcaatgtaatccaattt

SEQ ID NO: 96965 - DNA, 873 bp, Cannabis sativa
gatattcttcaaggcattagacttagctcgggagtaagtgcaagccaacttcaaattgagctgcacgggaaaaagtcaaaccctgcactggtaaaaagataataaaaactaaaggagaaatacttactcgagttgcctccttcaggagcccacccatcaaaagctccacggacatctcgtccccattgagtagttggccgttcaccttaggaagtagccagtcctggtagtgctgaagcatctccttgcccttctttgttttagggttcagcactataggagcgttagaggacttggtcggaccagacccatccgtgatacctcccttggcacctttgggcttaggggccttcttgggcagtacctccatgtcgaataccgtctcctcgggaacctcgataggcaactcgaccaagcccttcttattgggcagtatctcgttaccctttgatcgtttgggcaaaggggtctggccagagctatcacccgacctctttctcaaggcttggaacaccttctaagacatagctgcatatgaacaaaacaagaaggttagaaacaagtgtgatttaagccatgtcatatgattaataaatatgagttgaaataccctgcacgtaggcaggagcattcttccaaagaagcacggatagaggctcatcgtctgaagagtcttcttgttcctgctccgtcaaaacgacttttccctttccctccattagggcgaattgccgaaagggtctttcaggctcctctctgattctgatagatcgtttaagtggtgcctggctgcttggaggggccttcttcctctttttgcttggagtctcctgcttgggtgcagtctcctgctcgggctctgtcttttttgcc

SEQ ID NO: 96966 - DNA, 1051 bp, Cannabis sativa
tgtatcaaagaggagaacccttcatcacaaataataaagagatatgtggaaagagggtcgccttgacggattcctcgagaaggaacaacaggacctatggttcggccattgtgaacaacagtgtagcgaaccgaagacacgcattgcatgatcaaatttatccatctgtcagcgaatcccattttagacatgacagcatgaagatagccccattcaacacgatcataggctttactcatgtccaatttaattgccataaaccccttttttcctttcgtctttcttttcaagtagtggatgacttcaaaggcaaccatgacattatcagagataagacgtccaggaataaaagcactttgtgtgtcagagattaccttgtcaataatatgtcgcatcctattagcaaggacttttgcaaccactttgtaaagcacattacacaatgcaataggacgaagatcagccatagaggagaaattcttcttttttggaatcaagacaaggttagtttcattaatcccagcaggaaaatgaccagagatgaaaaaatcattagcaaacttgataacattcttaccaacagttgcccagtgagtttggtagaaacctggacccatgccatcaggacctggcgctttgtcaggatgcatttaaaacagagcgtgtttaacttcctcatcttggattggctgtagaagatcgttattttgagcaatatcaaccgaaccattgaccccattgacaaccgaaagatactgagaagcattagcagtgtaaagatcagaaaaataatttgagatgacagtttcaagccccgaatcccaatccttcagaaccccacggctatcttgcaaaacatgaatttgattattgcattttctagtgcttgcataagcatgaaaatatttgctatttttatcccctccatgtaaccagttttgtttggaccgctgcttccaataaagttcttgttgggcaaggatttcaaaataattagtttgctcagtaatgaaattctgcacatcagtagcatcagtactacttttcaaac

SEQ ID NO: 96967 - DNA, 624 bp, Cannabis sativa
  modified_base (122)..(125): a, c, t, g, unknown or other
cttcccacgataaccagcagccactagacctcctgaaaacccacgaaccccctatctccctcatttcttcaccatttcatcccattttcattttttctattttcaatatctaatcccatacnnnnaaaagttttgttttttcacccatttgcactgtacccgaacctattttagaaaaaggtggtggtataactccggctactgattttagtagagaaaacgttgaatctcaacgtccattaaggtataaatatgctttctattctttttattaatgtacattggtattattttgtttttgtaaatttttttgggatttttttattttattaatattatattgcgtgtgtgctataggtggctggatttttatcgtaatttattgtcggattgcgtttataaggtaaatatttattaacttgatatataatttgtatatattttgtaatttattattgaatatgtgtttatatagtgtgtatatatattgtgtatatactatttgtgtattttgtgtgattgtatggtatatatatttgctgtgaatgagaatgaggtagtagggatttaatttgtttagaattaatgttcttaaaattatgttagtgtgatatataattgatt

SEQ ID NO: 96968 - DNA, 623 bp, Cannabis sativa
tctgagtaaaaaacaaagttttatgttattatctagacatcaaaaagaatggtgtacaggaaaatgtatacatgacctgagcatggaattttctaccaaaagctttttgctcaagttttgtgccaccagaagatgatgccctataaaccccatattaatattcatacacaatttctaaatcttagaactaaacagtataacctaattacgacaaccctaactaatattaaaaataataagaaacgggaattggataatagctaaatcatatatccctgttgtgaactctatacataacagagagaaacacttagaaaactcaaacagccagacaaagtttcaacctcgttatgcctcaaaatcttaagcacagtacctgttgtgaataaagtaaatgcttctccggccaatgagtgaaacggaattcctcctctacgatctccgatacggcgatacccgatcagtcagtaaagggggttgataatatttctagggtagcgctgatgagttggtgacagaaccaaacagagcccaaaaggccgataaagatgagtaacaaagacagagagagagagagagccaagaagttggattgggctcgcgctttgactgtggttttgggt

SEQ ID NO: 96969 - DNA, 609 bp, Cannabis sativa
tttggcccccttagttagcgggtaatgaccttctcctcttttgattgtaatgataccaaagataatactactcagatcacaagtgttgtggaatctatggtagctctcttaagactacaatgtatgaatcagtaggcaagtctctaatgagcgtgccaagcatcgtccttcgtgaatgtaattggcaagttcatgttttgcgaatgttgtgttggcgactacacttaggcacacatcactccttcaccttccagttccttaaaatatccatttttggaatttctcgtacttcccagaatataagttccccctaagatcgtggctacatgtttgtctattggttgtggatctagggttaaaggatatgggttcccttgtcccggagctaatactttcactgtagcttgagctggtgcagtaagtagagctggacattgtgttctgggagcttgcggatggattactacttaaggagggtttacagtatcctggtatcctaaaacaatcaatggttcgtgaacagccccaatcccggatagataataggaatccagacccattgtcctagatgtccgactctagtcaaaatttggatctcatattttcaat

SEQ ID NO: 96970 - DNA, 660 bp, Cannabis sativa
ttaaatctaatcatctcaatagttgtggaaatttttaacggccaaaaaaattcaggggacatgatttaatatattcaaaatttaggggaaaaaattactaattatcctaattataatatcaaatttatatttttatatgggtatttgaatactatgcacttgatcgacatgttctacatagaacttattttattatccaaattccaaatttgttgagagaccagacatgagcagtttacatatgatggtttctaatccaatattcaaaggtgaggtaaagatccagcttcctcatgtattgaaattaatcgctaactggtgatcaaactgataagaatattgtaaatctgaatttaaccttaattaatttatgagaatcaaacaatagaattaaggaatagtaaaagcgtattggagtctatagaattgattttgtaatggtaagatcttccattttttcagtgaaatctttttctgtaacatttgtcttttaatgatggggtttcaagagaaagaaaagatacgatactgtaaattgaggaccattttcgtttatattggtgtttagttggaggtaatgaaatagaatggaatggaaaagaaacaattttcattctattcctttgtttggttacatttaggtggtgtttggttcacatg

SEQ ID NO: 96971 - DNA, 533 bp, Cannabis sativa
  modified_base (37)..(39): a, c, t, g, unknown or other
tctgttaaaccaaaaaatgccgttagataggcacttnnnatatataaagatatatatactctatcttcatttgatcaatttatcaaagtaaaattcaacaaatagatctatatatcactctgaaaatcctattctcctccaacaccatttcttgcctacctcttcacaaaaccagctggtacgtattatatttatatatttatatatatatatatatatgcacaaaattttattatagacatcaaatttattaattaattttctgaaaggtataattaagtaactgtccaaactttgttattctaaaaattgcccaactaatcacacaaaaaatcggttttgggtttgtaatttatttctgatttttctgattatgaaatttaattataactactgcatgcatgcatggcttatttaatttatatatatagatgcaaaaacaacataaatagactatatatatttaataaacacacataatattcacgtacttaattaatatattaattacttgatataaattaatatcattt

SEQ ID NO: 96972 - DNA, 832 bp, Cannabis sativa
  modified_base (647)..(651): a, c, t, g, unknown or other
aagcttatcatagagcaagctctcaatctctctcacacacacaactacactcttatctttcctaattcttcttcttcttcttcttctgcctccttcacatactttttttttatttgttgcctactacaaaaagagagggttaacttttatttgggtaatgttgtagacttaggaaaaaaaaaataaaaaaaaaaaagaaagaagaagacgaacaggggagataaaagctcaaatacaatgaaaaataaataatgtgtttagtgatttgctcaataggaatatacatatatgagtgcactcttaatgggtattacccaagaatgggtaatattataaaattttgagtttttatgattaatttttctatttaattagaaaaatttattatttttacattatataggctgagattggtctatcagctgaaaaaaataataataaaaaaaaagttttttgacaaaagagtgataaaaaaagttgaattcgacttaaatattttacatataaacatattttttatatagtgtaaaaaagaggtattttttaatattttttataattaagtagctaaattaagcatagaaattcaaatttctattttattattcgctatcggaccaagatctaatagtttaatatttttaaannnnntatttatagttaaatttgtttattacccattaataggtaatactcattaagaagtattccatacatatatatatatttctatataaaatgtggctatacaatagaattcttcttttaacattttatttttaaacgttaatttttctttaataaaaactaaggaagactaatgtttcccgtt

SEQ ID NO: 96973 - DNA, 509 bp, Cannabis sativa
aattatactattttaattattattaaaataaaaaactaaaatattaaataaaactaacactacgtggcttggcacgtaacaatcacctagtatatatatatatatcaattgagaatagtgacaattgtatataatatagtttgttacagttgtgttgtggggaaaaataattgtaattgtgccgtgagaaaaagcaattataataagattagagaaaaacgctgaactgaatgtttaataacttataaattttaaactgttgaaaatagttaagattttattataataacaataatgttataatctaatttattataatcacaaatataatataaacaatatggtatataaacttttttatttttaattatattttccttgtggtataaattttatgcatttgacaaaaataatttataatatttttaaattatattatatcaattgtaaaaaaattatagtttataaaaaattttagttgatattatttgttaataatataaatataa

SEQ ID NO: 96974 - DNA, 875 bp, Cannabis sativa
  modified_base (39)..(83): a, c, t, g, unknown or other
ttttaattaatcacatttttccataaacctcgttgattnnnnnnnnnnnnnnnnnnnnnnnnnnnnnnnnnnnnnnnnnnnnnagatagttagggtgttacaccctatatggtgatagtaatggaactatgtctatttcaagtttttatttctcacaagatggtaattacaataatagcataagtattagaatctccaaactctagagagagagaaagtctaaagagagaagctctaactttctgggtagttttcaaaaaatcagctaagggaactgtccttttataggtgaaggagacaaacaaaaaaagataaaaaattaaaaataagttattttccactattgccaattttttgagcctagtgggtctcgcttcgggtaacgaagagcttatttccgtaactccctaagggatgaaatttaatgatgatagatttagaattacatatggagtgtgagacatgacttgatagatcattgaaaaaaaattaaatactcaagttgaatcacatcaatcagagaaaaattaagtgagttatggttgttttactaaaggaagttcaagtcccacaaccaggttgacacctagcgcccaggttgacatcccacgcctaggttgacatctaacgtaaacctggacgatgggtaagtataaaaacgtcaaaaggatgtcctttaagatgcctaaattatagtttgaccccacttagtccactaatatgttctggtgaagatgatcacctgttcgcagagatgttgctatttcgcgaaaatgtgagactcaaaactcttcatttctaggtgtgctggaaatgagaaatgcgaagttgtgaatttgattcttctaactttgtagatcttggattcgtaaaaa

SEQ ID NO: 96975 - DNA, 582 bp, Cannabis sativa
aaaacacataataatataccaaaaataatatacttgtactggatattacaacaacacccttaaaccagagaaagaagttgttgcagtgggcagaggcagtggccaaaccagaccggttccagcaggacctgctgaactgacattgcagcagcacatgagtgatcgactcttcctccatatggaaaaatgggcatgtcaactggacaggtacatgcttggagtagagttgggtacgggtaggaagacaattggttaaagccttccatatcaaatgtagaactttaggtgggactttaatcttccacaaagttttccacaccttatcctccatatctgaattctatgcccctaagttttcttagtgggaaagtactttcttagtgtttgttaaacactaaagtactttcccacccctcgcttccacatatgtcaaataggtttgtctcatcaactcatcctgccttatatcgacaaacaattgattctctcttctcaatcgaggatcgaagataggatgctgaaattgtcgatgctgatttttggtcttggtcgggagaacgtactgggtctttttctgtaaaa

SEQ ID NO: 96976 - DNA, 674 bp, Cannabis sativa
cctgcgtgtataattgccatccctcgacccggccctgatcccgacctccctaaactcgacttaaataaaatcaacaaatgaaaatgaaaatgatatttacagaacaccagggctgttgggggatttaggttcgggtctgggtggtgtctaaaatattgattaagaaaaaaaagtgttcaaaaagatattgaaagtaattttttttttgttttcaaaattttgattttcaattaataaattgaaaaatgaaaatatttctataaaacatgatttttaaaaatatttttacattttcaattttataaacaaaaaactgattaaaaaagtgttatcaaacgccacttaatatttttgttttctgaaatgagtaaagtagcatggtatagaaaaatagatgcaaattaaatcgttgaagtaaaaagagtaaaaggtatttaatttgcatccatttatcaactaccacttattgcattactcatttcatgaatagaatatgacacaacttgattgtaaaatgttctgggacaaaaatattaattattagtaattttttttgaacaatttgcggcaaatatcccttatgttttaatttttatacacttaaccccgttattttttttttttggtagcaaaacccccttatgttttagtttatacacttaaccctcttatct

SEQ ID NO: 96977 - DNA, 1945 bp, Cannabis sativa
  modified_base (962)..(962): a, c, t, g, unknown or other
tgtgcttattttcttcacttgcacgttcttcttggatgacacaatgtcccttacaaagtgtaacttgatatcaatgttctttgaacattgaatttttcatgagatgcaaagtagggatgtacatcggtcagtttggtcgggtgcaccacatacatatgccacaacaatggtctaataactgcgttcttaattaattgcttcatccaacggccctgttgttattatcttgcataatattgtttcattcagccactatatcttatatctattattaaatttcattattattatttatatgtaatgacaacgatcatttgtgttgatcaatgtaattggatgcgtaaagcaattctttttcaactccaagtttttgctttactccaaaagctctcattggatcttcgaacatgtatgaataatattcttctcattacctcttatatctatctatctatctatttctcattgtagttttgtaattttatgttattatatatattgtataactgaatcactacgctacatatatgcacttgtatgcatttacttccctttaaccccaagacatttccaatttcttgctttcacgttatatttatctgtatttcttatgttctagtttcccattaaggctaatccaatacatgaggaacatcccaatatagaattatacgtaataccatttttatgaccaatgttaaaaattaaaagttttattattctctagatattttcctaggttggccaacttgagtctttttagggaaagaaaaataagcaatttttaatttattcatagtaaaagtactacttttaaagtattgttacggggcaccaaattaaattgcatcaatagcaatattacactcagggccgacccttaattgaaatgggtcgtaggcaaaaaaaaatttgaatccttactataaaaataaatagtacttttaaaaattattaaaaanatatgtatattttttaaaatattttttttttggccctaaaattagtgggcccgccggccctgattacactttataagtaaggataagaaggaaattgcattatatacccactttactttatctattttaatttctaccttcattttcatattctttaaaatatgtccacttttatagatgatgtccccatattataccccttacgttaatgtaaatcatgtgctacacttaagtggaaggcaagggtatattagacaacccactcctaaacgtggatagattttaatgaaatataatatgagggtattttttattaatagatacaaaaaagagatattctttaatttatcttccatcatgagtgacctttaacatttctttttgttagtgtggcttccaataatttgtaaattattttgtaaattgatgattatctccaaattaatttataaatgacaattattttaagttataataatttaaacaagttatatgaaaacaggaggggataagaggcaaaataatgaaaatgtttttctatcctaaatatcacttgaagaattcatttagaattgtacatttgggttgggtttttcagtataatatgaaaccaacatgagtctgggatgcacgagcatgacacagtgataaaaatatagacttgggctaacaaaataaaaaaaaataagtttaataaaaattacatcaaatataaaattttataagaaaagttactatacgatgcaacatgataaatacaaaactatacaaaaacacgaaagaagcacaaacatacctatgaataagtatgaattatattcataaatttaatatttttattttcgattattgatttatatagtgaaaaaatataaatctattgtattaagtagatttaattatttttaggctaattaagatttttgctccctgaactttgacatgtaccaaatcatgcccctgaactttcaaggtcattaaaa

SEQ ID NO: 96978 - DNA, 785 bp, Cannabis sativa
ttcatgatgagtggcgaggttgcgaagcaaccatcgccggacagtcaagagaatcaggagaatcctcattagaagaaactagagattcggtatgagaatcagaagtgaaaaaagatgctgattgactaccaacaccacgacatcgtttaaggacttttctcatggacacgggttcactttgtcttttggtagttgtggaaggtggggtattctctttatcaaggtaatcagtaggcatttcatgatatagagatgagggtagggtagggattgaaactggaattgaggttgttggctgtgaagaagttgagatagacaaagatttaagtgagggagttgggaaagatggggacgtgagtggaggataggtggcaaacacattgtgagacataccctcatgtcccaaatttggtacatatatatgtgtgaagtcagccacagtgacactagattgaggatttatgggagtagtcgaatttgatagggtatttgtggaagaaggattaggaagaattgaatttggaatgaagggagccccttgaatgtttttacccttgttgtttcggttattaagggtggaagaaggaggtgtatctgtcgtaaatggtgaatatgggaaagcagtggtgatgggaagaggagatgaagtcaatgaaagtgtagaaggaggcagtggagagatgaagctttgtgttatagtgggagccaatgggggacgagaaatggtaatagtagaagccttctcactatcatgaagagaatttggttgaggattatttggtgat

SEQ ID NO: 96979 - DNA, 514 bp, Cannabis sativa
tgcccaatgttcagtgccaggattggcaatgaatctacttgcaacactcatagcataggccaaatctggtcttgtgcataccattgaatacatgcggctgccaacacatgatgcatagggtatgctgtccatgtatcttttgtctacttcagtttgtggtgattgagattgtgtaagtttgaaatgaggaacaataggagatgttacctgtttggccttgtccatgctgaacttatccaatatcttttgaagatagcccttttgagatagcatgatgaattctggtctttttctgatgatgtctatccccagtatcttgtttgctctccctagatccttcatttcgaattcactgctcagtttcattttaatcttgtcaacttcacaccttggttttcctatgatcaatatatcatctacatagagaagtagatatacatgatcattgtagtaaacacatggatcatacttgctcttactaaacccaatccgaatcatgaactcatcaaatctt

SEQ ID NO: 96980 - DNA, 641 bp, Cannabis sativa
ttcaacatcgggttcatataatgtcaaatctgggttccatttagcctcatcattggaggatcaagatgcatgttctccctcagatccaaatttggcttggtggaaattcttctggagcttgaacttaccaccaaagataagaatttttgcttggaaggtttatcacaacataattcctactgctgctgcacttcacaggcgtaaagtaattgattcagcagcttgttctctatgtacatctaattgggaatcaattgggcatgcactattttattgtaagcatgctagaagaatttggcaagaatccaaatttttcattgattttcaatcagccaaagcaatgcagaatggtgattacctccagcttttatcttccatttattctcaagaggactttgaattgctggtttgtatcatgtggggtgtttggactgatcgaaacaagattttccatggaggtcaggcacggctaagttcttcaattgttgcttatgcaactggttttcacaatgattttaatagagctaaacatcaaagtgccagtatgactacagcctcaacttctacagatcgtccagcattaagcagtcgtcgacaggagcaaattccttggtctgtgcctagacttaatgaatttaaat

SEQ ID NO: 96981 - DNA, 677 bp, Cannabis sativa
atcatgttgcaattatcaggatggagagaaaccacatttattttcttatatttaaaccccttcatgagtctaatttcatgcatcaacctccacatagacgacgtagattcttcattaaattcatcaacaccattaatgccacgatcgaaattgaattcccaaactttcaaaagaaaacgttatttatgatttgtgaggttgagttgcgaaagccttaagcgtccccaaaccactccaatacgcacacttgtgctgttacagttgccttgagttatcacaaggtcaagaggaaagttaatgtaacgattatttttggtatgggaaaatggatcaaatgcaataattccctcaacacatttagtggtcaaattactcacaagccagtattgcattccattacatgaaaccgtatttcatccaattttctccctttaagaaaattatacgatctactccatttttaagtctcaaaacaaaagacttcaacacaataatttaacgaacctgacgcctaataataaaatagtactatttctttatacctttttttcacataactattattattgttattatttggttgacaaaccaatacgcccattcctcttgatggtagaaaatctgattctattgaattcaatataagctttggtagcttatgttgggttttgtgccct

SEQ ID NO: 96982 - DNA, 1089 bp, Cannabis sativa
  modified_base (567)..(567): a, c, t, g, unknown or other
gcccgcgggttcttcttctttgtgtcctaaacattggctcaatgcctcgttctccatgaacacctcatggacattggtagttcgccgtacaccatgggatggtgatgatgggcttcctgcatcttggacctgaccttcgtcgttagggataggttgtttgcccggacgtcgagaggtcccttcgccagcgggctcagtgggttggtactcttcatggtgttccatggtgtttcctttgtttatggggtcatcatggtcctcctcctcatagattgtccgtcttgtactcaccatgatggtaaaagatgattaacacttgtgttcactgctctcaatgaaagcaccaaactgttgacgcggtttttcatcaacggatctaagaagatcgtaaaataagaaagatgaacacaagcaatagttaatcaaaataaactggtttgcaaaagtaaattcaccaaagatgaacacaagaattttatagtggttcacccccttttagcggtaataggctagtccacttggagtgttcttgatctcaatgcttgaggagagttctctagagttatnttctacaagagttcactcctcaagtgagtttttagaatttgagagtgggggctcaagagtatgatctcgtgagtctcaagttcagggtcctttctataagtgatttcaccccccttatatagatattcatataggatttaaaatcccttaaacataggcataccttcccgtaattatagtcgggttaggttcaagatacaaaataataacagtaaaataattatatcaaaaataaatatctcttcacttatcatttttgactatatttttggaacaactctaaaagcacgtgtctctcgtatttagcggacccagatggtcatgggtacatgaagggagccaattgggtcggttcgtgcccatcaggtccttgagataatttggcagctgaggagctctttgcaccttagcacctgacggagtcaggagtttagtgcggccaaaatgctcctctttggccacaatgctcctctttggccaatgagctcctctttagctaatgagctcctcttttgccaatgt

SEQ ID NO: 96983 - DNA, 523 bp, Cannabis sativa
tacaaataagaccctaaactaattttttatcaaaataaaatttaataataatctgatctaaatgtattatgacaaaactatttactttttatagtatatgttcgtattaagaattatcttgaaatttgttatattaaaaaaaaagctgtcgaaaattaagttcaagatcttatttttactattttggaaaatatagggtccattttgtaatttaacaaattagagggtccaatttgtaacttttgtaaaacacagggtccaaaatggtatttaccctatattaaattatacccctaaactttgatatataccaaatcatgactcctgaactttaatatgtaccgaattgtgctctcgaaattttcgttcacaattctttagtaaaattggaaaaaaatccttaaattcaacaatctcaatagttcgaggggaacttttaattgaactttacctaaaaagtttaaggagtatgatttggtatatgtcaaacttcacagggaaaaaaatctaaattatcttttct

SEQ ID NO: 96984 - DNA, 7011 bp, Cannabis sativa
ttgattttctaagtatagaaaatcaaattaatcacaaatatatagtttataatcttattcatcttaatcacaaatatatataaaaaataatttattttaggctaattaataattttactctctaaactttcacatgtacctaatcatgccttctaaacttttaaggtcgttaaaaatacctctgaactattgagattgttggatttaaggatttttgtccaattttaataaaaaagtctaacatggatgaaagttcaacgggtatgctttagtacatttcaaagttcaagaggtatgatttgatatatatcacagtctagagagcataatttaatacataaacaatcattgtaatagtaaaatagaatgaaattagacaaaaatcttaaatctaacaatctcactaaaatagtaaaatttacattttaaaaggacaaaatctataatatctgaagttcatttggtaaaattgtaaattgtactttataaaataaaacaaatgtaacaagaaacttaggggaagactagtgagtacgtgggttcaaaggcctatgccaccattcaaaagaatttcaacgaataatggattgactccttaacgcactacttcacatttcactttcacaatcatatttttccctctaaatccgcaaagccaacccccatttctcattcccagtaacgcgccaaaaccccctcctactctccacgcgccgccactgcttctccgatcgaagtacccaaggtaaattaatcatctttcactctttctctctctgcattactttattttatgtaacaaaccactaatcgtaacccattcacgatcccgatcggatctggattcttctaattattatcacgtctcgccggcggttccttctgttttgggttttaatttattggaattcatctttcttattttctgcgttgtcgatccgggtccggtcagtttcatagctgggtttgaattcgaattcaatatggttcaacacgaatttgtagtaggttctcttgaggtaatcgacgattgttcgtttagggttttgtttaatttcattatgcttttggggatggaggtcgactagtgaggtgtaattggtttcgatgccgaaaaccttaccgccgggtttgttgtctccgatcagaagttgaacgaggcgtataagaattcattctttattgtgcatttggggaagaatgtgaactgggatgggatccaagtccttgttgtattggatcgatatttttgatgtcatgtgggtctctctggaatttgtcgtctttcgagcgtcacatctgtgttatactgttcgtgtctgcgttcacaatacacgttaatgggttgtggcattcgaattcaagtgttgtgaattgccggggtattttcagaagtctaagcccggatcattagttttcacaattaaacattttgtggctgatattccaaactaaattcagacgtgtttttcaagaagattttattatttttatagatggacatatggactgcatgttttaaccaactacttctctggctcaaattaagtttattgattttcttatgataaaatggttaatacgttcaatgaagttgcaccctcatacattaccggatttttaactttgctctaatttttttttctttttttatgtgatacaggatatgagtagtttgattgagaggtttcgtgttagatcagatagaaaacctatttataatcttgatgattcagatgaagatttttatgttgtgcctgggaagagtgggactgttggggagaagtttgaaaaggtagctaggagtgatcaggtttttttctactcttaattctattatgttcttattctttgacatgaaaaaacttggatatagtttatgcatgagttggaaggtttaacagaactgaaatggcatcagggaaaacactcttttcttatatagttcaaattcatacccaaaacgaatcttgttgaaaatttgtgtactttcttttcattgttataattcctggaaagtagtgctttaatttttgtcaacagtttggtgtttagttttgtgtatatgtatatgcttatgtattctatctgctctccatatagatagaggactcatgccaagcttgtggagagaatgggtctctgctatgctgtgaaacatgtaattatgcatatcattcaaagtgcttgatttcgccacttaaaacttctactagtggaaactggagatgtcctgaatgtgtatggtttcttatctgaatcacttgttcattaatgtcaaatgattttgcaagtgacagctttggtgataatagaattaaaataattatctctgcaggttagccctcttagtgatattgataagatattggattgtgaaacgcgccctactgttgctgatgatagtgatgcttcgacacttggatcaaagcaaatttgtgtgaagcaatatcttgttaagtggaagggattatcttatttacattgcacatggtaatttttttttgatgttctgcagctgttttatagtcaatcctaattttttttgggtatttaattgagtggaaggactaatgacttactaatacttaactctaaaaaagttcacaaatcacaagtatttacttgactgaactctttttatgatttctcattgaatttttttattgttatagtttttatctgattttgttattatttttattgttattattttgtttgtgcctgaaacttgttatttacataagggtcacaatcatctgtacagggtgccagagaaagagttcctcaaagcgtttaagacacatccatgtctaagaactaaagtaactcatttccatcgtcgaatgacatcaaatagaaactttggggatgactttgttgagaaaagacctgagtggacgactgctgatcgggttaccgcttgcaggtttatgttttggcaaactttctttgatgttttataatcatttgcccctcactcttgaaaccttttttttataagccttgctgctttgaaatttgagaagatatagtatagcggcatatgaagtcaaagctagttttatgcctagtggcggtattagaaagtgatcaataacacttgttggttcaaaatgcacacatttagagcgtggattgggctaatgaaattaacatatatatatatataaatattcatatttgtgataactaggataacttgctgcttgctaggcttttaaaatggttaaatgttgttaggttttgactgatagtatgatgtaaatgttgcaggggttttatcggcatgcctcgccagcttgctctgtttgggtttttagtcgaatttatccttctcattctctgtggtgtggtttcgggactgtcctgccccaacaccagttccatcgttgggtttgaatctgaatttaatatggttcaacaccaacttagaggttctcttaaaataatggatgattgttcatttagggtttctaatttcgatatgatctcggggacggaggtctactggtggggtgcaaatggatccgatttcgaaaacctgacctctgggtttgttgtctctgatcagaagttgaatgatacgtataagaattcctcgtttgttgtgcatttggggaagaacgtgacttgggatgggatccaagttcttgctgtatgggatcgtccaacagcatcgaattttgggcatgttttgctgaaaaacgtcagcagtaatgagtcacagtcaagtggcagcagttcagggactgggttgggtcggggtcatgtggaacccactatgtttgagaactgtaaagttttgtctgacaactatagggttaggtggacattgaatgctgatgataatttgattgatattgggttggaggcggcaactgggatgctgaattatatggcgttcgggtgggcaaacccaaagtcgtcttctaatctcatgcttgaggcagatgtggcagtgactggtttcatggaggatgggttgccatttgtggatgacttttacatcactgagtatagtgattgtttagtagacagtgatggctctgctcatggggtttgtcccgattcaatttatgaagggttggactttactgcttcagtgaataatacaaagttggtttatgggcataggaaggatggagtttcgttcatacggtaccagagacctttgaagtcagatgataaaaagtatgatttaccagtgaaccatacagaaaatatggcagtcatttgggcaatgggtaagataaaaccacctgattccatccgacagtactatcttcctcaaaatcacgggggacctcgcgatgctacgtttgggcatttgatgctgaatatctcagaacaggttaatgattgtgtgggccctttggatgcagaggacaaggaagatcaagatgtcgtaactgctgatggaaatgctgctcttgtagtcacttctggcccagcattacattacccgaatcctccacacccttcaaaggttttctacattaacaagaaagaggctccagtactaagggtagaaagaggggtacctgtgaaattttcaatacaagctgggcacgatgtggcactttacattacttcggatccacttggtgggaatgcaacattgcgaaatactactgagactgtttatgctggaggagcagaagctgaaggagttcaagccagtccaacggaattagtctggttgccagacaggaatacacctaaccaagtttactatcaatccttatttcagcagaaaatgggatggagagttcaggtagttgatggcggtcttccagatatgtataataatagtgttttcttggatgatcagcaagttactttcttttggactttatccaaagattcgatatccattgctgctcgtgctgagaaaaagagtggttatctggccataggatttggtagcggaatggtgaacagctatgcttatgttgcttggattgatagtgctggtggtgggagagtgaacacttattggattgatggaactgatgcctctagtgtacatccaacagaagaaaatttgacttatgtaaggtgcaagtcagaaaatggaattattactttggagttcacacgacctttgagaccatcatgtagtcatagtaaggatccagtttgtaaaaacatcattgatccgtctacccctctcaaagttatttgggctatgggtgctggttggactaatggatctttaacagagaggaatatgcactctgttatgagcagtagacctgtaagagtgttgctcatgcgtggttctgcagaagccgagcaggacttgcgaccagtgttagcggtacatggattcatgatgtttcttgcttggggtattttgcttcctggtggagcagttgcagctaggtacttgaaacatgtaaagggtgatggttggtacaagattcatgtttacttgcagtactcgggtttgtcaattgtcatgcttgctcttctatttgctgtggctgaacttcgagctttccatgttggttcattacatgtgaagtttggaattattgcgatttttctgggttgtttgcaaccagtgaatgcgtccttcaggcctaaaaaaccacttaatggtgaagaggtatctccaaaaaggcgtctctgggagtacttgcacgtgaacatggggagatctgctattgttgcaggtatcgccgcacttttcactggcatgaagcatttaggggatcgatatgatgaaaatgtacatggtctgaatttagctctaatagcttggttcttgtttggagcattgatggtcgtgtatttagagtacggtgaaagacaaaagaggaaagagagagtttctggaagaggcagttgggtgctcggtaatcctgaagaagatgattctcttgatctgttaagcccaagcgggagacatgcagaaaaagagtcacaaatgtcagggagaatggaagttcagctagcacctttgaacaaatagatatggttggtacacaccatcttcatcaattttggaacttctcgccccatcaagattcgatggaggaaagaaaacacatctgttttcttgctcggcggactttcatttcatggtctaagagggttttctttttcttgcggtgatcatcgttacatttctactccaattcattaattagtcttgaagagtaagtactcatcccctcggttatagacatatacagtttgtatactagacacattctatcattttctctgcagccatgcagattttataggtttaggtaatcaaatcatacatgattttgtcatactacttttcatgcccttgacaatgagttgctctagctaagttctttctcttctttttcacctgtaaattatggtggtggtggtattcagtgaaaaaaaaaatactgatatattaacattttgttcttactgtaatttcaatcctactacatttgaattttattaccatatctataatggcattcttttcaggaacataaagtgaaataatgggttgatatttttcaaacaagcatgtggaatatattgtgggttttgaaaaggtgtctcaaattaatactttgatgcctctgaatatcttttttgagatgggtgtggttgattttcagggttaatttattggtctactggtttgaccagatctaaaataaatatataaatattaagggaaaaacaaatgatgcacaactaattcaatattggattgagttgtaggcattctctttagctattattttgaccagatctaaaataaataaataatattaagagcaaaacaaatgatgcacaactaattcaaagtacaacttatcagtattttacctaataatatttttaattggtaatattattttggagttcctacttttcacttttgttaaatgataatttaaatcgtttattttaaacttgtataaaatagtattatgaacttaatctttgtcaagttaaaacctattaataactatgactagattgttttttttttttgaaaggatg

SEQ ID NO: 96985 - DNA, 510 bp, Cannabis sativa
gaacaatcatctttcccaacccaagcactttcaaagtaaaaccgagagcgccactttaccacattatccattccctaaatcatatttgaacaagtaaggaggagggggcaatggtctgaatttattcgctcgagatggctcacttttgctgctggaaacatatcaaaccacttcgtattcccacaaactctgtcaagcctttcaaaaatgagattgttttgtcccccattgcaccaagtgtactgacttccttcaaaatcaacctccctgagcttacaatcatccaaagctctcttgaaattattaagtagataccccgattttggatgacctcccaacttctccttttgacccaaaatctcattgaaatccccccaccaacaaaggccccgagtacatcctcccgactctagtaagcagcttccaagaattagtccttcgacttggatctgggtccccatagaatcccgtaaacctccaccattagccctcctctttcctaatgaaaga

SEQ ID NO: 96986 - DNA, 614 bp, Cannabis sativa
tggtgacaaagctcctggttctgatgggcttaatgcacaattctatcaaaagaattggaccactgtgggagacagtttttgtgctgcaattcttgatgttcttaataatcattctgacatctcctcaattaatgaaaccattttggttctcattcccaaaaagcagaatgcttctcttcttaaggattttaggctgaagcctttgtactactatctacaaggttatacctaaggctattgctaataggctcaagttggttctgagtgatttggtttctaataatcaaagtgcctttcttagtgaccggattatctttgataatgtgctcattgctaatgaggtcattactgctactaataatcgaaaaggtggcaaagttggctgggctgctctgaaacttgacatggagaaagcatttgattgagtggagtggggtttcattcaagccatccttactaaatttgggtttccctctgcttttgtttctcttattcttaagtgtctttccactgtttctttcaagatctctattaataatattcttttaccttcttttactcccactagaggcattaggtaaggggatccactatccccatacctttttctccta

SEQ ID NO: 96987 - DNA, 788 bp, Cannabis sativa
  modified_base (75)..(77): a, c, t, g, unknown or other
tttaaacattgatttttaaattgtaaattatttcaaatttctcaaaattttataggatgtcttaaataactatannntacacgactataaaaaaatttagactaagaaattcttatagataccgaaatagttaggggttgcatcaatacacccattttgatggggtatattatagaagtacccaaaaatatttaatttgtttaagttaattttttttttcagtggggttacaaacccccatatcccataagtgtgtttgtcagtgcatttggcaccaccattcacttattaaaaataaatgtcaaggtgtaccttaaggtgttaaacactactagatatggtaaatcgctattaatataatttaatattgagtcccatatttttttaatttaataaataataaggtttttctttttatttcatgagtacgttcttttatattttatttacaaatttaattttttaaaaatatgattttaaaatttcaaaaatacatttttagcgacaaaaaaataaaaggtgtaagaaaacaataagaaatcaacatcataacaactataaataaattataaaacaacaaaaaataataagaaaatcaacctcataacaactataaattaactataaaacaaccaaaaaagaatatcaaacatgttaacgtaaattttgttaaccaataaatgagccttaaaataataaataaactttggaatattaataataataataattataaataaccataaataacaataaggtttttacgtggttttaaagtttaactcttc

SEQ ID NO: 96988 - DNA, 1306 bp, Cannabis sativa
ttggtcacaaatttgactaatactaaataaattagccattagtccttcaaccaacatcgcatttttaatctgggaaactcttcaaaattgagagttcccattccaaggacatttcctgctaagccattaccaaaggtgactttgccaaactgcattggcctgatatttatcaaaaagtctttgtcacctgccatatgtctagagcaaccaatgtcaaaataccgtatttgtgaggcaagacttttattagaaaaaccaactaggcatttttctttttcaactcctttttgtttcaaaccacaaagtttcttttgaaaatttttcaaattaccaaaataatctttttgtacatattctgtatgatgaaatatttaggcctactatgccacttcctatcacaaaaatgacaaattaggacaaacctccttacttgagatcttactctttttgtaattagtggagactttgcttttgcagatactacctttgcaacaaccgaatttaaatttgcagcaaaaaactttaatttgtagtaacaagaaaattttttgtaacactagattttacaaattttgtgtttcctttaattttagtaccatctgatccaagacactacaagaaaaaaagtctattggcaggacaaaaattgtacatagaaactctatttttcgtgccaacgtacatttaggcacgtcatgtcgtgcctctagagagtctactggcaataattaaacgtgaggcctaatagtaattatttaaataaaaatataataatatataatatacataaaaataaatatatatatatattagtcttttttggaaacagtatatatatattactttacaatatgtataaggatcgcatttataaataaaaatttataaacaaatttatataacatataaatgtattatttatatgaatatgaacatttaatacaaaatatttatcaacattcaaaatctataaacaaaaatatacaaatatttacaaaaaaatgaaaaatattattacaaaaaggagtaaaaaaaatttgttgaagatgccttgaactatatagatctgaacacgaataggccatgtccaaaccttaaactatcatcgggccattgtactgcctcgttgaaacccaacaattggggtcgccttgcaccaccaatctatgttttcgcctcgccgagaacccagtgtcgcaaactgttccttgtcgaactacgctgctccataatcacaggccggtgtgccagatctgatcatagcttgtgagagagattacgccgaggaggggcgatgtcttcaagg

SEQ ID NO: 96989 - DNA, 861 bp, Cannabis sativa
ttatggttatgaaactttatatgaacttgtattagaaatgagaaggttgtatattttgatatagagaaactttggtatatataagaaaataaagctgtatgttaattagcatatatggaatgctccctgctttgtacggcaaattagggtaatatggacattttaatgttccaacttattaacatattgatttattaaatgtaaattgtaaattttaatggtagtgctgacaaaataagttagtatgaaggaaatgcaagggtcattcgggcgctatgcctatcgcaaataggttgggaaattcgattgttttaagagtattataatattttctataattaaccctttacataatttatagaatagtttaaatgtatttgtagtgttatatatgtacacataaatattctttgaagttgtgaaaaaacctactcatagtaaatgtgggagtattacaaattattttttaattcacaaattataattatttcatttacgtaagtaaatgtttatctctcaatcttacactacctaaattgatctacttgatgcctaaattctcttcttgagtaataaaagcatcttcagtaacatcaccaaagccagaaaatgcatctcttagagattggtcttcagttccatatgaaagacctaaaatgccaagttcaaaagaataacgatcaaaccaaacaaaatagaataaacccaccatgtataacaatgttttcacttatataataagagtaaatattatttttgatcttgtattttacaaaagttaccaattagactttctgtttattaaatgataaaatagaccttgtattttccaaaatcgtacaaataggaccctgaattgat

SEQ ID NO: 96990 - DNA, 906 bp, Cannabis sativa
gatgctactagggatcttgttcttaatgaaggggttctccaatttgataggaaatctatcatagtaagatcgtggtctactaatttggatactctgaagttggttaaatcagttttgctttgggttcgattacatgatttagggctacaatattgagggaataaatatttgagtgctctttttagtacgatatcaaaaccgattatggtagataaagttacaaaggagaggtatatggtgagtttgctcgagttttggtggaaatggagattacgaattcaccacctcgaatcatccaatatcttaatgaacatgggagactagttgaatagaatgtcaattatgaatggctgccaataaagtataaaaattgtggaggatttggccatggaatggtggattgtagaaaaagggaaaatgttcaatgggtgagaaaaaaatcaaaaatagtgaaagagaagaaacaggaggctgatatttctgagcaaaaggactatgtaactaataataacctagaaggtcaaaaatagcctgcagagcttattgtgcaacatgctaaatctaattgttatacccatattttgagcaacaataagaagttgacatgtgtaacaaagctggaatatgaaccaactcaaattatgcatcaataaatgaatttaaatgactcacctcaggaaatacagttagtaaaaatactcgaactcgctgtcacataggcaacgacaagacatgagtaataactactgattgatgagaccagctaggtaaacaagtccatctcgagataaatagaatacataatggcattgtttggaacacgtagacaacgagtttgtagctcattgatccacatactcgtgagtatgttggaagaatgaagacaacaacttcaacattctccat

SEQ ID NO: 96991 - DNA, 761 bp, Cannabis sativa
actatgctggggacagagacaacagaagatctacatctgcctattttttcttgctaggaggaaattgtgttagctggaaagtctagctacaacctgctgtggcactctcaacagcagaagttgaatatgttgccacaatagaagctatcaaggaatctatctagctaaaagggctaatgactgaacttaagctacttaaaggagtacctacagtataaatagtcagtcaaagctgtatatttctatgcaaaaaccctatgtttcatgatagaacaaaacatatagggatcaaatatcactttatacgagataaagtgactcaaggggaagtagaagtagaaaaggtacctaataaagacaacccagcaaacattggatactaaaattgtgactctttataagttcatacaatgtatgaacttattaagaattggccctgaagactaagagtaggacctatcaagctagaaatcttagagataaacaaacactacattagaactcgttataagatgaattcaggtggaaattgttgagtgagttccacttataaccagtccttatacatattatccacatcagcatacaacaacaaataacagaaaacaagatcaaacctaggtggctttgcctatacaagaccaagaaccagaaccagaagttaattacaactgttttgtaactaacttcctgttggaattttatgccctaaataaaactcatttcaatctaatctgattataagattagaagtcatttat

SEQ ID NO: 96992 - DNA, 1012 bp, Cannabis sativa
  modified_base (566)..(567): a, c, t, g, unknown or other
  modified_base (697)..(697): a, c, t, g, unknown or other
gtccaatattcaatcatacatcaacgttgaatatatgatatacttatctatattaatggttgtgatatcaatatcatatctacagtggtttttgatcaaataatagctatggcatagctctaattagtaggcgcacgcatgcttgaaagtagaatcctaatcataattccaagccatacaccacttttaataattagttgtgtgctatataacagcatagtattttttaaggatgttaaaaatttaaacattatttaaaaataaaaaatgctaaaagatattagtggtgcctaacaccttctaatatgtcaatatcactattggtccaactaaatatcggatcccatataatttaatataatagcttttaattagggagtatcactaacttatcacaccgcgacatgtcgagatggtgctaagcaccactggtgcctaatagcaatgctctttgaaaatatagggtaaatagtggcataagtacccaaaattttatgattgtaaacagcataaacccaatgtttatttttagcggcataagtatctaatatttataaaactgtaanntttttctaattttgtcagtacagactctgatattgtcttaaacatggcacatataaggcctaaatttttgatcatcgggcctagatagaaatatatagtatcagctactttcaaatgttcttttaataanttcaaaacagagtctgtactgacaaaactagaagagaattacagttttacaaacattgggtacttatgccactaaaaataaacattgagtttacgccgcttacaaacataaaactttaggtacttatgccgctatttacccaaaaatataatattttattttatttcttttacatctttttttatactcttacttttttaaaagggaaatttgacaatatatgcttaaatatagcatatattgttttaatatactatgtaaaaaaaaattaaaaaaatactctccaattaattataatcccaactttaccctccc

SEQ ID NO: 96993 - DNA, 507 bp, Cannabis sativa
ctctctctctctctctctcgtggaaacctagcatcgcacgggatctcttctttgatctctcaatccagtcaggcccgtcggcccctcttgggcttaagtgtggttttggttgggatttttattggtactttggcgtgggcttcacggatcgattctcctctcattgtctttccttctctcctagttttcctttagtttgtcagtggttgggtttaagtcattcatcaataggtgtcttcactccaatttagtgttatggaggtggtgcaatggctgtgggttggactggttatggatttcgatagggggtttggttggtattaggtcttgggttgttagggtctaaggatgtgtcgggtcatgtggtgttgggctttgggcacaaatctgtggcaaaagtttattatcatcttctcgatttaagagtttggtggagaatggttattgttttgggtctgattcgtgttagacatttatatatataaactgaaatgtatatgtttaagt

SEQ ID NO: 96994 - DNA, 551 bp, Cannabis sativa
atattgtgtatttattgctcttttttatcaaaggaaataatatttttcagttgtctattttcttgttttggaaatttcttgtagaagagaagaaattctattgaaagttagtttttttggaaactttgactattcatcaagtacactatttttgccaggtatcaagtcatgttcatgatcggacacctatttggcaagtttccttttctgttttagtttgctgctgcagaactttattctgatgctacaaaacaggattttcttttaggaaagtttgtacaattgtggaatcgattttgtggttgtctctagggttcttatattctataaatagaacttatagaacaaccaagtataatgcatcacattttgaggaacatttgttgccagtcggcaggtggattagtattattaacccgggcatcatccccgtgcaatgccggtggattggttcagttattaccaagctctacgtgcttgccctatggtctagatgattgtggagggtctattttcttttaaatagccttgaaatcaataaccccgatgag

SEQ ID NO: 96995 - DNA, 1057 bp, Cannabis sativa
aaatgatcaattagaaataaataacattaagcagcaattaattaattacctgaagaactgaaatttgtgcctttaaaaagtggacatacttagaagcagcttggaacatttcagcagtggtcatcttatttccaccaggaatgagtttgcccaactcttgtgtcttctctgctatcttcctcctcctctctcgagccgccatactctgcggcgacaccaccttactactgctgctgctcctcctcttcaactcactaacatgatcagcaccagtgattaccatctcagcggcggtctcgctataaatattgttgttattaatcatcatcacttgctgattctgatcaaggtaattatcagcaacggctacttgttcgggtaataaaggagccagtagtagttgatcgtcaatgtgttgattaggatcatcgctgttagcataataaggctcattgctattgatgaagaactccatttctggatgatcagatggaaagccaggtcccgaataatcgagattattgttagtattaggatgatcatagtaataatcatattggaagggggaatatgggggttggggtgaggagaagaaagggttgtgatttgttgggtttgttgggttggagaagaacaatggttgaggaggatgaagagtgaggggatccacattatgattggtagtgaaagagtaggtgtttgataaaaaagacaatgtggatgatgatctttgtttctttgtttgtggaaaaacgacagtatctgggtttatgagattttggtggtgggaattgggataacaaggtgggaagttgttagagcagaaggttaaagccattggagctgtatagtatatactaactaaggtaagtgaggagtagaatttacagagtagtgattttacaaatgatgagtgtgaaagacagagagagatatacgatgtataaataagagagagatagcgaaagacgtgggaagtgggtagttgtgacctgagaaagtatagggattagtataaccgcataccatgcccctaaaataaataataataataata

SEQ ID NO: 96996 - DNA, 550 bp, Cannabis sativa
ggaaatagggaacacattactagctactccagcattaacaacccaatcattaaaaaagctacaatcagctgccattagatatctggtgcagggtctttaggctgaacaatggcaatacaagcatgggctggttcgaaatgtagaaggaagaatgggaatggacaaaatagggctcctggagaaaaaataaataacattaaaaattggttttttaaaagaaaataaaaaatataaattttaattggttgttaatttttttaattaggtgttaatttttttttaattgggtgtgatgtatttttattttttttaaaaaaagaaattttgataacctacaaacaaatacatcttatacaatcttaacttttaaaagtcatataaatcaatggctaaaaaaatgtatgcatagtataagaacaaaactatagtcactaccatataattattctatatatatatataagaaagaatgagatggtatatatatataaagaatttctcaaaaagaaaaaaaagattatacaacatattattcataaagtacgtacag

SEQ ID NO: 96997 - DNA, 654 bp, Cannabis sativa
gaatttttatgtagcaagctttggattttgcgagagaagactaaagttacataaaaattcaagcaatgacttcgcttcaaaagatcaaatgggtgaaagagtcattgggcgtgtgacagacttcaagtagtccttccattctaggaaggagggttgacctttcagacatggaaagcgacacgcatgcatctcttgagctctgggaagccccaagagaggcgtgcatgcgcccctagatttcttgggcaatttgtttcctccagtggattacaaggtattcaacggcttctagggcaaagactcgaaccctcagtaggatgtacaacactctggcagagacttcctaactggtttataatgtcttgagttgctttctctgatgtaactcccgggttgtagttacaccatgcgacagaaaccttctaagataactttgccaaaaatggcctgcctcaactaacagtaccataaccagcctgactggaggtctagtagacgccgacggtactgatggtctcctctcaactactaccattacaggatagttttttatcaacttcacggcccagcgaaaaggcaagcgaagtagtcgtcgtaacggattttgccctcgcgttagtagtggcactagagtcttgagctggatagagttat

SEQ ID NO: 96998 - DNA, 673 bp, Cannabis sativa
tattaaattaaaatgtatagaattctatattgacttgtaataataataataatacgttaactattatagtacttagcacctttaagtacccttaaagcatctccaatagtaatattttagagaatgcttcatgaggtagaaaacttatgtggcaacatataaagatgtgcgctaaaggaatgatatttctgaaatttgtattgatgacacacagtaatattgatgctatatttttatataataataaattaaaagtacaatatatataacactttaataaaaaaaattatatatatataataatgtgtgagattataattattatatttttaaaaagtattatactatattgaagtgtttttagaattaaatgtgtcaaaagtaatgtaaaaaaaaagataaaaaattattatatttttaaatgaagtggtaatatatattatataacactcttaaagaatattaacattagagatgctaatagtaaaaatatattatatgtaatatatttcaacagttatattatatcaacaagtacacataatatatatatggaatacttcttaatgggtattactcattaatcggtaataaataaatttaactgtaaatattaattttaaaaatattaaaccattaaattttggtctgatagcgaataataaaagagaaa

SEQ ID NO: 96999 - DNA, 533 bp, Cannabis sativa
acaacattcattttcatagaaataaatttcacatgacactcaccttaaaatgagccacacaccgacaaacacttgttttgacacggacacctctattaaacacttattttggcagccctattttttaaccatgagatgctcttagaaactagactcttcttgtcaagattctttttagtttgtttattgttcaagttactctgtgtacttccaatactaattactaacacaatgaattttatcaaacaaaattcaaatttcaataaattttccttcactttcagtttctactcttgtcacttataacattcgttctcaattctaatcttcttagtcaattctttatttctttaggaaaaattacataaaatacattttttttgtaaaattttacagaataaatattattttggaccatgtattatgcaaaagttactaattggactctctatctttgttgaataataaaaagaaccctatatttttcaaaatagtacaaataggatctaagcttttgtcaaaaaaaaaaaaaa

SEQ ID NO: 97000 - DNA, 546 bp, Cannabis sativa
tattaaaacatattaaaatagaataactcattaaatgcggagatgatagagtgtatttacaacttgcggactgtaaagtcttaagcgagataaggatatacaaactactgtcttgcgcattgatgagaaaccattctacatcaaaagtacaaagcgaggcatcaacctcgctttgtatgaagagaagtaaacgagattatgttgattgttagaacacttagtgtataatgtacattatacaaactaagcataacagttgaatgaacttgaacaacgaatagtgaggcacccatttggttataggaaggcatactctcagtaccttcactaataatcttcagatatcttttattaagattcactactctgtcgagtcagttctctcagatagaagctaacattcaaatgatgttgactgctatagttcatcttatcaccaagaactgcgattgtctgtcttcaatcgcaaaagcgacgagatttacattatcaacctcagaaagacacgggaagagctctagctcgctaccagggttattgttgcta

SEQ ID NO: 97001 - DNA, 717 bp, Cannabis sativa
gcaaattaaattactctgggaaattaaaaaagttttgatttttagacatttttttttttattatgtttaacactaatagacatgaaaaataaataaataaagacatgatataaatatattattaaaaccggtaccattttcacgtccaactttactaggcaacgctaatgtctagttcaactttgcttgacctgaccattcatttcacttttataaataaatttgattttatttactatgattagtcttagctcagaagtcgccgtcttattttggatttagatgcagtttgatggaggttgaattttgttactataatttgattttttactattacgattagtgttatctctgtgacatctgtagaatcttatctctgtcacataaatttgcgtgttttagtcttatctgtatgacatgcttttgttttgtttgtctcgttattggttcttcttttttctttaacaactcgccatcaaatcatggttagtggttggtaataacaagttctctgccacagaaagagtgtttagtagtgcaattacgtaccttacacaatacttgagtgctcaagcacacacgcagtgtccctacaggttaagcgttacagattctctattgaagaacaagacggatggttgttctcaagcctcatggacaaaaactaatcaggtgcgagtaaatttttaaacaaaatgaaggaaacactataagtga

SEQ ID NO: 97002 - DNA, 768 bp, Cannabis sativa
tccaccggcccaacatttgtattttgttccccaagtcggggatctacatcttcgtcctcgccttgggcggttccctatttagaaatgctcttccccttgtctgaactttaactggaggactctttctttttatccttggttagggcaaggttgtaacattctcgtgcaacttgttggtttcctctcacgcaccccaccccattctttgttgggaacttgacgcacgaatggaatatcgatgtaacagcttttaagtcgtataaggctggtcggcttagcatgacgttaaaggctgatggaacatccaataccaaaaattttgccatcaaagttatgctcttcgaagcttgcccaacaatgaggggtaggcaaattttacctaaaggtgcaacgctctggctcaagaaaccatatacgggctggaggtaagggattagatctttgagttggggcctcattttttcatatggcgttttgaacagaatatttgctgaggctccattatctatcatagtatgagccactgtttttcttgaccatttgtacttccacgactaatggatcattgtgcgggaagcaaaccttgacatcatcttcttcattgaattttattgtgggttcccctacccgtggtatttttggcttcctttcttctacggccaagaccatttctttttactcatgctgtaaggtttgggcatacctttccgagctttgcccaaatctccagctatatgcgagccctcaatgatgacttgcaaatgccca

SEQ ID NO: 97003 - DNA, 6264 bp, Cannabis sativa
gctgccgtggatgtctgctacaatctgtgtattgttaggatcccacattgaccaagtatgagattggttagtagtataggcacccacctctattaggctagcttctgggagtgagttctacctaagtggaaaagctagcgagttctacccaagtgattgtatcacaattttacaaatcatgcttaatgttcttgtaggtgtattaatccatacagggacagtaagcttgcaggatttgttgatattcacaattctttctgttcattgaacatagtgttacattgtgttaaattgtcgaggagtgctatgtaacattgaacataattttttctttttttgcactcttgtgtctcattgcttgatatgcgggtcacactctaatatatcatattttaatgaactttaaatcgttactggattgtacatgctgtgtttgcaatatttgtttttggtccaaatcttctattacaaagattgatattgacaaagtgtacccccaatattgccagattgatgaaaagatgaaagatgctcttcaggttgactgcacacgttatgctccaggcatcgaaataattagtgttcgtgtcacaaaaccaactatcccagaaagtataagaagaaactttgaacaaatggaagaggaacgcactaaggtatactccttaggaaccaatacaaagttcatttaccatttagataattccaagtggttgggtgaatgagtgtggagtgatgcagcgtttaaggttcaggtccttgcaagtgtatttatctattaaaagaatacacatagaagtttctcatattagcccaaactttggatcatttttgttaggatgaattaataatccatgttttttttttttgaaaaaaaaaagaattaataatccatgttaagatttccacattaaaaaggtttagaaatatttatgcatttataagaataaatgagctattctactcatcaattcttaatagtgaaggcctacattttgatccaagttggatttgatcatataggtattgattgctgtagagagacaaaaggtggttgagaaagagtcagagactaagaagaagttggctatcagcgaagccgagaagaatgctggtgttagtaagattctcatggaccagaagttaatggaaaaggaaagtgctaaaaagcaggatgaaattgagaaccaaatgtatttggctcgggaaaagggtcttgcagatgccgacttttacaggtatattttcaacaatacatgaaatttagtggtatgatataaaaaatcactgatggaattactcatcctgattgcagagtaattaaagaagctgaagcaaacaagttgaagctgaccccacaatttctcgagcttagatttatcgaagccattgccaacaacaccaaaattttctttggagagaaggtttgcgggttttcatttttaacgctaaccaatctatattagtgtcttttgttcatgaactttgagcaagctttaactggtgtgcactgcagctgccgaatatgatattggatcagcgtttgctgggaaactatatacaaggagtggctggagggctatctagggaacgtgacgcagacgtttcttagtctaagttatatgttctttgagcacagattcagagtcactagtttttgaatagtgaataagaaagcaagtcgagagtttaaggagtgcggctgtcttgtcttttgccattggttaaattcattgctttgtttatttattgcagtaacagtaacaagcatgcctaccactttgataaacaaagcaattgtcaacatacattgattagcacctgcactttgttcattgatccaattcaaaatcggattagcaaatgataatccacaatcagtttaattaaattaaattattattttatttgtctaatatatgaggtgacctagcttctattcttccaaaatcttattttttttttaaatggccaaaatcttagtttaaaactaaatctatataggggaaatgttttttttaaggggaaatgttattatttaatattaatagaatcaaaaagggaagtagaatttatcacacaggtaccattattatctttcatttcttgtgagaatattgttttcataattagtttacttaattttctatatagactaaatcctcaagcaatgaatatgaatatatgtatatcactttatagatgtaagattcattaaaagcaaaaagcattaaacatacattaataaatccaaattaaattaaaaataaatttgaacaaagatgaacaaaataattaaataaaaggtaaatatattattgttcagcttagctaagtatgttttattttgacatagttaactctatttggtggttagattatcctaattgtattcaaaatgttcttataatttatgctaattttcagttaattcgtgtcctcagccctttgtgaagttattttgcttgtgttctatgaggcttgtaaacacattttcaaatttagaatgtagtttcgtaatttaattattctcatcacaataaaaataatagtaattattataaaattacatgtttttttagttattagtaatcagtgcatgtcgttttcttatgatacagaattatttatgtaataatgtataaagtatgatcacatgttaatacgttttgagcaaaaaaaaaaaaaaagggtgttaatttgttaaactagagcatgacgacagctatcttttaagtatattattgttatagataacaaattctcgcgagatattgacgttaacggcgagaaagaaaaaactcaattattattattcacataaataataatatcttattaaaaaaaaaaaataaacaactatgcccccacgaaactagctggatccgagggaatcccaattcaagattccaccagttaagcaaattccattgactttgttatattttttcatgaactttgatagtcagaccaaaatattctgaaatataaaactttataaaggaaataataacaataataattaagagtagattaaaggaagcaaacctcttacagccggagccggtggttgttctccaagtacacaacacagtaaaagcttttctttttggaaaatccagtgagtgcatagctcaccacacacatatcttctcttctgttgtgtttcatgatattttttttaaagttaccgtaccttagagctattgaatattgattgttatgcatgacaggacaagtttgaccaccaataattgggctccaacatatattgggtgggtgacttgtaggctgttctttctatcttcctatcttttgatttttttattatcatttaataacatgtgtggcctgtttacttcatttcataggttacttttgtttctgtttttgttttgacttggagaatagtagttgagtatctaaaagtttgttcttttttagttttttttaagaaacaaattcttaatggttgttaacttggttggtaattttgagatcattttactctgccattaatgtattatggtatgtagttgtattgaataaaaatccttgatgatatataatttcttccatttgagtggctgtctttcaatcttatgtgggatttatctttttcttctattcgatgtgaaaagcacaaaaaggaagcttttcaatttgagattttcttcaaatggttgttttcattgattggagccataatctactcttgtttcctcctttgcaggatttatctgataatatttatttcatcacttcacggagtgaggagggggttttctcaagggggctaaaaatgtatgtggtagagagcaaaggaggcgccatagcatgcatgcttctagccctcctcttcttggggacatggccagctatcttgacccttttggagagaaggggcaggctgccacagcacacttatcttgattattcaataaccaatctcttggctgccataattattgccttgacatttggtgaaattgggaaaagcacactagagatgcccaactttctagtccagctctctcaggcaagcttccagtcactttctttttaagtttctgtgtattgtaagggaaacaacatactaaaatttccttcagtttgctgtaatggagctgcattgtatgtatgtatttggtttttgattcatgttagggtgactgtggcaggataattggccttctgtgatgtttgcaatggcaggaggagtggtgctcagccttggaaatctctcaactcagtatgcttgggcttttgttggtttatcagttacagaagtgatcactgcaagcataacagttgttataggtcctttcactctcattctctagccatttctaaatgttgatgtttatctgtgttgtctttttatatagagatgctgactttcttgcttctgctgtgatctttaataatggtgataggaacaaccttgaattactttttagacgatagaattaacagagccgagatccttttccccggcgtcggttgcttcttggttgcagtttgccttgcatccgctgtccactcatccaatgcagctgacaatgaagcaaagcttgaaggtttttcatctaaagaagggtatgtatagttcattaaggttatatgagaattatatttagtttatattcatttctgaattacttggtcagtaatagaaattggtcaatgtgttgggttaaaccattaggttgactctgcaattcttgttattagtttcgaaaatgaaagcatcgagcttgttggttgatgcaaaatgagaatgagcagaaaaatagctgcaccactatagatggcattgtagaagacagttttcagtacgggaaatcaattaaaaaattcatgcatataaatgaaaagtgataatctagtgttgagaaaatactacacagcgatacttggccatgcgaatttctatatagactgatgttttccacaaatttgacttttgacagggagttggaaatttctacattgcctagtaagggtaagaaaaaaaaaatctggagctctaatctttttacaccttgattgtttttatgtagtaattcttacattttctttaacattggatattgactgttgggttagatggggaaatggaagacggcggtgtctcttccgagaaggctaaagccgggactgcagagtttctggtgcagcttgagaaaagaagagcaatcaaagttagtagttagatgttcatcacctgacattcaaatcccaacatctcaaattctctcaatgacaattgataattacaactcttggtacaggtgtttgggaagagcactctcattgggctgtctatatgtttctttgctggtgtttgcttttctctcttctcaccagcattcaacttggcaacaaatgatcaatggcatacattaaaagacggggttcctcacttggttgtctacactgctttcttttacttctcaatatcctgttttatcattgccatcatcctcaacatcacattcctttactaccctgtgctggacttgcccaaatcatcatttaaggcttatatgaatgactggaatggcagaggctgggccttaatggctggtctgctatgcggatttggcaatggtctccaattcatgggaggccaagctgcagggtatgctgcagcagatgctgttcaggttggttcaaatgcatcttttctgtcttgattccaaacatattttctttgtgggataaacttgtgtgtggaaaatttgaacttaaccaaaatgcatcacatactaatatgaactttttttcgggtggtgattggcatggcaggcacttccattagtgagtacattttggggaattcttctgtttggagagtacagaaaatcatcaaaaagaacatatatattgctagtgagtatgttgtctatgtttattgtggctgttgctgttctcatggcatcagcagggcatcgaaaataggagtcagctgcatacacaaccctttgttttttttggttagtgttttgtgtaaagcaataagttagcatatggtttgataataatgttgtcaagatggctgcataagctttggtttggtcaattaccccctatattgctaattcggtcacatgagctttcataaggtaaattaaatgaaaatttgctgtacatatattctctaaatttatttctaatgtattgttattgctattattttgaagttttttcttgtatttactatcattggcaagcagttgtgtacagaagaaaatccttaga

SEQ ID NO: 97004 - DNA, 1068 bp, Cannabis sativa
  modified_base (113)..(126): a, c, t, g, unknown or other
tgtatttttataaaacaacaatggaacacaaaacagaacaagtgaaaacaacggtggaacaactaacaaataaccgtaaaacaacagtgaaaacttaacacagtacacagtannnnnnnnnnnnnntattttttaaaaaaattctgccccaccctataaaagaaaaaaagttagaaatttcagtatatgtgtaattatccctttaattatacaaagttataacactttaaaaaaaacgttaccggactataattaaaaaaaatgatgagtcacttgctaataaaaaaactaaatgatggaccttattgtcctaatttttctccaccagacatagcacctccacatggccaaaagtagaagacacgtggaattcaggtcagcactaaacaatcatgctagtgttgtgcagcccctatccctcaagatctcaaggttgcaacatggactcaaacaagaagaccatggagacatacaagatccacatctttaaggtttctgaaaaaagttcatccagatatcaaaatccccagaaaagacagagatacatatgcattggcaagaccctggccagacctctagctggccagccaagcgtgacatcccatataccgggcagcctccaaatatggttggtcggtcaatgcacgtattatgctctaacaactgtacttttcccataggccttctagaagattccaaattgtccacaacacatctacaacttcaaaacaacttgaactgcctacaaaagtaggaaagcttcgtcagagtgtaactaccatattttctagagatattttttttgtgtgttatatattttgactaacaacttgtaaaattgtaatactatataaagggtcttaaccctacttgaaagggacatgatttcattaattctacacatgcacttaagagctcagaaataataaggcattaacctctctcttttcttctcatcactttgcaagtctctaacacacattcacatcattgtaatactgaagaaaaccatgtcgagctttgtgccctaaataaaattctattaatttcaatgtaatcttttctatt

SEQ ID NO: 97005 - DNA, 610 bp, Cannabis sativa
gtcttagctttcttagaagatttcagagcaaatactgactgctcgttcttaacttccttggcatatctcttttgggcattgttactttctctagcgagaggtggcactcccgagataaccagaatgtcctctccttcaagaggaggaggtcgtaacctctggttacctgggttattgggcggatttggctggttttgtccattgccttatcgtttcacatattgctgaaagtaactgtgcgagataaggctttctatctcatccttcaattgacgacattattctgtcgtgtgccgtatgtccatatgaaacttacaaaatttttttgcatctcttttatgtctcgcatgcctcatgggctcaggtttacggaatgcgaccctgtgctcatgtgcgagatagatattttcctgagtttcattaagctcggtataaatagtgtagattggcacgtacttgtcatgcttcttctattttttcttgtctttggcttattccttagagtcatcttttctttttgtactagagcctcctggattgtcagcctttgttgagatgttacttattaagatagtgctgggtttacctcccgagccagtctttaacaact

SEQ ID NO: 97006 - DNA, 2427 bp, Cannabis sativa
tcctgggtaccaaccggtcgaccggttctataggtcccctagaatcgatcgatcggttctgtgctgggaacccaaaaattgatccctacaaactagttcgaccccaaactttctaataacttccagaatgcctgtataaattataataaaccataatcaagcaataaaactccgttacaaacataaaaacttattccttaaagctccaagtaagagctcataagctctaacttcactctaacatcttaataattagctaatccaccctaaaattacataaataatcacaactcaacttcagaatataattaacatcaaacaaacctaatctacacagccacctaaaaccgtaattcatgcaatattcaagttaaagcttaaagaaaacaagggtacgtaaaaacactggagaatctttaccttgagttgagatcctaaaaccttgcttcgactcttggattgaatcaaaattaatcccaacttcttgttgcttctaggtggttcgaaaaagagagggaaatgaagagagacaaatgtgcttttcctaggttttcttatttttccttccttcctaagtataaaaagcttttcctttatttaattaagcctttagtcagcaccaaaagcccaaataagacaaaagaaacatttggctaaagacctttttaccccctctagctaaattcaatggttaaaaacttccaagggtaaattggtcatttccaaactcgaaaattcctataattccaaagtctaacaatgacaccccgttattaaaataattctataccatacaaaacgcgactctctaatagttcaacgtctttttccactgctaccaaacacattacagagcaacgagaaattcataaaaatagcataattaattatatcaaacttaaattaatctccacaatatgtatattataaataataattaaatttcatgaataaaccttaatttatttaataatccaaagtgttaatcataaattggtctttacaatagcaatccaaccaagccaactctacaaatcactcacacataatttgagataaaaatacatacaaaaaaaagtttatttatgaatttaatcacataaaatatataccatttatctaattatcaaaaccctattccaaattaaaccactagctagtcttgcaattgtgtgtttggaatgagaatcccattcaaaaaataaactaataataaaacaaaagtgtacaaaattcattgccataaatattttataagaaaaattgctagaaagtaaaattataaagaggtagggtgcccacaccccatgtggaggagagctatgttaagccttagctccatttagtttttatttatatttttaataaaagccatacttttgttttcaagtactctttttttcccaactacttttgatactcaccaatgccacaaactagattttaaactattcattcttctttcttacacattataaattatttatatagtcataactcatactatcttataattgagtatctattttattattattaattaaaaaaattacttttaatgacaaaaaattttttttaattataatatttttttgtaattaaatatgatttttagttataataaaaaattacttataattaaaatatattattttagtataatttgttaaaaatttaattttaattataataaatattgtggttaaatatatttaatcataataaattttgtgactaatacatttagttatagaatttataatgataacataaaaatattgatttatacttagtcataaattttattgtgtaaaaataaattattagtatatacatatacataaatcatatttaattataagggtatgattgttattctcttatgagagaatatacaaggctatagctatatctagtatacatataagattatttataattaagttgttgttaatttattaaaaaaattatttgttggttttggttatactttgtgagataatcatacatatgtatatatataataatataataacacaagctcacatgatactagctagacatgagttgtttgttaattaatattattgaatcaaataataattgaaataaagaagaaaaagtgattggagttggagaaatgtgctgtggaaatataatgacactgtgtgtgttttttttattattattattatatgaagaaatatttatatatatttttatatatatatattttggggggagtgggaaaaaaatgaagaaaaaagagggaaaataaaaattatattcagtcatcatttgattgattgtgggggcatgttagaggacaattgagaaagcaaaaaattaaaattaaaacaattgcaaagagaaaacaattaaattttgtgggaaatttagctcaaaacatgagccaatattattttg

SEQ ID NO: 97007 - DNA, 748 bp, Cannabis sativa
tttataatcactataaaatcgtgtttgaacagctaaagaagagcataaaaagagcaccataaattaaatagagtacttggtaatgaagagagtataattatatgaaaacaaaagcgtcgttaaagatttacttcagaaataaaaaaataccacagatttgaaattcaataacattgcaaaataaaagactcatctatttttctttcatttagaattatgtagttcataatagctccttcctacagcaacataaattaaatagaatacttggtaatgaagatgagtataataatatgaaaataaaagcatcattaaagatttgctttagaaatagataactaacacagatttaaaattcaacgacattgcaaaataaaagactcaaacatacgtgaagaagaagaagatcatgcaatgcaaaattcaataaagtaaaaactaattatggtagtgacttattaatcgcgaggagattgggaattactttagggagaattttatgcaagtgtatgaatcccaaaatccaatcattggcagtgactttgatgctctgttcttggagagtgttacggatggggaaaacgcagacattagtagatgcccgactgtggaagaaataaaagctgttgtctatcagatgcatcctctcaaatccccggggccggatggtttctcgggcatcttttacagaaaatattggcatattgttggagtaaaagtgtgcgagatggtgcaaggcttctttgaa

SEQ ID NO: 97008 - DNA, 643 bp, Cannabis sativa
tttgggtctatcccggtttcggttgtacctaacaatattttgtgtaacgaccgagaggtctaacttatttgaatctatgatatagacgcctttttctaaaaaaaaaaaagactactcatagtagttttgataaagggtgacactattttgttcaagaatttctcaaagataagtttcgctaatttttatttcttgtcaaaaaagaaaatagttgaacatttctttcttatatatatatatatatcttaccattttgtttatttagtgtgctaatcaaatttatactttatttatttattcggtaggtttgcttaaattgttcatttagattgagtgtcttttttcatagttaaatagttgtctaaatttatggtggaaattgtattgtagatccactttactttatttattttcatttttaccattattttcatattccttaaaatatacttaattttataaatgatgtccccattataccctttatattaatataaatcatgtgctacacttaggcaagagtatattaggcaactcactcataaaagttagtagatttaaataaagtatcatataagagtattttttattaatggataaaaaaaaagatgtatttattaatttatcccaaatttatgtaact

SEQ ID NO: 97009 - DNA, 562 bp, Cannabis sativa
tttgtttgagatctactccttcttttactagttgtaattttatgaatgttagtagacgttgtaactatgttgcccataatgtggctaagtgggcttttaccctccagaggtttggctatataccggtctcctccttgccgaaaaacctgctttgtaatgaccgtgaggtctaattacgttttccttatctaaagcaattcgacgctaatttttagaaaaaaaaaagactatggacatttttgttttccgcatatagaaaattataattataatgaaaacttttatttgtactctaaaaataaaaatctaaaaatttaaagtaactttattttaataattttatttgtaaaataattctttttcaagagataagttcataaagcattattttttataaaatatttacatttttatatttgaaaatatttttttatatatatatttttacgattttctatagtaacaatatgaaaataataagaacactacatgaaaataataggaaaataacatcaaaataatatcaaaataacacaaaaatataatatataaataacaaaaa

SEQ ID NO: 97010 - DNA, 547 bp, Cannabis sativa
gtctttagcaaatggtgcagctgctggatcaagattatttctctgtttagttacaagaccctgcatgaaataataatgagatgtactctctcatattagtagctaagaaaatcttcaagaaattctgagacagacggccagacaattataagcatttaagaaagcacaatttgcaaaattaagctatattacatcgttatgggaattatcaacccattaactactcagcaaaaacatacaagttcattaaaattttagacgtgtgcttgtagtgaggagaaaactataaatttatttctacaaaaatgactacttacgcaggcagaaatagtaaaaccttacatctttgtcgagcaagaagaatagtttgttagcagttgtttcatcgttccctgtcattcttgctgcagcctgtatggccgtgttaagaacaccaagccctgcactgaaatacaaaataaacaagaggtgagacaaagttgaaaaatggacgcacatgcaatagaccaaaacataacactagattaagttgctaagtttgaatacc

SEQ ID NO: 97011 - DNA, 554 bp, Cannabis sativa
aaatattaaatataggctttgaaatctaatttacatatatatgacatatcaaatatcataaaaatacctaaaaatagaaaaatattatataaattggtcaaacttaaaagtgttatattttttttttgtagcataaaagtgccatatttaagtaaacaacttttaaaatcccatagtgagtgtaaatttctcatttttccacgctattatttcatcccttttgatagggactattttaacctaatcatattttcaattttaatatgattaaaataattccaagtggactcatttttttattatatttaatatatatatatatatatatgcattatattgtaataactaaaataaaaaaaataaaaaaaatttcaattttaaaaaaaaaattagcttaactttaaaatgtattgaaatagttttatttttttatttgttattttttataaaatgaattttaatttttagaataatacattatggactcgtttggaacgttgtattaggtcgcattgtattgtattgtattatattgaattggattatatatcata

SEQ ID NO: 97012 - DNA, 701 bp, Cannabis sativa
aacatctaaataatactaaaataataataaaaaaaataatatataaataataaaaaatcaataacaaactaacaagagtacaacacaaaaaattgtattttctataaataaaattaaaaaacaataaaaatatttaaatttctacgaaatcgtatttaagtaattttgtttttgtttttgtgtatttgtgaaataatctcatttttcaatttatttctgtttggttttatttttattttcaatttttttcattagaaacagagtaaataccattttagactttatgttttgcaaaagttactaatttgactaattgttttgttaaattacaaaatagatcctgtattttctaaaatagtataaattggaccttgaattgattttttgtcaaaataaatttaataataatctaatttagagttattatgacaaaaccaagtgtattttttgtatctgttcgtgctagaaattatctttaaatttgttatattaaaaaatttatggaaaattgtgcaagattatttatgcttaaggtcctaattaaaaggctctattaatttcaaatgttttttttaattatcattatcattattattattttactacacaaaaactccttaagttttaaaaataatattttctatatcttttatacaagttcaacaatacattgtttagagtttagaaaaaaaaaaaaaaaa

SEQ ID NO: 97013 - DNA, 843 bp, Cannabis sativa
cattttcccttatggatcacgggagaactattggctctaacttaccaacacttggtgtgcatatgttgcacacccaaatacctttaaatgggacatatcaggtggtttagcggacttgctctcttcaggatttttgaactccgtagcacttgaatgacatctgtttatcaagtaagttgttataagtgttgctctccccaaaaactagtggccaacctagcttgaaaaggagcatacatatttatttgtttatgatagttttattcatcatttatgccactctattttgttgtagggaaattctaacagttctgtgtctttgaatacctacccatttgcaatatgtgtcaaacatatcatgcaacactctaagcaactatctgtccttagagtcttaaccattttgttagtcaagttttccattagggttttcacattttgaaacttagcaaaagcatcatttttatgttttaaaagaaatacccaaaatttcctagaatagtcatctactatagatagaaaataactactccccatgtgagttggtaccttttaaggaccctactccacccatgagttagtacttttttaggaccccttaaataaacatgtttgcattctagaatgtctttagacttatgtgtcccaactttaaatttaagcctataatacttacccaatatgcaatgctcacaaaaattaactttacttactttatctttgcacaaaagattctgctcactcattatttgtaaacctctttcacttatgtgtccaagccttcttccacattgttgccttagaatctttaagaacttttgttgttgtgttgtagcaatttta

SEQ ID NO: 97014 - DNA, 579 bp, Cannabis sativa
atgtgtctatgcttacgttcagcttgcctattttgagctgaggtgtgtggaatgcgggatgtcaaactggtagagtccatttttaagccgacccttgagtaccacttgttttgtcaccttgttcttcacaagacacacataaaaaaagaattcaacatagacattattatcagaggtaagttttgaaatactaagtaggtttttggtaatttgtagaacatgtaaaacttccttcaaaactaatggagatatagacaaagtttgtagagaaccaagtccaatatgatgaatagaaagcttattaccattacctactatgagtactctcattaccattgtagtcttctttcagattcatcctgttaagttcagctgtgatatggttactagcaccactatcagcaaaccaagagtcatggtcaagagtgtccggagaggctgtgtaagcaactaaattatttgggttttcggtctggttattatttgtcccactaggtgcttgacctatataactctcatcgtatctattataccaataagtagctgaatgaccagacttgccatagacttggcaagttg

SEQ ID NO: 97015 - DNA, 670 bp, Cannabis sativa
ccaaggatgatacttgtaatatggctttgagcaaattttatatatatttatatacgtccattcagaaaggaaaaacttcagtcgatgccaacacactaagtcctgcacttggtatgttaccatcttagacatattgactcaagatctaagaagttaagatcaaactataaatgctatgatacccaaaataatactgtaacttttaaggcaccataaatttacataacaagaaatacaaaatcttatttccaaaaattaaaaaaaaaacatcaaaatggactgtaaaagtaacaacaatagtatgatgtcgtcacaaactcaggcagatgaacaatgagctacaaataaaaataccctttttaggcaaattaaaaaaaaaagtctatttcaaaaaataaaaaaagtctgtttatatcttcttcttttttttttttacaaaacttccaacaacgtttacattttcattttaatagctaacatcaccaccataatcatagaaacgataaccatatagtgatgaaaactagacctctttgagcgtctgtgttgaccatgaacaagtaagccagtccaagaatctccattccatctcttcccacatgcttcatcatcatctccaactcctcctcttcctacaataaaatcacgcattctctctctctctctctct

SEQ ID NO: 97016 - DNA, 1408 bp, Cannabis sativa
atgtatacgttggtcacacttaaaagataataataagaaaaaatctcataaaataaattagtgatgtttttttttatattcctggcctttaaaaaaattgtccccaacagtcaacgccacagatgctcgtgcatgcacgactaattattttaggccattctcagttataccgtataattgtctgtttaagattttacaactacatattaaccacctatctttactaatatttggttaatgtgtttctactttactatgtcttttaacttatttcccttatcttaattagaatatctttgattttatgttggaacctttataagtagattcgaattaagctcccaaacttggcttgtgtcaaactctagcttggcaattattatatgctacactagtgtttggttgtgttatatgaccaaatttgataatgttgttagatacataaaatataaaacagaggtatgcaaggcactacaattcatgatgaaagttacttgtattattctctaatcatttcaattttttttttataggattggattttgataggttgagattaaatgataaaagtctataagtactcttcttttttgtaaaaacaaaagagagattgtccaagatgggaaagatggttcctttcttgtttatttctttgaccatagtcattatattgagtttctttcctatgaggccaaacccttttaaggtcatttccaaacaaggccttattagttctgtccaaaaccttcatggagtagttgatcaagacaaccttcacagaactgagtttggtaattggattttcctatttgttcaactttgaatatgtattctatttagaaacattaataatgtgtgttctgttttggtagttaatgtagaagaagaggagaattgtgacttgtttacaggtcattgggttccagaaccgagtggctctctttataccaatttaagctgtaaaactattcctgaatcgaagaattgtttcaaaaatggaagacaagatgtgaattttcttaattggaaatggaaacctgaaaactgtgagttgccaaggtttgatgctaaggcctttttggagatggttagaggcaaaaaaatggcttttattggagactcattggctaggaaccatgttgagtctttgctttgtttattgtctcaggtcagtacacacctttttttcttcttcttaccattcattgcatcatgcatttaatttgttatagtctttgaaactttaatttatagtcaaatttataaataacaatagctataaagatgttatgtacatatcaatatcatgtcactttttcttgaaactactaaatatgccaaatgaatattgattattgaactcaatatggaaaatatatcaaatgtttgctcttgcaatttgtggcca

SEQ ID NO: 97017 - DNA, 500 bp, Cannabis sativa
aattatactattttaattattattaaaataaaaaactaaaatattaaataaaactaacactacgtggcttggcacgtaacaatcacctagtatatacaatacatactaataaaattagaataaaatataatttgtttttacgtgagaataaaatataatttaaatactattaaaatatttttagagaaagaatagtacttgagttattgggagtgccttaagccatctctaatagtaaaacttaaattttgtgttaaatcaacaccaaaaaattactatttaagcattaatttttttttttcaattctaatcttttttttttttgaaaaatgcgtttataaataaaattgaagttagaccttatggtcattacaaaagatattaacaggtatagcagatatctctaatcacaataccaaaaattacaccagattttatattttatattattctattatttttttaatataataaaaatattttgatactaaatatatata

SEQ ID NO: 97018 - DNA, 821 bp, Cannabis sativa
ggcaagatttagcctatgccatgagcataactagtagttatattattgatcctggaaacaagtgctaggatgcagtcaagtgggtaatgaggtatgtgaaagggtccttaaccactgtctagtctataaagctagaaggaaagaaggctgtgaagttgagggttttgtagactcagactgctggctatattaactcaagaaggttcctcacaggttatattttcacagctctaggtggatgtataagctgaaaatcaaatctcccaaaagtggtagcactgtcatctaaagaggttgagtatatggctgctataggggcaaaaaagaagctatttggttgaaaggtctcaccaagaaactagggttcaaatctgaagatatgacagtacactgtgataatcaaagtactttgcacttaatgaagaacctaatactccatgaaaggtcaaaacatatttacataaagttgcacttcattagagacatcattgtcaagaaggagattcaagtaaagaaggtgtgcactgatcacaatctagctgatatttttaccaaatgtattactcaagccaaattcagacactgtctggatttggtaaacatcagtgacattggatgaatatcacatccaactgctgaaggttcaacaactctctctagctatgcgatcgagacctagtgtctaggtggatttgttagagtatggtctagtcactaagtcttgtacacgtggcactctcttatttgtgtcttaagtcttagttagttaaggtagttagtcctataattagaaaaccgatcattcaattgtataactaaca

SEQ ID NO: 97019 - DNA, 798 bp, Cannabis sativa
tactatagtagacacgtataaatatacgtatacacatgcaggtatatatgtatacaatacagtcaagcaatatgatagtcacatttcattacaagatgatcacgtggtagaccctaaaaaaatatataacatataatagtttttctatattaagcttgtggtcagaatttgaagtataatataattaggctatcagatcataaatctcttgcatatatatacttacacagttaccatccttaatcaactcaacacatctttaacgaatataaaaatctaattatatattccgttctaaataactccttctataatataatttaagatttttgcagttttaatttgacagtcctatgaaaataaatatatatacatatgaaaataaattttaatatatattgttcaaaaatatatatgtctctttttatattaaatataattatttaataaaaattattagtttaacaatttattttttatttttatgttaaaattatattatttataatatctaaacttatttacttatttgatagtttaataaaaaaaaaatatacaaaagatataaaaaccaacttttataacacaaatacttcacacacggtgttataaatttttatatattttttaatatttgatttctcaaaatactttttgggcacatcatgtatgcaattgtgatgttactctttaaccatcttactccattctctttttttctttttctttttttttttttcaattctaattttgaactgaatacacacgtgatttaatcttatttttacagtgtaatat

SEQ ID NO: 97020 - DNA, 559 bp, Cannabis sativa
  modified_base (516)..(524): a, c, t, g, unknown or other
tcggggatgagtgtccaaaccgtgtcccaatctgtgcctgccattagcctagcaggacctcgtcagagctcctggagcaaaaggtcctcgaagggcagcacctgaactaaggacaaacgacaacggagggggtatacccctcaatacactcaatacacggagcttacggacacacatgagcgtgtatactttgccactaggcagaatacgcattagcggaagcctcctcccctgtatagggatagctcccagagggatcccagtaaaaggtgtgaatataacaacgacattgggcacaacactaatgaatgcaagaacctaaaagatgaaattgagaacctaatcaaattaggtcatttgtatgaatggatcaagaaccgattactccatctaaacccggctccagcaggaggccctttacctcagggaggaccaggtagtatgctcggagaacaagtactcggtgtaccccccggaggagcactccctaaactggtgggttttatgccctaaatnnnnnnnnnttcatataatcagatttacttattcataaagatca

SEQ ID NO: 97021 - DNA, 2261 bp, Cannabis sativa
ctgcatgctcgaactaaacatattaaaaacgatctatattttgtccgtgataaggtgcttaacaaggaaattcaagtgcatcatattcctactgagcaccagattgcagactgcctcacaaagcctatctctagtaatcggtttcaagtattgagaagcaaactcagtgtctcttgcccagaggacacttcatttgagggggactgttaagagtagaagagttagttaatcctctcaactaactttctgttattttctctgtattcaaactcactgtaacaactttctattagttgtgtgggtctgttttcttttcttctgcttcctcttctcttgtatataaatcattttgttctggcttctcattaatcaatacagagaattcttttcattcgtttatgtttacatggtatcagagcgaaatcgttttctctcttctggtctttatcttcgtttcttctctgcaacttcaagccttcgttcatggctgtcaatggaggttcttctcaaaactcaggtctcaatctacctcgttcagctcctgttacgttctcgcactccctctctgtcagattagatgaacacaactatctcccctggcgacatcaagtgtttgctgccatcaaaggaagtcgccttcaacatcacctcgatcctacgagtgcacctctgaaatttctcacaaatgaagatcgcatacataatcgacactcacctgagtatgaagtctgggatcaacaagacagtattcttgtttcttggttactttcttcaatgtctgaaaaattgctcacacgcatggttgggtgtgaaactgcagcacagatttgggagactctttgcacatactacacagccctaaacagagcaaacattgggaaatacaagactcaactcagaaattctaagatgaagggttctctcaatgattttctactgaaaatcaagaatcttgttgatcttcttgcctccattggacatcccatgtctactcaagatcacatagaagctatttttaatggactatctagtgaatacaatgtttttgtgacttctgtcaacacacggctggacaattacacagttgcagagattgaggcattgcttatggctcaagaagtcagattagataaagactctgaagaacttgacatagccaaactagaagctaatctggtccttaccaaacctttcacaggaggtagaggtacattctcttccccttactatccttcctctaactatcaatctcatcctactatgttcaggagtgcccctggcacatattctcagcatcatccacctcctggctttagtttttctcagcctcattctcagtcacgaggaactactccagaccgtggacacacacaaccaaatagaggaggaaatgtgcaaggccgtggtcagtattcggcttggggacaaagggctcaatatcagctatgtcacaagatgggtcatacggttcacaagtgcttctatagatttgataagtctttcacaggtcctgagacttttcaaggatttaatggcagtgctaatcttgctgaatgttcacatttgtatgcctctcctgaggtggttcaagacaacagttggtatcctgattctggagctactcatcacctcacccccaatgcccaaaatctgatgtattccactgaatatggaggagatcagcagattcacatgggtgatggctctggactcaacatacaaagtattggtaaaaccttcatcctttctcctttccattctcaacagcttgtgttaaataatcttttacatgttcctcacataaccaagaatcttcttagtgtgtctcagtttgccaaagataattgtgtctattttgaatttcacccatctcactgttgtgtcaaagatcaggtcactctgaagaccttgttggttgggaagcttgatcaaggtctatacaaatttgactccattcaacttcaaaatattgctaccaccaaaagaagtctcacctcccaaaccgagtctcctacagatcttaggcaccatcataaagaacaatgtaataatacatccataccacaaagaaattctctcttttccctttggcacaatcgattagggcacccaacagctaaaattgtacaaagtgctctttctacttgtaatatcaaaataagcaataaaacttatgctaatttttctgatccttgtgcttcttgctgcttagggaaacatcataagttccctttccctatttccactactgaatacactga

SEQ ID NO: 97022 - DNA, 530 bp, Cannabis sativa
tcagttttaaactgacacttatacctatggtatcggttcataaaaccgacacctattctacagtgacaaaaagtcaaagtttaagtatcggttataaaccgagactaataagtttttggtgacgttttacaactgagacaaaaagtatacatatatattttttcctttagtgtcggtttaaaaccgagactaaaaaggatcttttcgaagaaaaaaaataattattaaaaataggctttaataattttaaaatagaaaatttaaaatgctataaacataaaataaattatacatataaattagtaaaatataaaaataaattaaattttaataatacatttagagattattattacataacaaattatatattacaaaatatacattataataaatacatattattgataattgtggtgaaaaacaccctcaatacttggccaaatcagtgccaattaacaacaagaacaacaccaacataacaagcaaacaagattaatacaaaacagaaaactaaaaccagaaatgaa

SEQ ID NO: 97023 - DNA, 636 bp, Cannabis sativa
tgtcaaagcagcgcgacctggagtgttcggtctcgggacatttgggaacagtattttgtagtcacttagcgacctgattaatatgtattttggtctattatgttataaaaatttaaaaatgggatcccggcttttgtaaatattttgatataatataaagtttagtatttaatataaaagttttaatttgacacgattttcaagaaaattctttgattagcaaagtttgcactgtaattaaaagagccctgcagcgtgccttaacattagggcgttacagcaagggtcagtcaaagaatgattgagtcaatgtataaggcctaaggatcgttaatctttgaaatccatgcttaaaagtcttcgggtatatccgtgcaacttggaggtcaaccctgtaacaactcatgagtagagttagtaatatcaactcacaaggttacgatcgttagaggatattcgtagtgatatgttaggaattgtatctttccacaaacataagattcaaagatctctttcttatctttccaacgcatcttaaattgtccaatttttatgtatatcaagaaagtgaaggccaaaaatactaagactgtcgaattgtgacagcttggtatgcgagctgacagctcccatgca

SEQ ID NO: 97024 - DNA, 911 bp, Cannabis sativa
  modified_base (260)..(268): a, c, t, g, unknown or other
ctcggcacgacccgtaggtccgatatttttcgtgtcactcagatttatgtcgtgctttactcgtgctgacccatctttcttaaacaggccaacccatttttatattcgagattaaattcgtgctttactttttcatattttttttttacaattactaaattatatgtatatttcaaagcgttagttatatttatatagttgttgaacaatattttataaataatcatataaaaaaattattaacatcattagaatttaannnnnnnnntataaatactcaaatttttatgtcacaccttataaataaattaatatataatcttaattttttatgatttaatagaataattataatattaaatattatatttaagttttattattattttaatctatttatacttaataaattcatatcttagtattattaataataaattataaagttttttaatatgttgtgtcgtgcttttcgggcatgtcgtgtgtcatgtttttcggactggtctattcgtgtttatgtgtcgtatctttcatgtttttcgtgtcgtgtctagcttaatgacatttttcgtgtcatatcgtgtcaatttgtcgcatcgtaccgtgttgtatccaagtttgtatttttttgtgtccaactcgtgccaatttcgtattgtgtcagaaagtccaattcatatttacagtactaattttgagtaaaactaatgactcgaggcttagttaagtgatcatataaaatattaatggggtatgtgtgtaagggtcgtaggatcaaacactcaacaaatataatataataatatgtttttaagaaaaaaaataataaataaataaacaaaaagtgaaactaataatttatttttatttttattaataaatttcagtatgcttataaatatatgata

SEQ ID NO: 97025 - DNA, 514 bp, Cannabis sativa
cttaaatctaacaatttcaatagtacatgttaaagtttaaggataaaaatcctcattagtctaaaaaaaaattatttatcaaaaataataaaatatctagggccatgacactctcagccttctagctctgtcatttatatattcaataacagagttagattaaaatgaaaaaattacattatatacccactttactttgttattttaattttaatttttatttctatattatttaaaatatactcacttttatagatgatgtctctattataatataaataatataacaaaaatttgacataaagtatgattaattaattgaattaacatctaattcaaatttaaattaagattttatgtaaaaaaaaataattatataattttgttgatatttttaaattgaatttaaatatttaaaattatttgaaaaaaaaatttaattaattgatctaatgtaacgtccccgcttcaagcctccattgggtccttccacccacggaataatggctcttat

SEQ ID NO: 97026 - DNA, 516 bp, Cannabis sativa
aaaaagaaactattgtattttcctaattagttaaattattgaaaaaatgggtcagtcacgccccaaatcatacaggttataatggagtactaaaaaaataaaaaaattacattatatacccattttactttatatgctttaatttaaacttttattttcatattctttaagatatacctacttttatagatgatgtctcaattatactctttaagttaatgtaaattatatgttagacttaagtgaagagtgatgatttattggacaatccacttacaaaagtgagtacattctaattaaatataatatgagagtatttttgattaatggatattaaaagaagatattcttcaacttattccaaaaaaaaaaaacaagagaagttgaaaaatacccttttttcatacactaaccaaatttacccttaaataaaatttaatttaaatatacctctttttatgagtattgtactcaaattatccacataactaacacataatttcaaacataatagat

SEQ ID NO: 97027 - DNA, 942 bp, Cannabis sativa
ccagaacgggtacgaagcagctatgataaggcgtcactgaacggtgggaatcaaatcgattcacattctccagatctaacagttgggataaaagctcctaagggtggctggaaatgcttgagtatttgtcggacaccaattaaatgcgtcggatcattaatggacgggaaacgaatccttgcatgcaaaaagcaataaattttattgatgactgtcaaaaatgcaacccacgcgcccgaggcacgtgctaagaaatcaatgagagagccggaggaacctgcaagcctcgtttactttgcaccaaacgaggcttggggggtaaatgttgcccttaatttcacccaaaatacatggacgaatatgacaacgacatgtgaatctaacaagcacgactattagataaatcgactaagtcttcttgcatcaagagtgtgaacgagaatattcctcccggaggagaggtgaaggctccacatactcctaaaaaccaagggaatgctaaggtatctccgggaggtactggaccttatttgaacagtcacctctcatttaatgccgcatgggagaaaacgtattagaactgccataagcaatgtgtctgacggcgtaacccctcttttgcagctattacgttatgattaataaggctagtgagggctactttatgagggatcacatcaatcaagaagggctaaaggattttatccacctaacccttaaggtgcctacagtataggccatgtctttcctattttgcatcgactaggaatatgtgcccctatcaaacctgcacaaaaagacagtgattcagttctagggatcactccagaaaaacactataaataccgcccaaatgcactaagatgggggtcgagaattctgggttcataagaattaaagagagcaactaagaggaatatctaccaagaacattctctgtaa

SEQ ID NO: 97028 - DNA, 725 bp, Cannabis sativa
agtgaccataaaccccaaactacattaaacttcattcatatgcctagaatccaattttattttcctaagaaataggagatctagataagtccacatcaattccaagaaagaataatcatgaggatttagggagcaaaagaaggaaaatttaaaagacaggagccacccgcaagccctagaaaattcgacagtcaagatgaccaaagctgaaagggaaatatagtcgagcaataaatgcttcaccaatggaagaaggggaaaacacctaagacaccagaataggtctaacgagaacaaagataaaatcactataataaaactttgacggaacagacaaagagaacaccatacaaaataccagaaccaagcggcaactaaaaacacagccaccatccaaagggctcgattccaaaccctaaaacatcagtgaaggtcattggagcgaagaggccaggagggagaaccccaaaactagatttaagagaatgaaagataaagcagagaaaaattcttaggagaaaaggacctgttgaggaagctcattaggaaccaccttcaaatcggacaaggcgattttgaaatcgtctgtacgaggagcattttatttctttttataaaatttccaaacaataattgaaaatactttttaaaagttttgatatcataagaagtttatccctttctgatctattatttttttggatgatattaacaattaatgattt

SEQ ID NO: 97029 - DNA, 550 bp, Cannabis sativa
gttatttttgaaaataattgtcaaaataaggtggcccatgaaaatttcctttttatttttaacaatcaacacaaagattataggcctcaagtttgggtggaccctaaacacgaatttaaccgatttaacttaaagtcagacttagtgttactttatttataatagtactagacactttgatacttataataatgctcaaacaattcttatgacatacaaacacacataaacataaataaatataaaaaggtggcttgaataattttatatatatgatcgatctagatctatctctatcaaaagttaattgatattgcataattatatatctgtttttgcaataactagcagcagtaataattgtactactttactacttatttatgtaactgtactctctggcaagtggcaaccccactcaacccccttcaaatttataataactatagttgattgattatattttataaaacagtgatattaacatgtatttataatgtatttacctaattaggatttttttacttgaattttgatataataaattata

SEQ ID NO: 97030 - DNA, 824 bp, Cannabis sativa
tatttttttttgtatataataaataattaaatacatttttagtataaaataatttattatagattctttcaatcaaaaaaatatttttttttttttaaaaaaaaagttagattgtacccgtgttaatttttaactgtaacttcttataaattattcaataagttatttttaactagttaccaaacacttttttattacattttttttttaaaaaaataacttttagttttttcaaaaattgtgccaattaggggtcttaaatgtagtgtttattcaattatcaaaactctattatagaagtaagaattaataatataaagaaatctaagaataattgacgatcatattttctccaatgtttgcaagaaaatattgttgtaaataatggatatgagcattcattaattgagaaccgttcaatttttgaacataatgaaaatggaaagttctatttttattgtgccaattgtcaaatatttcaagaaactttgtcaagcaaagaaaattgataacaagtgattaagaaaacacaaagagtgaaaagagagtcaaactcaagtatatgactttttactcaatttccaatttggaacaccatgtaaatgttacaacaaaattagaaacaacttaattatttccaattattttagaaatcctatatatgatgcaataataataaagaaaaatgcttcatcaattttgcttatatgtatatagagagagggacggagctaaaattgaaatttagaaaggggccaaaaagaaaaaactaaaattaggaggggcaaattataatttttaaagaaattagaaaaaaaaaaaaa

SEQ ID NO: 97031 - DNA, 666 bp, Cannabis sativa
caagtatttaagtatttgttttatccttactaaacacattttgcttgtttagaacatgcaaaccttccttagcgacgtgtccaagtctggtatgtcatagcacaatcttgtcttctgttgttccagttgcaacataagcttctccagtcatagtttatcctttaaaatagtatagccctcattgtttctctcctttcaacatgaccagtgcttcctttgtgtatttttcattttccattgcaacatttgaattcataacctgcatcatcaaactgactcagtgaaatcaaatttatagaaagagttggaacatacctgatgtctttgatctctctaactgtgccaccattcagcctaaatttcacatccccaattccttctatagcacaggcctgaccattttttactactattttcctattcttttggattttcatgtttctcatccaattcttgttgtttgtcatgtgaaaggttcatccaaagtttataatccactcattcttgatggtcatggcatttcttggagttgattccatataagaacttgaccatccttaatgtaatttttattgtaatttaaagatgttttaagatcttgatcattctaatcattatttcttggaccattgccttttcctatggtgagttcatatcattacttcc

SEQ ID NO: 97032 - DNA, 656 bp, Cannabis sativa
ggacattctgtttctaggaaaactagggttggaatttcaaaactagattgggacatatttgtaaaaaagaatagtccctaatttctagaaaaagtaaatttgacctaaaccagaaacctatgaatctaataaacctaaaatttttccttaaaacctaaaactgtctaacaaaacaaaaattaccaaaaaataactgaacaacactagataaagaagacaatcaaacataataatcagactataaatataaaaaagaaaggtataaaccactcactgttctaaggaagattgtcaggcaaggaagaactttgtgattgagatggagttgagcgaatcaacgtgttctgaaagttttttaggctaaaaaagtaatttgatgaaacacacaggaagaaagttagtgacaacgagggcatgcaaggtgatgagaaattggagatgatttttcgcagaaaggcttgaagatttgaaaggcaaaaatggcaaaatgagtctttacgttcaaatcttataccctagaagtaatcaccattatatcaaaagaaattagacctaacggatgggaacactgcaaaattggaaaagacgagacatttaatattgatgatgtgccttgaaatcttgaactgccgaaacccaaagcatgcaatttttca

SEQ ID NO: 97033 - DNA, 649 bp, Cannabis sativa
cacgtgcttcgaaatcaagggccacgatctccctaaaaaaagcacaaattgcgatccaacagatagggagttgaggggacaacattaaatgcctttgctaggatcgatttatttttttcatcatttatattctccttggagcccacactgacaataaatgtctgcctttccatcgtttcccacaaaacacgctttcccaaagagcgtggcactcacaaacccaagaaatggagacacgtatgtggagccaattattctccaagcaaactcttgactcgtcaactgccgagtgctagaaaaagaaaaatgcttccactactttcaaaattgtccacgtgcttgatgactccaaggtcgtccaaaagaggctacaagcttcctccctcttaagtcccaaaagcttggggtaaatattatccgtatttctggaatatagacaggtggcgtaatcttaaggtaatcatcacttaaagttgggctcaagccttcccgctctcaaaatgccagtccaaacctggaacaggcccaagcccaacaaagacccaaaactttgtctcggggacataatgttcttctaaggcccgaaaattaaacctctctagcctctcgggacacgaatggaatgaagacctcctaatgacgataaggt

SEQ ID NO: 97034 - DNA, 831 bp, Cannabis sativa
cattgggccacagagtcgttgtgatatagttcttaaataaatatattttcatttcttctctttttcacacacagtcatatatgagaatgtcaagattgatttatatgaaattttgacataaattcattttaagggattttgtccccatttttgtatgtagaggatatgaaaatatattttaaatgagattattctagaaatacacaaaacaataaaaaattacaataatatgattttacaaaattttatacattttaaaaattttatttacaaaatatacctttttatattcttttttatgttgtactcttgtggtatcctaaaaattgctcaagtgacacgtgatgtccaattaactgattaaggagctggtcgggataagttgacctaagtgttgctcgactagacagattagcatagttcgacctaagtgtttcaagtaattttagagcgtcatgtcatcgcctgatacttaaaaaattaaaaaaaaattgaaaaaattaaggagaaaaaagaaaaataatttttaagtaattttagaacgtcatgtcaccgcctaatacttctcctttatatatatatatgacacttttataggacaaaacaaggatacctaccataaaatttttctatatattgatatatataggacaaaataagggtacctaccataaaatttttctacatatatgatatattaatagagtattgctattgggtaccaatggtgcctaaaacccttaagacatgtcgccttacgattggctagcgatactctctaaaagctattatattaaactatatgggatccgatactaaattagaccaata

SEQ ID NO: 97035 - DNA, 753 bp, Cannabis sativa
  modified_base (232)..(235): a, c, t, g, unknown or other
gatggtttacccgagcaggtcaccaggtcacaacgtaagttttatgtataatgttcaatgttttttactgcttttttgtagtgttatgtttttgttatgtgattttgttttttactagtgttcttatagtgattttttttttcatttttcttattgttttttttttcagtgattgtggtgttttcgtagcatcatttgttgagtatttcattgatggcaaacccatcccatnnnntgattttgatgtggaaattcaccgcgattgttttgctgtgtcattttatcattatgacatgaagaagcaacttgagaacattgaaagtgaatccgaggccccttctagcattcccaagaaatgatatgtcctattttaatcagattcttcttgtttttatgttgttttgctgttgtttttaatgttgtttctggaacaaacattggtgttcttttatgtttttaagttttttgtggacaatatgtaatctttatttctgtatgtttttttttttttgttatgtataaacaagttgttatgttaaattgattagtcttttcatttcacatctcatctttttatgtatttttttttcttatagtttttttttttgttttttttctttttttttttccagttgttaaattaccttttcaagtgcctaataacaattcagtaatgttattaacttttttgaataaaaatctgcatttcattaataaaaaacaaactgtttcagtaataaacttcatatatat

SEQ ID NO: 97036 - DNA, 514 bp, Cannabis sativa
ccagacttagctatttttctgtaaggccatcttgtgagaaataaaacttgaaagacgtaactccattactgtcgtgacaccaaaagtgaacaactataaattattgtctctccacttatacttaacttgtaattctccctaatctagtgagcgggtgtgacccagagatctatctagattactgagtcaataagtgtcaagatcaatgtggatgcatctctttttgagaaagacaaaggctcaatgtgggggtgattgctcgtgacgataaaggcctcatgttggaaggagttacaaaacttttccaagggacaatggaaccagctcttgctgaagccatgggagtaagggaagctttgagttggttgaatatgaaacaatggcaacatgtgacagtgaagacttacaagcaatttgaagttaagttcgtatgatatctttgtttaattttgttattgaggaatgtaaaaagcaacttattgatatgagtaatgtctcgttttgttttgttaaa

SEQ ID NO: 97037 - DNA, 560 bp, Cannabis sativa
tggaagatgcctcttgtatatggtatgaattgcaggaattcatcaaaagaatgcccccagaatctttaaagtaaaaagatctatgcagacattaacccagggttctagtgatgtgacttcatattacactaaactcaaaggtttatgggatttgctacaagaatacagaccacaaccagtgtgcacttgtggagccttgaagattattcaagagtatcaagatgacaataaagtgcttgagttcctcatttttttgaatgagtcttacctaaatgctaggtctcaaattctacttcaagatccacttcctaatgtgaataaagcctatgctagcataattctagaggagaaacagagaggcattgttgtacctcaatatgagaataaccagcaaacaagtgatagcacaggtcaatttgctagcaatgcccaagctaatcgtggacacaatcagtcttataacaaaggtgacaagcgtcccacttgttctcattgtggtgttcccggacacaccattgctaagtgctatagaattaacgggtatccccctagacacaagt

SEQ ID NO: 97038 - DNA, 796 bp, Cannabis sativa
gacctttatgttctttttctcactgttgtgtacttgtatttttatttcctcaagttttgttcatgggttaggcagccttgatggaaaagagggttgttaatgaagtaggcgcccttgtcacagaactcgggcaggcaaaatccaaaaatcaacaactgcatggggccaacaagggtctggtggatcaaaacaaagttttaaggagagatctcaaagacctaaataaggaaaaagagttcttggaggtcaactatggccagcaagctcttctcctacaaggcgttcacataatcaatggtcattgaaaggaaaccatagagagattgcgtaggggaactcacttcagtcgtccagcaacactcaaaggtttagggcttaagtagtcttttgaggcaatgaactccttcagacccttcttcactcattcttccttctttttgctttatctttgattttgtgaaaataattttactaatgccctaactacggggacatttataatatcctcacagatattcatttggcttttatgcttactttatttccagccttagtgcttgcttcttcctcgatagattaacttttaggatttggtcaagtgtttggttccaacgaccaacacttcagtgactgctttgttgaaccctttaaagcatacaatactatgtgttctttcccagagggattgcaaactgcattcccaaattgctacaggagttatagagcttactccccatttgtgattcttccagttaattacctcagacaggatattacagcaagtttctattttttg

SEQ ID NO: 97039 - DNA, 6380 bp, Cannabis sativa
  modified_base (2124)..(2129): a, c, t, g, unknown or other
gaatgtaaaaaagccaagagggttattgatagagatttttcatgctgtcctagggggtgccatttatggcatttggttaaattagaatttgtgtatataatttgtggtgttattttatctttaattaataaaattacatttttttttattaaaaaaagtcacctttattttagtggttggcttagacatgacataacttaccttaacttaggtgggcatgctttgacttgaaacataggctaaacaattcttgtattatatgcactaacattattgtctattgaagaatgaagagataacacttttatttcttttttacacaattaggcatatatctctaaaaagggcatctttttattgacaagaattgattctataaaaaagttacaagtaatcaaatgcaaacattgttgatatttatcatgttttcaaaagatttagattctatatatatatatacatattttttacaatttgcctaaattttcacaaaatataatttgatacatgacctaaaagtacacatcttgtttaaaaatatacatatttttcgataaaaaataatatatttacattacaaagaactaaaatattaagtaattttatcgcaaatatttattatttatattaataataattattattattataagcacttagaaactattttagtgtgagtatataacaaataatccatttaaatttctagaaggggttgaaatcacttcaattctataatgaaaattgtaagtagttcaaagtcatggatccaaattaatcatgacgaatagttccttggaagtcataatttatttattatactacaaatcttctttattaatgatattaaaataaacccttacctaatattaacttttatatatatatatatatacatatatataattaatcaaagtttactatagaatattaactctatagtgaaaattgaagttgtttttatattaatgaaagttttcaaaaaaaaaaaaaaaaactcatataatgcatattatagttaagaagatatgattttttggaattgaggtttattcatttttaaataattcggtatagtagatattttgttctttttttaaatttatagtgtaaaaaataatatttaaatgtctagttatatttgtacttttttatatatacatgtaaaattgattattttaaattttatttataaaaaatataattactcaatatttttggaaaacaaataacattgagatataatttctctaggtaagaaaatgacctacctaaaaatgtggatttttctttttcttttttccttttgaaaataaataattcaattgttgtggaaaaaaaatgtttggatggatcatgcatgtgtccatatgaggctttaccaataaaataggacccaatttgataaagtgaagaataataaagagagaaagaaaagaacattcatcctcaccaaatgtccccaaatttaataaaaacaaaacaaataaataattaattaagattaggattaagattgcaaccctttactttttgggtgtaattataacgataagatcacataaaaaatccattaagggtatttctttttctttttcgtttctttgtcgaaattccattaagggtagtaataattttatttccttcgaaaccatgttctatgttttatggtgctcttgatttttttagtctgttaaaaataatctttgaataattttcgtattataaaataattttttcgttaaattttgtcacaaatgtcaaataaaatattgacgaaaatggtaaatgtttagattatttttatattaacactatacatgaatatactagaggcaacctacgtgcaatgcacgttttgttttattaaatcatgattttaaaaaaaaaattattaaattaaattagaaagtgtggaatattatttaattttttgggttaattattgagtttattttttgaaatttgaataaatccgtgtaaaaaaatttcaaaaattgtacgattctctaatatgtgggtaagatattatttaattttttgggtttaattattgggtttttaaagattgtttaaattttttgagtttaattattgggtttttaaagattgtttaattttttnnnnnnattattgggtttattttttgaaattcaagcgtaaaaaaatttcaaaaattttagagagatatgtgggtaagatttttttggtttaattattgggttttaaaagattgtttaattttttgggtttacttattgggtttatttatttgttaacgtaaacgttaacagtctgttaagttaatcgttaaaaaaaatcgttaaaccaacaatcgccgttagatatgcactttttatatataaagattttttttagaatagactattttaacaaaagtcatatttaacgaattttagataatttggatcgtgaccaaattgtccgactctactaccatgtcatgttgccttgtttctttcaaccaactcaatacctctttaaccgtgatagcttcaacaagaatgtcatcaaccacccccaacttactgcttgagcgataataatctgaccagaagagttttgcgccaccaaatcatacccatgcatattcttattgctaaagatagttgcatcgacattgattttgattgtattaccaaccggtgcaatccactgctcttgcccttcgccgtcttgtaaggaaaacaaagaggaatcaaaatgttatcttgaacacaactctattgatcaaaactacccttagccaacgaaaccaccgctttaacagtcttattcttaccattccacacattgttattgtgcacaaaccacaatgcccatcaaagcataacatctctatgtttcatcccagaatcccaacattgaaatctatcataaagtcatccctccaaatagttgtcaccaatttctattaccgaaatacccaccatcctctagcaagcaaaaacaaacaaacacctcacaagacaatgagaaatagactctccaactcgcatgcactttagatacaacaacaaggggagatgaacatatttcatgccttattggacactagcctaattgggcatgcgacaataaactaaacagtcatgttagcattcgattagccaccaatccacctataacaaaatataataaaagcattttataatattataaatagtttgaggattatttttaacgccctaaaaaaaatttgatgtgctataatacataaattataatttggagataaaaattctaaatagccaaaataaatcatagttcttaaaatgtaaaaacaatattattttagcctttaggtactttgtacaaaaaatttatatatacacaacgaatttacccgactaggcacttttaccactcaaccatggatgattagagacttagcaagtaaactaggttttggtattccttctagagcttttattggtcaaggaaaacttcaatgctaaatgacatttctggtgctccaagaaaaagtgatttttcaccaatcctcaaatccaaccgttggatctaattacaatcactctaacaccaaatccaacggcttagaaaatccacttgtacaatagatgggaaaggattccaagtaggtgattataactcattttgaaacgtgaaggtgaaaccaaaaaaattaggccgcagtggaggaaggtctatgtagtctgattttgaccaaagacttcaaaataaaatatattttattatttaattataaatttacaaaaagaaaaaaaaaagtaactaaaatatttgaaaaacagttaagttcagactttagacaaagccactttattttccaagcttccccactcaaaagtatataaagctttttcattttcttctctgttctctattctcatcccacattttcaagaacaggacaaaaaaaaaatagtaaaagtggggatgatgagtttttccaagctgtaaggaaagaaagcaccaaactttgaagtgggatagtttggttttgatccaatttggactaaagttttagtttttatagagtttgagttgattttgagaggtggggttttgttaaacatggcagcttctttggccggagatgacttatcccggcaaacaagtagccggagaagttggaggtccggtagtgtgagagaaatgtggaatgccccggatgtctttcagaggagcgcgagacaaatgacggttgaggaagacgaggaggagctgcggtgggccgcgatagagcggttgcctacttatgataggatgagaagagggatgttgagtcaagtgatgagtaatggtaagatgaggagtgaagaggttgatgttactaagcttggtagtcaagataagaagttgttgatggagagtatattgagagttgttgaggaggataatgaaaagttcttgaagagacttagagcaagaagtgacaggttgttttttcttttccttgattgtgtttgtgtttttgaatctttttgattgtttggttagtgtgaaaatgaattagtgaaaacattgaaggaaggagattgagttggtttggatttattgattgatttctttgttctttctttatttgtgtctttgatgtttgattaacttggttttttggttagaaaatgacaagtaggatattgaaagaaggagattgagttagtttggatttaatgattgattctttgttatttgtattatgccatttatgagttttgaggttactcatgaacttaggctacttttggttggaaggaatgagaggccgactatgagattaagtcggccttaaaaaaataaaaattattgggctttttattaaaatttttttagtatttttgaaaattactaaaaaaatatgtatatttttaaagaaaaaaatatttttttagatccttggattgggtggctctaggtatggcctagttcgttttagcccaaacccggccatatgaaataaagaaaattgaataaagtaaaataaaatttaatatacatacaaaattattaattgaatgtacatttaagaaaatgtatatacatatatatatttctcattttgcattagaatagttattccaccaaaatggtagaatcattctattagaatgacaatttaatactttaaaatacaaccaaacaaaaaaattaaatgaaaattaattcatttctattccattctatttcattaccctccaactaaatgcaaccttagtggtttgattttcttataaatgcaaacttttgagaattgattttgcagaaatattgtttgtctttaacatgaaagctatagatttagaaattgagttttaacttattttcattttttctttgtttttggacaacagggtaggcattgacattcctaaggttgaagttagatttgagaatttatcaattgaaggagatgcatatgtaggaacaagagctcttccaactctattgaactctagtctcaacataattgaggtacttagaaatattttcaacacataccatttatgcttttattatatgagttgtctaaactccaatctattataatagggagctattggacttcttggactcactccatcaaagaaaagagttgttaaaatactccaaaatgtgaatggtgttataaaaccctcaaggtatgttcatagtcactagtttgcacactttgctctatttgggatttttgctcttagaactattactactaccagatcgtgtatgtttttacctgttaaaaattttccctgaactattcataatgttataatgtagaatttttttttgtttaataaatcttagcctagtaactttgcttgaaactctcttcattaactttttttttcactcttcactttcaggttgacactgcttcttgggcctcctggttcgggaaaaacaacattgctacgcgctcttgctgcaaaactcgacgatgatttaagggtatgtttcggtttttctcagttttataatgtattagttcaagtttagtgtgttagaaggtttacaagttctgtctcttccttcatttgaactaaaatattgggattttgacaaacaggtaactggacaagtaacctactgtggccatgatcttaaggaatttgtacctcagagaacctcttcttacattagtcaacatgatcttcactatggtgagatgacagttcgcgaaacattggatttctcggggcgatgtcttggtgttggaactagatatgacttgttggtagagttgtctaggagggagagatcagctggaatcaaaccagatcctgagattgatgctttcatgaaagcaactgctatggaaggccaagaaaccaatttgatcactgattatgttctaaaggtttgttacttccatt

SEQ ID NO: 97040 - DNA, 772 bp, Cannabis sativa
tattcatactcaactcccttcagtttcagtgcccatatcactctttgactatatgggcttgcccaaaatcccagcagctttacttcttctcccattattatttcaattttgtaaacataaataaatatcagctatatatttatatatattatttgatggtaggtgataatttgttgtttgacccaattgataaacattgaaatttccattcattcattgattagttcaatggccgtcgacataaaagaccacaattttgttttcttctactttattcacgaatgataatgctttttttttttctgtctcaagcctgtcccaaccaattaatatttgacaaatcatttaacgacacacatcaactaaaacggaagattaagagtggaattaataccaagcatttgtctttccatcttcccttttcatttatgaaaattcttcagtttttatttatttaataaaaaaacaatgtacatttttttcgaatttattttcttaaaagttgaaaaagaaaattataaataaatagagatagaaatagaagatttgaagagattatattgtactctgttttttatataaaataaataaaaacaaaagaatttcataaataaaaaaaaaaatgtgatgttccctcaaaagagagtgttatcacattgcactatatttattggtacacttatatttaattatactaataataatattatattttaaaataatgttaaatattatggtaccaattagcataaatgaccacaaaagtaaaaaa

SEQ ID NO: 97041 - DNA, 513 bp, Cannabis sativa
ttttattcatccttaggtattctaaaatattatttcaatataatttatgagacttacacatcaaatgcctctagacttatgaaattcttaactagtaactaagtatagtatactaaattactaactagacctaattctaccaaaattttagcagcataatgactataattaaacgttttccaaaaatttaaagctattaataataacaaaacacaatctaaaacaatataaaataatcacaaacaataaaaaaatttaccacccatctgactgcggtatatgtattcgtagaacttacttcattcatatcggttcttgtcatatataatttttattatatacagtacgttcactttaatgtctcactacatccgtaattcaaatcgagaattgcgtcaaataacgggcatcaataaaccgtattagcaccattgattaaaaattttataactttaatatgttgttgattgttttattcatagctgagttgtcttagttttctgtacagctaca

SEQ ID NO: 97042 - DNA, 558 bp, Cannabis sativa
tgtggtacttgcctttgattctacaactcaagcggttttatcaaagtgcagaaacttcagaacacttaatatggcacgagaaaaggtgagtgaaagatggtaaactttcacatcctgctgattcacaggcttggaaaaaagtaaattatttgaatttagacttcgcagctgaaccaagacacctatggcttggtctctctgacgatggagtaaatccacatagatctcttagcagccgacatagttcatggcctgtgttccttgttatgtacaaccttcctccttgggtggtgatgaaaatgaaatttacgatgctctcactaatgatttcagggccaaaatatccgggacacgatatcgatgtttatttggcaccgttagttgatgacttgaaagagttgtacgaagatggtgttgatgcatacgatggttttaagaaagaattatttaagttgaagcctgtgctgttgtggactgttagtgatttccctgcgtatagtaatctatcagggttgagcacaaaaggctatgaaggttgtcctatttgttgtaccaata

SEQ ID NO: 97043 - DNA, 621 bp, Cannabis sativa
aatgaaattttgaattttggggtaaagtgtggtcatttagtgattttaatggtctaacttttcattcattcatattcacatggttgtggtccatgaagattgtgacatatttttgattcatcttcacaaagtttatagtcataagagataaaaatatcactcaattaatgcctaaagtaaatgattttcttttttcaatataacatatttgagtggaccctttgctcacccttttcatttaacaacctcttttattactgcagagtatatttgactttgaccgtaaaataaactgatatatttaacataaaatcactaaatgagtatgtgattcaatgttattcaaaattactttttttaagttaaaatcattagattagtcttgaaaaataaatgtttggttcattgtaatggtaatgaataggtccattatattgtttgtttttcctttttaacttttgtaatctattacaatgtaatacttattacattgagtattgtaattagggatgcacattttcctatggggatggggtctcgcggggacccgcccctaatggggcggggattccccgtctaaatggggaacggggcggggacggggatcaaattttgtccccg

SEQ ID NO: 97044 - DNA, 654 bp, Cannabis sativa
aagaaaggcgcttgcaaaatgatagttgatggtaaaaatactcatgcatggaaagacccatgggtttgtcagcgtcgcgttttcaccctaaatctactgagggttttcattttgtggcaagtctcctgtttgatcctagtaccgtttccaccatccttaagagtgggagacctagtggacaacgaagggactactggatttggactaaagaattcaatggtcagttcattaccaaatctgcgtatatgatccaagcgttagaccgtgcaactcattgtgatgttgccccttccttatgaaacaggttgtggaggaatataattctcgagcgacataagattctgtggtggagtatattttctaatatgctccccatctgcatgattcttgaacatcgtatggctattaaagataatgtgttccctatttgtggggaagacacaatttgtcccaggccttgaggtggatcccgtggttacctttgttggatccccaccgaaaatcacaaactattccatcaattctagtcgcaagtcgattcgagagtttggtagtttgcatggagtaccccagcatagccagccccaccaatttgataagggtggctcgcccaacgttagagagaattgtcgctttccatcgttgcaacttatt

SEQ ID NO: 97045 - DNA, 549 bp, Cannabis sativa
taatgtctgacttgactgtattgttttgggcctattgggcttgatgttgtgaccataccatcataattagtcaaatagtccaacccaatcttactcgagcattctttaaaaacatcacatgtgaaattgggcctgagcccaattttggcctctacagatggtaaaatccacaatcaattgaagatgatcgtacgcgggccttgacaacctgtagaacaaagaagatagtaaccaggaaaccttgggacactgggatggttccggccgaagagactccgacggtcaagtcaacaagattgttaacaatgtaataaaaaagatgagaataaatgatcgaactaagttaccacctatcttgactgcgaaaataggtatgtatttttataaagaatgagattgaacgatcagtaagaagtattaagatgactgaaatttgatgatcccctctacgtaattgagagtgactcttataggcgtccctggaaggacgttactcatgactgctcaccctcctttagaagccctcttccccacttgatcagggagatc

SEQ ID NO: 97046 - DNA, 1488 bp, Cannabis sativa
attaaatggtattttcttatgttaatttcgtagctatggttaccttttttcttttatgaaacttttatttacagctggtatcttttgtttagaaaacttgtcttacaagagaagtaattctctatatggaaaattgcttatttttaaaaaacttaacttttcatttttctaattattaatttcagttttactatgtatatagaaaataaaataatctttattttgcaggtattaaagaccaaatcgtgatcttggtcctatttagaaagtttctcatttggtcatgatctgctgcagcataatctaaatttgatgctgcaaatcagggattttttaaagaaagttttgtataactttgaaatgtgtttgtggctaagtccatggtttctatcatgttctataaataagacctagagagtagccaaacgtttcttacctcttctagtttcattttgtatatttttatatttgtgaggagagagttctttttgtgaaaacctagagtgttcagctaggttttagtgtttattttattattcgtataattgtttgaataacttgattgaacaagagaaaggtctttaggagaagactagttcaagccttacttcgggaggaagtaagcactcacatatcaaaagacgaagggatctcgctgtttggtggtgttcaaaaattaaattagcaaagtaaattacaaaggattatgacaaagttttagagggagtataatctatttaagtcaattgtatatgtaattgtttgagactttactaattggttttattctctaggtgtgaccccgtggactaatagtgtttgaaagaacattaataccacgtataattctcttgttcaagttttaaattatgaataatttatttctaaatctaatctgttactacaagtctttacagtcacattttaattacagtttttaagaaaataaattggtatatacaaaaacacgattttttttatttggtatcagagcgagacactaaactcttagtgtcctttaatattttcttgtattttttcaatatattcccttttgttgaaggaagatctatagttggtctacaattgctaaatgattctaattaccgttattagaaggttaggatgaagactctcatcaaatctcaaaatgaaaaggcttgaaaatctattctaatgggttggtctccaccaattgaagaatatgatgaaggtaatactaaggtaaaatctgaattagaatgctcaaatgaggaagatatattgtctagcaataataataaagttttgcatgttatttttaattgtgttggtgaaggttttattaaattaatcttctcatgtgaatctgcaagagaatcttggccaattcttgaaactcaatttgaagaaatagtagatgtaaagcgttctcggtttattatgttacaaagtagatttaattatcatagaatgtttgattcagaaactctttctgaattttatgaa

SEQ ID NO: 97047 - DNA, 520 bp, Cannabis sativa
tccatttcactttcaaaatggaatccatattgttttttttttccttcatttattttacttgtttttacaactctcaccgtgtctcctaaggtccttcatagaccacttcgacccatggacatccaaacaactttgaagccactgccacaatggcacaccttataaagaaagacccgaaaacaaggtcatcattgcaaagaaagagcccagcaaaaatgcatagagaaaaatatataaaaaaaggttattttatgaaaaaaaaaaaaaaattaacataaagttgaaaatatggataaaaaaatatattcaggtaagaataactaaattaattaggtacccataatcaattaccttatactattttccccttatttttttaactcccataaaataatttttttgataataaaccatatttttacaaatttataccttataacccataaaaaaataaaaaagaaaaaaatcccatgatatgttgtcttaaccaagttcgaataatttttctaaaatataataa

SEQ ID NO: 97048 - DNA, 558 bp, Cannabis sativa
tttaacaaaacacagtgtccaatttgtaacttttgcaaaatacagggtccaaaatggtatttaccctaataaaaatgtaaaaatatagaacacgattttgagcctgtataaaaaacaggttggtctatttaaaaaaaaataagaacccgaataaagcactacctaaatctaaacatggtacgaaattattacacttgcaggtcatgtcaagcctactctataaaattgttgtatagtaacacaggactcatatatatatatatatatatatatatagatttttttgcacagcactcatattttttatggccagcacgatttgtattttaaaagcacaaaaaatatggatcgagcacatatttatagttatgtttgggacagttgaaagtgatggaatgtgaggggtatgtgaattgtgaaggaaaccatttgtttggtgtatttttttttttaagaaatttaatgttaatagtaactttaatgtaatacaccaaattattctttgagagctacacattgtatgtgcattgtagatcaagtgcatcctcccttttttat

SEQ ID NO: 97049 - DNA, 603 bp, Cannabis sativa
cccacacgaatccagaaacaagattcatgcccccaaaatgtctaggtccgagccattatctctcgtcagaactatcgtgcctccttgcagcgatcaatggtagtcgttgtttgctcgtctatttgatggtagtcatcttcgtcaaaggcaaatgcagcagacgtgataagcggtcggtgctcgcctgagtcaagatttgatttttctttttgattttattttctagttttatttttttggttctagtcatcatctcttcaatttgtaaacaaattgatgttaatgttctgggatatctattttgttatttaatttaatgtttatacattggttctcttatttgtttattgttatggatttaatggtggatagtgaaataaattaatttgttagacttctctcttttattcttttagacatgaatatataaagaaatttctatttcaaaaataataataataataatattgtattaataaaacctaaaacgaagtaataccaaaatttgttttttttaatttattttttaaatcaaaagattatagggaaaaaaataggaatattttaaaaagggaaaaatattacaacaatactgtgggccgg

SEQ ID NO: 97050 - DNA, 599 bp, Cannabis sativa
tttttctttctttcttttatttttgttttatattaaaggatctatgtttcatattggagcactcctaaaagctgatgtaaaactttcattctttttttaaaaagatatcattaaaatacagagaagtacaaaatattccttacaagtattatatatattttttacaatacatatttcattaatattaataatattattggtggtgagagaaagcacaaagaaaattatgtaaagtaactaaacagtgagtttcctgaaatatttcactttgttctgatctatctaaaatagagtagagaagttgatgagagtgttatgttatttctttttttttttgcaaagtgatgagatgtgatcgaatttttcagtctcttaagtgaggaatgcatatgcattggacagtggtaagtggtaacaaagatcaaaatgtaacaaaatgaaataattgggtcataccctcaaaccagtcatcatcatggtctcgttattttataggctagaaacttgaaaatgtttcttctctgggtcattggtaatggtgcctactcttgtctacatatgactaagtaatactttgagtttctatggtgtttacttta

SEQ ID NO: 97051 - DNA, 543 bp, Cannabis sativa
aattgtaaaggttagtaactaactttactctcaagtttaatgattgggtatttgttattttacagttatatagcaatataaagcataaatttaggttattctaaaaaaaactggtgtgaaaataatcccagttcgaggttgaagatgacctgtgatatgcgaccatgtgcgaccaatttggtcgcctttagtcgcatatggtcgtctagtgaaaataaaaaaaaataatattaagcggccatgcgtgaccgtgtaggttgcacatggtcgctcagtggaactagaaaactatactatgcgaccatgtaggtcgtacatggtcgctcagtgtaactagtaaattatattatgctaccatgttggtcgcacatggtcgctcagtgtaactagaaaactatactatgcgaccatgtaagtcgtacatggtcaaacatggtcgttttccactaatttttggattctaacatgtatttctaaatgcatctaaatggcttcaaaataactataagctaagtgatttgatattcttactttacacttgtt

SEQ ID NO: 97052 - DNA, 531 bp, Cannabis sativa
atctacaggtgaccaagaaatgcagggttgtttcctctgattcacggcataacgagcacaaggtacaaaccaccactctcttaacacgaagctgtaacaacgtgaggaggcactcggagtaagcacgtcatagcaagttagctaatttggtggcaccttcaggctccaaagcttgtgccaaaaatttgatatagtgtcttcataccagaagcccttttgaagttgcaataaaccataagcactctttaccgtgtacatacctaacacctcctttatccaaaacagttgattcgaggctgttgaagcttgcaaagggatacttttaatcaaccgtcggtctctttcctcatatagatccataataatctcctcgtcccaactagaactatccatagccattaagtttgccacagtagcactagaaagagtcgggtgagttaaaaatgatattgggattagttgcatcaggtacaaggctcgcccaaaactgatatagattggccattccccacacaccatctcgtgctagta

SEQ ID NO: 97053 - DNA, 667 bp, Cannabis sativa
cggtctcggtcccggtcccagtcccaggtcccggtcccggtcccaggtcccggtcccggtcccaggtcccggtcccggtcccaggtcccggtcccggtctcggtctcgatcttggtcccagctcttgagtctcgatcctcttcctagtctaggttctagtcctagtccttgttcaggtctttgtcctagtctgggtctaggtcccatacctgatatcggtctaggttcgggtctcgggttcgagtccgtgttctagtacgagtacgagtctgggtttaggtctgagtctgggtccaagtttcagtccgtgtctgggtccgggtcttggtctgggtttgggtctgggtccgggttctggtatatgcctgggttctggacctgttcccgagtaatgggtcctgggttacggaatctgggtcgcaggtcctggcgcaagtctgggcttgggttcgggtctcttgggttcgagtaattattcggttctttgcctagatctggttttgggcccctgtccaattcctgttccacggtccttataacagttcttattccgattttggggctcggatccgagtttgggtttgggtcctagtctagaaatgtttccaggttcgggtcttggtacgattcccatatctagacccccactaggggttgggtccaagcc

SEQ ID NO: 97054 - DNA, 881 bp, Cannabis sativa
  modified_base (394)..(400): a, c, t, g, unknown or other
gagatttctcggtcaggtacctcgtttttgtctcaatgcctggccccacgtgcagacgaggctgcgtgcagcctctctcgccgagttttcccggtcgtgtcccctgctcagcgcgcgccgatggtatgcaacgcataccatccgtacagcttgcattttttttttcaaattttcttcatttttttatgctttttcatggaattaatttcgaagtttttgggtaattttgtatttagatttttgtttttcatatttcaaatctaattatgagaattaaattaattagtatttttttaaattaatttaagattttagtgaaatttgaagcttgaaaataggtaaaaatatttttttttgcttaatttaattatcttatttttaaaatttaattatnnnnnnntatttttaaatttaaggtctgatatttaatatttttttttaattaattaaccttgtttgaaatttaaaatatgattattctaatcctgatattttaaatagaaataggatattatgctaacttttaatttttatttaaattaaattataaaatcagagaaaatgatattaaattatcatttaattttttgaatatttaaatttttaaaataacatgaaatttggaaagttgttagcattttttttttaaaaagatacttaggttagttgaaacctaactttttataatttacaggttaaattttttattttttaaatttatttatttattatttattattctgaaataaaaaaactattttatttatttatttatttatttttcgaaatttttttaaattaaatttaaaattaaataagccctatatcaacctatccaacttgttgcaggtgtatgtgttttatattgtttgattgtaaaa

SEQ ID NO: 97055 - DNA, 541 bp, Cannabis sativa
tccaaaattgtggggcctggggccgaggccccggctgccccaccctctggccggccctgattgagtcaacttgtttttgtttctgtttgtattttactgtggaatttattcaacattatctttattaattgtttcttccacccttattaatctccatcttaatttctaaaaaccactagggcgaacaagtgttaacagaagtaaaaagagaaaaaaaaaatctaaataagtccttaacaaggtattaacagttgtttcaaaataatttttagtaataactattaagtttgaaaaatattggttgacttaaataaattcaaaactaaaactttgttatttcaatctctcgagtaataattacaacctcttattacaacatgttagttaacttttatgctcgaaatcacatgttgaatttttttttttaatttttttttcatggcaatattatttatagttttattatcatctctctaaaatatttttgaaaaattacaaatagtttataatactgaaagtagagttcttgatatttcagttt

SEQ ID NO: 97056 - DNA, 559 bp, Cannabis sativa
ttttggtctatatggaaggaaagcaataaaacagtttggaagaagaaaagcacatatattatggaagtaattgcatttgtaagaacaactcttgatcaatggaaaaaagcttaagataaattcgctcttaattccctgtgtctcgaatacaagggtgatggagctgagctatggactaaacctgaagaaaactcaatcaagataaatgttgatgcagcgacttttgaacaagagaacaaatatggcttcggtattgttgctcgtaatcaccttggcaaccttataactgctctctctggctgttatggaggtactttgcagctgaattcattgaagtcatggcaatcaaagatgcactcagttgggtaaaaggccaacactgggaacaggtaataattgagacagacagcttgatatcagtgcaagctatacggagtcagcaaaaatgttctcaacttttggcttgattgttgcggattgcaaagttctactctgtacactacataatgttcagttactgtttatcaaacgattagctaatcgggtggcacattacgtt

SEQ ID NO: 97057 - DNA, 2480 bp, Cannabis sativa
aataaaaattattaaaatgaggtgcctttagaaaattttggggtgtaaataaaatttcccttttattttccccaaagtcatttgaagtcaacacattattaattggcggtagctagtataagagaagacgtcttgtgctggtttcaacaaaaagaaatggaaacagaacaatcttccaggaattcaagttcatgtagttctccaatcactgatacaattctaaatattgattcaccaaagtatgatgtattcttgagttttagaggtgaggacactcgaaagaacttcatgggtcatttgagagtttctttgtttgcaaaaggaataaaaagcttcatagatgatgatcaaatcgaaagaggtcgatatatatctacacaactactccaagccatagaagattcaaagtgttcaatcgtgattttctcaccaaactatgcttcatccacatggtgtttggatgaactcgtcaaaatcattgattgtatgaaaacaagaggtcaaatcgtaatacccatcttctacaacatcgatccatctgatattcgcaaacagacagggcgtttcggcgagtcatttgctgttcacgaacaaaatctaaaggatgagatggaaaggattaatggctggaggactgccttaaaagaagttactgctcttgctggtttggatatacaaaactacaggtatccttaaatatgcttaattaatattaactgatatccatcataattcatttttcctttattttaacttgttttagatatactatctccatggcaaaaagaaaatctttgtttgttttgggattatttttatttattcataggatttattttaattttttttgtttgacttaattattttctgatttgatttgttattttaggtggtgtttggacgtttgctaatattttttttttatttgattttctgtttttaaattagagaaatgaaattatttttaaaaaaacatgctctttaaaattattttaattaagaattaaaattttaaaaattaaaaaacaaataacttttaaaatttatttaagcagttttttcttcttaattaatattttagactctcacctgaactcgattcggatctcgacctgaatccgaattgaaaccctaacttagattcaaccccgaattcagaacttggaccccaaccccgaacttggacctcagaccccgtctctggcttcgatcttcacccagatctcagacttcggggctagaccccgaattcagatctggatccgacttaaataaaatcaaacaataaaaataaattttgcagaacacacttttattttttttttaaattaaaaaataaaaatattactaagtgatataattacttttgtgaaaaaaaaaaaaaattatagctatttactagctgttatatatacatgtaatatactctatttttatctgaaaatgaagactattaattagaaagaggttgataaagattttggaattagcatattaaagtagaggtactttcaagtgataactttgatgaattattagtagcagttattttctatctatgcagtggataattgttagttacttacgttaagaaagtacattcattcagtatgtatttttagttagataattattattaatagattaattaatttaatgtgtttaacataaaagggatgaagccagctttataagggatatagttgaagatatatcatctcaattgagtaacgtgatgccgccaaaagttgtagagagtcttataattccatggatacggagtgcatttggggttgttcgcgcacttttcctcctagttttccttttccttgttgtgtttcctctatttggttactttttcttcaacgttgtagtacctgtaattgagtatgtcttgggtgtggatcaagggacccattcatcctcatattgtgatatcacgattgatggaaagactaccagacaatatgggagtgattgtggtaattttggaggtgtgatgaaggcatttaataaactgcattaataataatatcttctacttatttaggaagtcgaacatgccagcacacatactcttgggtaattaatttgattaatttaaagctttagtttaattgttcttgtatatagggactgccccctgtttgtgcttttgttaccgctactagtatatattatattaattaaatttactctttaatattttattaatgttatgagaatattttttacaaaacttaagacctaattaattaagttaatatttttttttgaaaatataatgtatatgtatttatttttcatggacaaataatttccttttcaacttagttaatttttttctcttacataagttaaaaattttataattttgtgtgtttaaattttgagattttttctatattaaaccaaaaatggatcaaatttacatttatgaccccaaaaagagaaataaacaaaaatagaaactaaaagtt

SEQ ID NO: 97058 - DNA, 584 bp, Cannabis sativa
tttttcaccctccgggctcatcctttaaatgagggcccggtccctttaatcaccaaatgaatgtaaaggagtacctccatcgatttttcttctcttccggcttccaggacgtggaccgcccggagcttctcacggagtgagttaggattcctccgcttctacgcactgctcatacccagctgtttctccaacacgccaagactttctccacttatgacaaaaaaggtcttaacgtgggggacttggtcacgacggaaaactgcaggagggccaagcttatctccggaagccagtcgctggatgactttaaccttttgaaggttctctgccctaacattcgtaccccgcccgcagagaaagcgctctaggtggacatcatagcctcggcagaggaccggtattagaagtacctttttaggagggaacaggagttggcttacatcaaagctcaggctatcgccgggaggacccttcgtttggaggcgggcacagatcggatgccttctaggcctaaatctttggtcctggttcccaatactggggctcccgatgctagcacattcggctctggtaagtctccttta

SEQ ID NO: 97059 - DNA, 1285 bp, Cannabis sativa
agaataattctcttgaattttcttacctcagcaagtttacactttagactttcatctactcttcaatccactattaaccacctcaccgttcttcaattttttcctctctcttttcttagaacagtcaccttccaccaccactacaggattaaaagtgttgactcagaaatctgaacagagattcttaagccacacttgcttgctagcttggcgagaataaaatatgtgttaagtataaagagagagatacaataatttatagtagttcatttcctgtatcgtgaaagtaatgaagctacgtctacttagagtttttttcctcatgagatggattatagaaaaatggctaagtttggatactctaatttctagagagaaaaactagagagagatgctctgaccttatggctacttttctgaatgtgaaaaatgagttagagaagctctccttttataggtgaaggaggtcctattaaatgggaataaaataatccaaaaaatatgaaaaaatacatgttggctatttttgaccgtacataatgatctaatggtgaaaattaaattctgagattgatcatcaatttttggagtccatgttgcgacgacggacccactctgggtaagttgtagcttaaatttgtaactccctttgggtgaaatttggagccagtaacttcaaaattgtgattgaattgtgtgacatgacttgtataaatcatttaaatatcttcaaaatgcaagttgaatcactttaatcagatcaatattgagtgagttatgaccattttactgaaggctatcctaggtccaacgcccaggttaacatgtgatgtcaacctggatgctgggtaagtgggtaaacgtgtcaatgatatattttttgatgcctaagtatttttcgacatcacttagtccatttctgtgttctggcaaaagtggtcaccagttctcggagatgttgatgttctgcagaaaagggagactagaaactacctggtttctgatccttgtcagaaatgtgaaaatatgaagttatgaagttgactgttctaacttcatgactcttagttattgtaaaacactagatgaatggtctagacaaaataagattcggataagtagaacccagcgcacaaggctatttgtcaacctaggcgttgggtgcttattttggaacttttggggtgtcgttttgatactctaaggaattataacttatggacgaggtctcttaccccatttttaaccattccggagagaatgctcagagcaaaattatcatttt

SEQ ID NO: 97060 - DNA, 563 bp, Cannabis sativa
tgtagattaatatgaagctcaaagtcatacatgaatggtagaatgtccaagcaagatcactggtggacatccgaccagcatgatcacgcaagtaacttgcatgcaccgacaaggtgcgagttagcaatttcagagatggacatcattatttatttgcttgcatgtcacagaaacaatccctatatttgtgggactaattcatatctccaaagaataaaggcaattagcttaaatttcccaatctttttattgtaattatggaaacatgttagttttctattcctcatgtatttagtccttataaatagtagtttaatctcactatatagggacacaaattaattcagagaaaaaacactcaagagtgaaacctcaatctaagagtgaaccactcagaaatcattataagagttttcgagagagatcagagcattcttgctcactcttctcacaaagaaatcattatttaattatttttattgctttaattaaaattcatcgtcgttgactaaaagcgagatcaacaaaattaacaatttaaaaaaacttttcaaaatcttgaa

SEQ ID NO: 97061 - DNA, 544 bp, Cannabis sativa
  modified_base (109)..(109): a, c, t, g, unknown or other
ttccacacaatccaagatttccattatatacactttttgaagcattttgaaaaatggctccaattgggatcggacccatcaagttgttgtaagaaaaatcaatgtaacntatgcttattaggttggaaaatgatttaggaatactacctgagaggtggttatgagagaagttgagaatttccaacattgtaagcttggacaggcttgagggtatctctccaacaagtaaattgctactaagatccaatacataacgcatagacaccaaattcccaagctccggaggtattacattagatagtagattgtgactgaggtttaagctcgacaaattttcaaagctaccaagccaatctggtatcttacctactaaattgtttgttgacaaatcaagattctctagcccactcaaatttgatagacttgaagggatttctcctattagatgattattgctgagattaaggtggtacaagatattaagatttcccaattgagttggaatttccccacttagcatattggactctaggctcaaaacttt

SEQ ID NO: 97062 - DNA, 586 bp, Cannabis sativa
aaagatgttagagcgaatgaaatcgaccaccgtttttgaattatcagttctcgctgctatggcttctacccatttagacacataatccaccgccaaaaggatgtactccaaaccaaacgaagatgggaatggtcccataaaatcaactccctagacatcaaaaatctcaacaataaggattggagtctgtggcatttgatctcttgttgtaatgttgcctattctttgacaccgatcacaagctttacagtaagcataggagtctttgaagatggtgggccaatagaatccactgtcaaaaatcttcttggctgttctcttaggtccaaaatgacccccacaagcatgtgcatggctgaaagaaatgatagatcggatgtcagaatcaggaggacatcttcggataatttgattagcacaatgcttccaaagataaggttcatcccatatgtagtgacgagcctcgctctttagtttattccgttgcgccggtgtgaagtcacttggaaacacttttaaaacaaggtagtttacaatatcagcataccagggaatcatctcttgagtggctaggagttgctcatcg

SEQ ID NO: 97063 - DNA, 621 bp, Cannabis sativa
caaatcctatgtagtcatgcaagccccaattttttgttgcttatggactcggtggatgccacgaccctatgaacacatgggcgccagcggtccatgcagaagatcttttgtgaccatgtttggctttgattttcccttttttctagttttcttgagtttaaattttagttttcatccaaaaaaaatcctatgtggccatgaaagccttaattttttattgcctgtggattcgatggatctcatgaccctatgcacacatgggcgcctacagaccatgcaaaagatttttttcgaccatgtttggctttcttttgttttgttttcatgagttcaactgttggtcttcatccatataaatcatatgtggccatgcaagcgatggtttttcgttgcttgtggactcggtggatgccacgaccctatgcacacatgggagccagcaatccatgtaaaagatattttatgaccaagtttggctttgttttgttctgttttcgtattttttcgagtttaacttttggtttacatccaaataaattctatgtggccatgcaagccacggtttttcgttgcttgtggactcggtggagcgtcagtggtccaggcaaaagatcttttttg

SEQ ID NO: 97064 - DNA, 548 bp, Cannabis sativa
ttattgtgaatgagtaattactcgtttgaaactgcaaataggttttttacttatcgtttgctttactgggaaatgatagtgacatatgttgctcgtggatgaaaagtggtaaggatgctttatgaggcatgaagaataacttgtcttattagacaaatagttgtcacgcaatgtttgattatgtgctgtgtaaacgtttgttatgaatgatgaaattgtatgctatgcattgttatgatattttgtgttatacaatgtttgtgattatttgctttcttgctgagtctttgtgactcacgggtacttcgcggtgtagataaagggaaagaaaaagtggatcaaccatgagtcagaggtctcccagcgatgtacatatcaaccgcggtgtctcagcttctagtggatagaatctatccttttgattatgtttgaaaatgtaaccctattttggaatatcggttttgaaaccagttgtaaaagtttataaacaagagatccccatattcagcagtattttgtataaaagttatgttttagtttaatccaaa

SEQ ID NO: 97065 - DNA, 808 bp, Cannabis sativa
  modified_base (216)..(225): a, c, t, g, unknown or other
tggtggtgttgtttttacttcttttattcaaaactccatattttccctacaacttctttttcccttttctgccatcctttgcatgcaagaagcgttagaagttctgatccagcgattactcgtcatccgaatgaaacttttcccaaacattgctcccctccgactggaccgacgaagttcttcctcagggggaacatttgattttcaggttaactnnnnnnnnnncattgactagctttggagctttcaggtaggctttcttgacacgccactcaccccttctaactcgacaagtaagtgcactgacccctgtctaaatttttttcatttcacgtttaggtcaagaaggttcttgcttaggttagggctagaactgttcttgtgccgtatagcaggatattgtgtgttaaagaaagcccgtcttcacaccggttcttcgtttcaaagaatttttattttcctttataaacaaagatttgaatgaagacccccttgcaagcacatccatgtctgtcgagggcgaacctgttccaattgctgaaaggttgtctgcgagacaggaccaaaccgaggcctccatggcaacgtcttagcctgtgggggccttagaaaccattccagaaaatgaacccatcgctgagagagatatctctgcggataacaggagaggtgaagggactgaaattccttcactggtacagtttcgtcctaagtccgtatgggaaatggaccagaaggccaaactttcgatcttatgggatgttgcaagcgtattctgaagttactggcctccgtaacgtccctggac

SEQ ID NO: 97066 - DNA, 645 bp, Cannabis sativa
gttggttggaaaacattttcctccatttttcccttcataaattttttccttgccttgtggagaatcaactctatttttttttctttggagttggttggttacgttgactttgttgttctatctgtctccctttttgttacatcactgcaaatcgatcttaatagctactgtttgtgtttattggccagggttccaagactcagaaatggaaacttattgttaggaaccttcctttccaggtttgctctgaccactgctaccccaaattacttagttgttgggtgaaacttgaacttttaattagttttactaaacacttatgcaggtgaaagcagaagagttaaagaatatgttttcaccagcagggtttgtctgggatgtatttattccacaaaattcggacactgggtatattccaataatcaattatcatattttttttcttcagaactataggtagttcttttataagtactttctctcccttttgatttcattatcttttgcaggctttctaagggttttgcatttgtcaaatttacatctaaaagtgaggcagaaaaggtatggctttttagctaatagttaagcttaaatttcaaattcttagccgaataattaggttctaatacggacatatgttaa

SEQ ID NO: 97067 - DNA, 596 bp, Cannabis sativa
ccacaacatgggccagaataatttccagctgaacaaactcaaaaaacccaagttaacagaccgtccaatcctaggccgtagagtcaaactgtgggccacatggtagacaagcaagttctgacaaatcgttacttgggaggaaatgatcagcctaacatccttcctcatacggaaatagtaggccaaccccttgctcataatggtcagacacagaggcctccaggaaattaagcactgtgcatgacctcagaaatgatttgaatctcataagaggactagatagggaaagtatccctcttaccgttcagtcaaataatacagtttactttgtgtccggcccagtcctaagagatcctcatgtgacacaggtcagccaacaggcaggtcaagttgatccattggtggaagcacaaatagaccaacttaacaacctcattcaaggcctgactggccccaaactcatagatttagaaattttctggaccaagggatcaccattctcacaagaaatcaatactcttgacctaccgcccatgttcaaaattccaacatgaaaaatgtatacgggcaaagaagattctctatctcacattaaa

SEQ ID NO: 97068 - DNA, 612 bp, Cannabis sativa
atttaaatcacaatatagatttttgtacctcttttttgtgaaaagagaattataatactagtaaattttatacctatatataatcatgtttcattgacacttttaaattttaataagaaaaacacatcatttttgttttgataaatcagaacaatcattcaaaacacaaaacattacatcttataagcatcacttttttaataggcctaactgttctccttttctgtacattctatgaatttttttttaaaaaaaagagtcaaaacactctttatcaatgctactaattgattttggcataacactctgcactctacttttttacattactataaatattatgcacaattaaatttatccttcttctcactttagatggccaaaataattcattttgaaccttccaaacataatacactacagctgtcacaaaagcggcataaacaaattttcagaacttacacataagagctcgagaaatccatcgcaacagagtgcttaatgattttattttaacttcctagcacattatcttttacattttgtaaacatctcttgctaagatgacattcaaagaaaagaagaaaaatactttcttcatgagtatcacat

SEQ ID NO: 97069 - DNA, 594 bp, Cannabis sativa
tattcctctgaagtgcgttctatttttttgaacgaatttattaattaatatatcttatgatttttattcaaaaaaaaggacatttttctaaaataggctttttacgccaaaattttacatttttatcttgctaaggaaagttaacaaagaaggaaatttatttatttatttttttcaaaaatacggattgaacaaacagtctgcatcttcttcctccttcgttccaagccacagaagaggatcgttctcacctccattttcattcccaattgatgcacaatttcaacaccaaaaaaatcatccaagctatgtaatgacaatgttgcaatgtagatctcaacaacaaaacgatctaatcccgacaaatctaaaatcaaaaggtaaaccataaaaaatagtaaaaaaaaggaaaaaaaaaatagagatttcttgttgtttagtgtttgtcaatcaaataaagcataattcatagggtaaattagttgctctaaagaaattgatgtaattaatttacaatcgaacaactactaatgcatttaaagtctttactatttactttcaggaaggtaacacctagatgtgcttggcccattt

SEQ ID NO: 97070 - DNA, 541 bp, Cannabis sativa
tttttcctttgaaaaagtgtattttgggttctggactttttcaaacatatgtagtgaaattaggcagaaatgaaagatcttgtcttgggtccttttgggcctttttttttaatcaagtgatcaatatataattgggaattttagaaaaatactttttttttacatgtgtactgttacaccttttattttatatatatttttattgtaataaattttcaaaaatattaattaaaattttaaaattataaaaatatcgtgtttcaatataatataaaaataacttaaaaataattgtagaacaacttgacaaacaacataaaaataactataaaacaataaaaaaaaaaaactataaagcaatagaaaaataacaaatagacaatatcaactccttgtattacgaatttttttttttacttaattttgacggcttgacttatctttttgtactgctacatttttttcatgaaatttattgttacagcttcgtactatcaattttttttaagtaattggaagcataaatacttaagtttaactc

SEQ ID NO: 97071 - DNA, 544 bp, Cannabis sativa
cctgggcgttgtgcgttgcttttggcacgcaagatgtgttgtttcttcccaaaaaatacctattttgctatttttgatgaagacgaagaagatgcaaaagtaatatcatcaatgtaatacttggaaggtgtccagattgataaattgtcaacctaggctttgtgtgcccgggcactgggtgctcaaaaataaacttacttcgaatctgattctaatgcctcaaatatgtctgtggtatgtctagttgatgtgccaaagtagagtttgacccatttgcactaagacggtcctagaaactaaaatcttagttgggaatgtcaacttgggcgctgggtgaaaccctaggtgcccaggttggcttctggggtgtaggttcgtgtaatttcagctcctaacacctaactttgattgctccatgtcttcatagtacaaaatactaaaagatagtgggttggattcaagttattgaattttgaacttccgttccagggttcccaaagtcaatctaggcacaggactagggacccctcctaggtagacttgt

SEQ ID NO: 97072 - DNA, 599 bp, Cannabis sativa
tggaggcttgaagcggggacgttacagaaataagctcttcgtgcatggtatgatcgtcttacctttttcctcatttcccatggatttactcaaagaattgctgatagcactctgttcattaaaaatctagaaaatgagattttttttgctcaaatatatgtagataatatcatttttagatcaacttgtgaacgagaggtaaaaacatttctgacattaatgactagtgagtttgataggagaccttagtttttttctaggactgcaaatcaaacaattagatcatggcacaatcatatcacagtctaagtatgttaagtccatgctagaaaattttgggtatacacaagtcaagcatgcacacacacccataagcactacaaccaaactgacgtgtaatgagtctggagaccttgtaaataccattctttactggagcatgataggcagcttaatgtatctcacagccagtcatcttgatatttcgttctgtgtaggtctaagagccagatatcaaaccaaccctaaatagtcaaaactctttgcagtcaaaagaattttcaaataccttgcatggatagttaactatggtctttggt

SEQ ID NO: 97073 - DNA, 580 bp, Cannabis sativa
tgaaaaattgaatacaacaagttagatatcattcaaggatagggggggttctaatggggttctggtttcttagaagcttgggatgagatttcgttgttcttctggatttggatgtacttaggattagaaataattggggttgattgttttagtaaaattttaagtttcacttttagtttaatttaaatcggatttaggttaggattaaaactaaaatctaattgtaaatcatggtgtcttgtcttttgacatgcaaagttcgtattgattttgagtgatctgctagcccctattttcaggttttagtgctctgttttttttttcttcttttggttatttggtggaaggttatcaatggcgatttcttgggttaagcctattgagaatgtactcaaaatctcagttgatgcagcaacttttgaccacagttcatcatatggttttgggttggtggcaagggatcacaacgggtatttggtggaggccaaaacagtctttcacaggaggtacaatggcatcagacatggctgaagctttagccattaaaaagaggcgttaagttggatcaaggatcatgaat

SEQ ID NO: 97074 - DNA, 859 bp, Cannabis sativa
ggggaattatctcatatactatttcaatactaaaaaatccggaattcccgatatttttttttttcattgaggagatgcttatgggactccagtttccacttcacttcatacaaactgtaatgaactatgtaagaacacccagattctctatcatgtttaatggttctatacatggtttctttgagacaaaaagggttctaagacagggagatcccatgtctccgctattgtttgtacttggcatgaaatacttatcacgaatacttaaagaggttggagaaaaaagagattttcactattatgagagatgctcagagttgaagattaatcatctggcatttgcagatgatgtaatgctattctgcaaaggagatttcaaaagcatcttttatatgcttcaaggattgaaattgttctcaatttcgtctggtttgtaacctaaccctcaaaaaccaacaatatattgcagcaacatgccacaggaggaggttagtagagttctttcagcctctggttttactctaaaagacatgccttttacttacttaggtgtacccatttgtgctaaaagaatttctgagaatgaatgcattgctttggctgaaaagatgactacacgaataagaacctagagttccaagaatctttcttttccagctagaattatcttaatcaattcagtgctcatggctattcatgcatattggtgccaagtgctcatttttcctaagaaagtggtaagtcaactggaatcaatatgcaaagcttttctatggaaaggccaagcttgagcaacaaggccaggtctaatagcttgggagtcattatgccaatctaaagctgctggtggacttggctt

SEQ ID NO: 97075 - DNA, 504 bp, Cannabis sativa
ttataaatgtattttaaaaatatataaatataattggatgaccattaaatgaggggagaggtattctatgactttaggtggccatgccccctcaacttttcatgaaattatagtattagtaatatatgtaggtaaaactaaagaaactataaattattagtattcattaatttaattataagggtacttttataacatatatgttataaagataagtactatgattataataatgatcttatagatgaaaagatataataatgaataatggcactttgtaattttaaaattaaaaatgggtcatttaagtaatatattttttttaatagtaaatatcattttgaactttttgttttgcaaaaattatcgattggactctctgttttgttaattgataaattagacattgtatttctaaaatagtaccctgaactaatttttttgtcaatataaaagttaataataacctgatctagagttattatgacaaaattggatacattt

SEQ ID NO: 97076 - DNA, 3036 bp, Cannabis sativa
  modified_base (2443)..(2464): a, c, t, g, unknown or other
  modified_base (2573)..(2577): a, c, t, g, unknown or other
aaaatttctttgcgctttatctaacaaacaagattgtttgtggataaagtggattaactctatctatctaaaaggaatggacattttgagataccagttggtactttaagaagttgttgaatcttcgcgatagtacaaatgaaaccatgttgaggcttgttgtgactggtagaaatctcagagcacaaaagttctacaaccttcttttagaggggcctaaagctgagtatgtcagagctatttgggacaacttgttgctgcctaagcacagatttgtttactagcagattgtaaactcccagctgatcactagagatttcctttgtaagctagtgcctttgaagaatactatgtgccctgtttgtgaaattgagtttgaaagtcatgaccatgctcttttcagttgtatatttgctaaacaggttcttgaggatgtgaactcttggctgggagtttataattggcctatattgattgctgatcttattagcaggtgcagattcaaggcaaaggacctcacaaatcgggtcctgaacatggttatagcagctaccttgtaccagctgtggaaatataggaaccgttgtattttgagttgacttgtgcttctcctagaagtcttagcttggaagttaagaaagttgttcaacttagaattatgagtaaaggtcgtttcaaaatttgccaaagaaacttgtatttactaaatgtaattaagaattggtagtgtttttgggtgtggctgctggctgtttttgcagctaccgtgttgtagttttggctcttgccttagttatttgtagcttgctcgtttttgaataaagatttctctttttcaaaaaaaaatatgttagaaagtacgttcttcttcgctcttaatctccatccacaatctgtatccttacatgtaacataccaaacagcaatacctgacttccaaacaaagtagtcaaaccctttcttcattgcatacaagctaacaaccatctttagatgctctttctctctaaaaaaactttcctacatgtaactccttgcttggtgtgccacccatagctatataatgactatgatcctcgatgtcttctcttgtaaatattttctccttgaatttactataacttgttgaagaagaaaatggattgctaaatctagtctcaatggtcactctagcatcactaagaccactagcatcattggtctctctagcattactaggacgtgtaccatcagtggtccctctagctttgctggttcttctagcatcactaggacctttagcattattagttttgtatggacgactactactagtaacaggtgttaggcgattatctctacgggacattcttttccgtgtcgatggcctcggtggtatttggtacgatagtggagtcaagtttaaagctacagcaatagggacctctgtatcttggtcgtctcttctatcatcactgccctccacataacattcaaggtctggaccataaaaaaaaaaccattaatgaagagcatttgtgctacaatgtcagcactcgacatcatagtgtttaattcaggtaacacatcgacaaccaacacctcttgacttgtttctggaacaaaactcccaacctcactacgagtgtccttaatagtacttggtgtgggactaggatcaatacaaacattcttctttaataatgtcacaaataagggagtaaattcatctaactttttcgtaagtgtagacaaaaagaaccttgcactcttatcatttccaacaacttcagagcgatacattaagtctttcatgtacttgtaatttacttccaatttcaagtcatactgcactttgtcaacatcaggttcttcgtacaaaatatcaaccacacatgagtagtttacgtttgtatcaatctcaaatgttaaatttcagtctagttataaactcaatctccaccctcaagctcccaaacaccattatacataaaaagtgcattaacagttgaacctgtcacatatattaaaaaatacaattacaatttagaacaaaaatatcacaaaaaagtgatacaaattattggaaatgcactaaatctgtaaaccatcggacacaacatcgggcctcgatcaggccaatatcgggcccattaaaaatcaaagtccccaaacccatatcagacacaacatctggccctaatagggccaatattgggcccatcaaaaatcaaagtcctcaatcccatatcggacaaccatcgggccccaatcgggccaatattgggccaatccaaaatcaaagtccccaaccccaaattggacaaccatgtggcccacatcgggcccatatcaagcccatcgaaaatcaaagtccccaaccccaaatctgacaacaatcgggccccatcagtgctaggaatattttaccaggatcttaatttactaacaagtatgttgaatnnnnnnnnnnnnnnnnnnnnnntctaaaacaataaaattaaacacataagagtttagaaaaccttatcttggttgctgcggaataatatgactccttccgctcagatttctaacccttgttcctttctgtnnnnnagtattatcaagatttgagcctaaatctctttttctccttcaggttggttaccaccgtcttccgcactatgattgagtacttgacttgctatatgtgggcatggcaatctatcactatgggcgaattagataaagaacaatgaaggagggttcaaaaactgtatagaaggtgtctctcatctactagttgtctgacaaagttagaaactagatttggcaggttgaaaatcaattggatgagatgagagcatcatgctccttttatagtatttcaactagggcttaggattgaattatatggattaaaaaagaataaattattgggcaaaaattcactagttaccacttaagggaccgctttctagttataattttgccactttatttcaaccagttattcttctttcaataataccatatttctaatttcaatcttatatatgccaaaattatttattt

SEQ ID NO: 97077 - DNA, 1566 bp, Cannabis sativa
aaaagtaagcacgaatttaagctcagatataaaaatgggctagcctatttaagaaatacggaccgatacgagcaaagcacgacacaaacctgagcacgacacaaaaatattggacttacaggccgtaccgggtttattttttaaaaatattggcacgacaggatacgtattttttttttttttggcacggcacacactttttgaaaaacatagataaatacaaaacgagcccgcacatgccactagtaataatctcacctgttccttcatttgatctgtaacgatgccacgtcaggattttgttcagtaatagttactttttttattctttcataaaaacaaattattgaattctcttcacacttaatggctgtacaagacaaaacagtttcttaaaaaaaagttcgaacttgcattttttttttttcgaaataaaaagatccactgaacagaataaaaagttcagtacaaggatccaaatttgaagagaattttgcttttactgagagtgaaccacttgatacaagcgtgcttgctaatgtgctttatgataatatcagaataattataaaatatccatttccaaataactgaaagtgatatttcaataaaaaaaaaaacacacacacacttaagttgagtaatctcttctacaggttaaaaatcttctgacctattgggatcaggactcggaaacctctcatatgagggtacatgtctatttcccaactgtaaagctgaatctagtaaaaagaatttgaacgaattcaatctcagctgtaaaaaaacaaagcttcgaatgagagcacagtccaaacccactgtgaaatgggagctatttacacactagtttgattttaagtcaacaaaggagttaagtatcctagtttttaagcaacaggcatagaggttgaaacaacgacataggtcaaatattggaggccatcctggatctttcccacagctgttgttcggtcagcacgaagatgctcagtacaggcatttgctttttcttggagtgaagtgggcggaagagcctcatgagattctgcagaaacacccttcatggcctcaacataagcatcagcaacatcagatattcctgaaggataaaatagagtcaaaatgtatgactttagactgaaacgccaccttgcatagatattaagcctgaaaaccctaggccacactaccaatacacatatatatacatatattccaccaccacctcctaagttcacttattgggaccatacaaagaaacattactcttcgtatgagatgaaaatagttgaacgttaattggagcaacagataatgaacctgtgataaagctattggaaactgcttccagatacccggtcatcgattgtgcttttgatctgattaatttggctttttcaacagaatcttcaggccaatcagtattctgcatttcctcagcatcatcactgccctcctgaatcttgttagcaccagttatgattgatttaccaagcatcagtagttgtgaaacagcagagcagcacatttcagagagtctctgtaaatacacacaagttatta

SEQ ID NO: 97078 - DNA, 720 bp, Cannabis sativa
ttgtaattataggcataatttagtgttccctcccttaatataaaaaaagtttttttttttttaattttattattgttattattatacactcaccaattaattcttacgaaactccccacccaatctctatctttcttgtgtacaaaccaaactgactttagtaaagcaagattgaccatactacaaaatttgtgactaaaaataaaaaaattgtggctaattataaattattattattgtgttataattaaaaggtctgtgactaaaagtattacttacaaaaattataatttgttttgactaaatgtgtttttagtcacaatatttattgtcactaaaactaagttagtgacaacttctcactaaatactatgttttagtcacaagtaattttttattgtaattaaaagttacatttagtcacaaaaattttatgttatgactaaaaaattatcactaaaagtaacaattttttaccgtgcatacagactttacatcacgaaaaactgaccatattcgtgagttttaaataaagtaacagtattaatataatgaaatctattttaaataaatataattggctaaagattaacattttctattatgtgtagcaccaccctaatgaggtggcacctaaaaatggtggttttctataattattataaatgtgaaataagtaggacctagtattgtattatgatatcacataagtgtgctatg

SEQ ID NO: 97079 - DNA, 548 bp, Cannabis sativa
ggtacttataccgctatttaccatggagacagttttcatctttattattttgaaacttaaatatctcatattttattttcaaaatataaagtaccattatttgaccatgttaacaactaagtatgactaaaaaattctacttatatatctccttgatgagattttaaattccaaatctcttttttttttctgtaaaaaaaattgtatgtatcattaatatgactaagaaattataaaagactttttttttaaaaaaaaataaataaatatatgtaataaaaaaatttagagatttttacattttagaccctatttttaatttaataatttagtcaaatattaataacacttttctttgtttgggtatatttcaatgttttatatgtatgcatttctctcttattctctatttttttttttgttaactttaaaaatagtttctggccacgtcgtggtcgttctttggttgatcctaaaaacataccattgtaatttacttttcaatgtgaacatttcaagatgtaagaaataatatatataaatatata

SEQ ID NO: 97080 - DNA, 746 bp, Cannabis sativa
gagtgacacgaggatgcatgcattccgagtgacacgaggatgcatgcattccgagtgacacgaggatgcatgcataccgagtgatcttaaggatgcatgctagctgattgacatttgtgagaaccatggccaagtgactttgagcatgcatggttgagtgacattgagcatgcatgccgagtgaatcttgagcatgcatgtcgagtgactcttgagcatgcatgctgagtgacattgagcatgtgtgtcgagtgactctttagcatgcatgttgagtgacattgagcatgcatgccgagagactcttgagtatgcatgtcgagtgacttttaagcatgcatggtcgagtgacatataacatgcatgttcagtgactctttagcatgcatgatgagtgactcttgagcatgcatgctaagtgacattgagcatgcctaccgagtgactctttagcatgcatgccaagtgacattgagcatgcatgtcgagtgactcttgagcatgcatgtcgagtgataatgagcagcatgctgagtgactcttaagtatgcatgtcgagtgacatttgagcatgcatgccaagtggcttacatggaaaccatgtgggggatcatgcatcgctaccccgcggagtgactatcttagcttgttctcgttaatcttctcaattttcggttaactactctcagaagttagcagtgctagttttcgggattaacggccctagggtcatatgtgtcaactcg

SEQ ID NO: 97081 - DNA, 518 bp, Cannabis sativa
tcatcaattttgctggtctctgaggaagaataatacaacatcgtctctttccttctttcgtatttttgagtggttaaaatcttactcgaacagtcaaacttccaaaaaggcagtacatacattgcttcaagttgtcgactttgttgatctccgaggaagaataagacgacatcatctcttccctctgttcttctaccatcaatttctgtataatctccaacaccatagaatgaattccataacaatatgaaacattggtgttgaagcaatttttcataattataattccgacaataaaaattataacccgatagcaaataaatgcataatattcatggtatacttatatatacaggtatatgttggtactctatgttcactgatcgaaaatctttatctttagagttggaatttgaaattggttaatttcttagatgttataataaaaatgagacataattttataattttataggtggcgtttggttagtaagtgaaaatggaatgggaataggaat

SEQ ID NO: 97082 - DNA, 683 bp, Cannabis sativa
catacatcacccaaaaaaaacaatgacaaaaaaaaggggtcgaagcttaccttggacatttcggttttgatggggccgacagtgtaagtggtaggcggtgagaagtggtcagttttgatttgggaggggtctggcattgtaggcagtggtgaggggggttttgatttggtgagggtttcggttgagagagaaccgagagagatagagaaagagagagagagagttggggtattgttatgagaggggtattcttgggtttttgataaagtggtcatatgttttcaattttattatgtatttgtttaggcataaaatattacgatattttatgcatatttcttcaaatttcccaatgcaaaagagagggagtgaagtgcacgtaactaatcagtttaaaattttattaaataattttttttgaattttttattaaataatattcagtagatatttattattggctaatacagccgccgcgatgaggatattgtcccccgcggcgccgacttcgtacaggtcaaggataacttcgtcttttctcatttttgggctggaaaaactctatttaatgaaagaaggtcgcgaattatagaaaaaagaccatatggaaccataaaaatacaagaagaaagctcttggagcgagcatgggaaatctgcaacaatcctccatctagtttcttt

SEQ ID NO: 97083 - DNA, 525 bp, Cannabis sativa
aatttaggccaattcagaagccttagagtgtcaatatttgaatacaaagataatttcccaataacatatggacaacactcgaaaaaccagaatcgcaacgccaatggaaaaccaataacctatagtacacaccatcttcatcactctgtataaccttcttatgaccagaatcaatcttaccattcaaagattgaattatcatatcaaaacactcattacccacccatattcattgtaacgatcactattaataacatataattcctcaatctgaaaaactttaccagggggaccacccaacaaataacactgaacaaaatataacacagccaacttgattgcaagatcatcattacccttaagattgtcagcaataaaagcagtttgtatagcactcttggttatttttttatagccctttaaacactattttacaagcatattatcatcttacttgaactgaaaaatgtcagaatcaatatgataatccaaaccggtaaataaagaaaactcctcaacactaaa

SEQ ID NO: 97084 - DNA, 666 bp, Cannabis sativa
  modified_base (641)..(641): a, c, t, g, unknown or other
ttcccctttcagggtttgtggctcgattgtggtagtcaggaatgtacagtctaactcgcccaggtagccatcctggtcaagatcccgcaagcgtgcctcagtgaccttggatggagggctcacccaccttgcacccaaagctccttgccttctatgaggaaccgcaacagtaagttcctcaccaacatagtccacgccctcaaccaggatgtcgccatccgcatcgattggctccccaacctcattatatcccccaaagtttgggggtgcaacctcctcctcttccttcgcctcgaaaggactgctagaacgaacatcgtcctgttcctcaatctcctggacctcggcgtccccttcatgatcctcctcctcctggacggacggatcttgttcggcattgggtaaggtggcatgccgggccacttgagggtcagatacattgattctacgcattgtcttttttgtacgagccatcatcctatggcttgacggaagacttaagctaaaatgtccgtcactcgaggaggttggactagaacgaagatgaggatgatcctctaacaagagtttaagcagatcctggtcgatatggcgttcgcttccccaaaactcacctaggttcatctacaaaagacaacacncaagatgagtgtttggtcgggatat

SEQ ID NO: 97085 - DNA, 4095 bp, Cannabis sativa
ttttttgtttttatttgtctcttaacatataatttttgctgtagggtttacaacggttttgcacagagcaaaagatcccgttgtctaaggtgagtaaattaaaagagtaatgagtatactcaatattcagttgctaaattatgcctcaaaataagtctgtcaaatcaagaggtttgtttatattgttggaaagatcattaggcggtcataatgttttttcagatacattatatatttctcactcgtgtatgctcagagactgcaggtggccttccaggtttgtttcttgattttccggctgttgtggagcttttactacattgaatgataatttgaagggtaattattgcattcttctaaagtgctctgcatacattgcaggattgcttttgactttggatcgtgacaaattgtatgtgagtatcagattggcttgttgcttatctcttaacttctttatctgttttaaatttaattcaagattgataaaaatgcatactatttttctatttaatgttttaaattgtattttctcactttttgaaggttcgtgtacggggcccatcagatctgaagtacttagtcgatgcactgaggtctttcatcccaaatgctgctttgcattatactgagggctttggaccctcacatggctctgttgatcttataaatgaccaagatgtgaaaatatcagctattgttttacaaccaactctttcagaaggacagcctggtgatatgtctgttgtatatgtttgtgaattacctgaaatcaaagggagatttgacgataaaaaagccctggctttgggtgttggacctgggccgaatcgtggtcaacttgttaaaggaatatcagtaaagtcagactgccaagatatcatggtgggttatagaaacattatgaaacttaagggcttagtcaatgctgaatgtatctcctatctgttttgaaaataagttatttctccaaattttgtttaggttcatccaagtgatgtaatgggcccctctcttcctggtcccattgttctcattgtagactgccccaaggagtctcatttgcaacagttgttgtccacagagtctttcaataattacttctcaggttcacccaagagttctaaagcggtgagttgtattgtacacttgagtcctgcatctgtagttagcagtccgaagtaccataattggatggcaagatttggttcagcacagcatataatggctggacatgaaaggtttgccagtttggcttttgttttcttctctcttctttaataacgtgaatgttatttaagtgcttatctgacttcctgtgttgttgacaggaagaatattaaaattccaattctcaaatcaagtgcaagatttacaactaggcttagttatttatgtccccagttctttccaggtccagaatcaaactccatttgttcaagtgaggtttgtcaaaatgttttaatagaaccttcaatttttatttttgtttatttttaagaaaaaatcacgtacattaggagttgtatttattttacaagatttaaaccaatccacctgtaatataacttattctgccaggattctgatccaaagctttgtgaaagcattgctgctgaaaatcttcagaaggtatgaatgactcctttacttggccttagctagaaatttattcagtatctgtactcttaaaagagtgttctatttttctgaatataatcattgtacatgttaatcttctcttatgacctcgtttattcattttcatccaataactccccaaacttttaactttcattactgaaaacttggtacttttcatatttccttgaaaatttattgtaaatatattgtgtgatgaagttaatgacatactatatgaaattaatcattcacttcatgtatgtatgaaatactgatctgaaaacagtctaagtataggaatattctattctggggcgagttttgttattttgttaagaatagtcaatttcctctgtttctttctgtacagtttgttttaagacctcatagtaagcaaggattggataaatcttgtgtaccaagtttgttggtgcccacagaaatcattgacgaattacattctgagattccagatattgcagttgccgcccaaaatgttagacagttgtggcatacatccactggatcagcaggagaaataagttctgctcaaaatgttaagtttagtgttgaagggccatggttggatgacaatactcttcctagctgtctggaaaatataggaagagaggacttggagattatttttctggggactggatcatctcagccatccaaatatcgaaatgtcagctctatccatatcaatattttctcaaaagggggtttgcttttagattgtggtgaaggaaccttgggacagcttaaacgaaggtaaacccaagcatgttatccaaatgcatattagtataataacacttttataccacgtactaacttatagttgttatggtgccacagatatggtgtagacaaagctgatgatgtggtgagaggtctgaggtgcatctggatttcccacatgcatgctgatcaccacgcaggcttggcaagaatacttgcccatagacgtgaattattgaaagaaacacctcatgaaccaatacttgttgtaggaccaggacaacttaagaactatctagatgcataccaaagacttgaagatttgggcatgatgtttctcgactgtcagcacactacaaaagattcacttgatgcttttagaaataaaccaactaatgggcaaatcgattcagctgacaatgtcacagaaataaagagcttgaagaaaattcttggtgctgctggtttggaggccttaattagtttttctgtttttcattgcaaacaggcatttggtgttgtgttgaaggcagctgagagaattaatagtgttggaaaagctatcccaggatggaagattgtgtattctggcgacaccagaccttgtaaagctttgattgaagcatctcgtgatgcaactattcttatacacgaggccagtacctacataaaacttttcactagaatggcttttcatgctagcttgatcttggtaactctgattgttgtgaccgacacatttattttttgtgatttttgcaggcaacatttgaggatggaaaggtggaggatgccgtgaagaaaaaccacagcacatcagaggaagccgtgaaagtggggaaccttgctggcgcatatcgaatacttctcacccattttagccaaagatatcccaaaatttcagtctttgatgaaatgtacatgcacaacgtgggcattgcatttgacatgatgagtgtcaacttagcagatttacctgcgctcccaaaagttcttccatatctaaaaatattgtttaggaacgagattgctttgaaggaatcggatgatattcacgaattataattctatttttttgcaatctcattatagttttagttattaactttttttttattccttcccatgtggaagaagtagagaaagaaactagcagagtgtaatttggtgtctttgtaataaagagttaataatcatgcatcttactttatttaataatgtcctcttcttacgttcagtcacaccattttggcttgatgtgttggtgttattgttttatgttattcaataaaccaaattttattttattaaaaaaatttattgaagtgttaattataaaaaaaatatataataatatttaaaatttgttgttagttataattttaatttaattacgataatatttttaattttataacactttattattttagaaatatcatatattttttttatttttttaaataataataatataaatatattttttggtaaaaaaaatgataatagaaatatatatttttttaagtatgttaaataagtttaaatttgtattgtaatattaaaagaaaaattaatataaaataaaaaatataatataatataatataagacgtatatgtgtaatgagattaaatttaagaggtaatgtttaaaaaaagaataacacttttttttatttttacataaaatatggtactgtcgtaa

SEQ ID NO: 97086 - DNA, 1043 bp, Cannabis sativa
cactcggcgattggaatgaccccgttttaagctgtatatggtcgtcttcctccaaccattccagcttatactcgcggatccactaccattcaagcagttgagcataatttacttacaagagactccttattacaaaaactgaagacaaatctcgaacaagcacaaaatagaatgcgtcaacaagctaacaaacaccggaaggacaaggagtttcaaatcggagaactagtgttggtcaaactccagccttataggcagtcgacggtagctaaaagacttaatgccaagctatctcgcagatattttggtcccttcgaaatattagctagacggggcccagtagcttacacgttgaagcttccggaagggagccgcattcacccaacatttcacgtgtctctcctcaagccattccatggaccacaaccagtcaagagttaccctttaccagagattacagtcgcaaaccaaccagttatggtgccgctagctattttggcagcacgcataaagcacatcaacaaccagcctatcaagcaactattagtgcaatggtcattgagccaaccagaagatgcaacatgggagaactatgaggatttttgtcaactgtacaaagttaccaaccttgcggacaaggtcgatttcgaaggggagcgaagtgatggccaggcccaatatgacagcccaataccgttggacttggagggggtctatgagcaggtggataattgggtcaaggaggcagcccaattggtggaaacaacccaggaaaaggagggaagccagcctagagccaatatcaaccaaggagagagcgagagagaacaagagaagacaccagcggctggaagggagcttgtgcagaggcaacataagaagccaagctggctaagggattttgtaatggctgagagccgctaaaggagagagagtagcaactgaattctgttattttttgttgtgctattttgctttgtaatcagtgaacatatataaacaattgtaattgcttgattttattatgatgaatgaagaagctg

SEQ ID NO: 97087 - DNA, 945 bp, Cannabis sativa
gaaaaatgactatttcattatattatatatactatttaattcatcgatccttctcataattaatatatatcacatatatttatatactttcgttcatacatggtgcaaattaaatgaaagaaaataaagtataaatgaaaaattcttgttaatatttttctctcaaaaaaagatggtggcttgcaaatggttatataattcatatgcatgctatattaaatttggctacatacatataataaaatattgtttcttttaaataatataatttaatgattgtacatatttcttaaaaaaattctttttattattattttgtttactaaaaaataaaaaaagtatggtatttcaaaaacaatgaaaaataatataaaatgaaaagtattacgatatttaaactaataaaaataattaataattcttttttaaatataattatgttttatttttatatataaataacacttaaattaatttctttttaataaaaaaaataattaaatatacgtaacaaatctgcctatattttacatatgtatgcatgtttttttttttctctaatttgaacaaaaattatctaagaatgttaattatatttataatatatatgcagctttataatatctttaattagttaattaataatttataactaggtagtccggactccctagtcttcctcattagttttttttcttggttataatttaaataatttatgtccgatgattaagaactacttacacaatcacaattacgtcgtttgttatattaattttatctttgtcaatttaatgggggcaagtcatgcatgaaattttaaatattaattatgtaatttcgtacgtactacgtatggagtcaaaagattaacctaataattaataactatatatatattagtgtgttgaactctcgattaattatcttataaattatatttat

SEQ ID NO: 97088 - DNA, 679 bp, Cannabis sativa
  modified_base (260)..(264): a, c, t, g, unknown or other
tcttttcaatcaaacgcatgttctggcccaataaaaaaaaatataccagattatatataattggtcaaaatacagggattaaatagtattattcaaatttattattaattatatatcttaattagaggaatttacagcaaaatcgtctaatgttttaatttttatacatttaatttttttattctttttttttttagcaaaacctcctcaaatttacttttcattgtaaatttaaggtgtcagttagatattactgttannnnntaactggattactactgtatcgattttgaagtactgttacatatacacaagtgtatacagtggtcatccagttgatatttagctgtaatatttaactggcgtgtcaaatttacaaagaaaaataaacttaaaggagtttcgccacaaaaaaataaaaaattaagtgtataagattaaaacataagaaagtttttgccgcaaattgctctcttaattattatatgaagtatttattagaataattcaatatatttggtaacctgcagaataacagccaatcacaatgctttcttccaaggcttaaaattgtcatcttcatcaatttccacagcaatggtaaatttgatgcctgcaatcacttttgttatggcaagcttgattgggtaaattacttttcaattccataaattaaata

SEQ ID NO: 97089 - DNA, 568 bp, Cannabis sativa
  modified_base (395)..(398): a, c, t, g, unknown or other
tcaaatattaatgagatttgtttatgattagcatcaaatattaatgagattagtttatgattagcatcaaatatcagttcaaatattaatggtatttgttttatttttattttattattttattaaatataaataaaaagtcatccataaatttctcataaagcaagaattcagttatataacacactatataatagattcgtgcacagtatatatgtaatattgttgattttttttttctttctataaatatagtcaaattgattacttcacgttgactcttgagtaaattttagtaacatatgtttatgatattacggagctgcttaaaaatatctatagcttaaattttgtgattatttacgtgatatatattttcaattattattattatnnnnattattattattatttttgtagagaaaggtgcatggtaatttgaaattttgttattgtttatgtttgatgattattaaaatgagatatgaataacagaatatttgaaagtataaaatttaaataataataataatatcaatagagttataggcctataaataaaaggtag

SEQ ID NO: 97090 - DNA, 547 bp, Cannabis sativa
aataccggagctccccagggtgacacactacgctgaataaaccctatgtcaagcaacccctagagctgaattttcaattgtctaagctcagctcgagccattctataaggagccttggagaccagttttgctctcggtgccaaatcaatcataaaatcaatttctcgctgaggttgtaaactcagaagtttatcaggaaaaacatctaaaaattcttgtaccgcctgaatgtcttctggccgaatagggttaggccgagtggtgtctactaccacggccagaaaccctagacatccatcacacaacaattccttaattgttaaggccaaaatcaccgggattcgagatccctgaaccgaaccgacaaaaacaaacagtttttcaccttctggttggaagattacaatcttcctctatacagtcaatactagctgagtatttgtataagaaatccattcccagaatgatatcaaaatctgctaagctcatttcaattaggtcagcatttaactccctatcgtctattcttatcagcatagacctaatc

SEQ ID NO: 97091 - DNA, 507 bp, Cannabis sativa
ttgtatggtgcttgtcaccttaatatgttccttaaaatttttgttattaatatatatgtacatatatttatcaacttctgctagaattttttttattatatataagtttgtaagaatatctccaatgagatacataataagtgtactatatttggcaaaattaaagattttatgatatatttgcatcaattttcagcattatacttcaatgcacaactgcaaaatttaatgcaaattttatttattgttttttttgtttttttttttatgaatgatttttgtactatttttttagtaaatgatctttgtacttgttgactggatttttagccaaccaacgtggagtcgtaataaatgagatttaaaccaaaatcacaataataaatgtagttaagaatatcgaaatttacaataaatgaaaataaaagacatcgaaatttaaagaggttcgacctcgaatgtcggtaatagcctactccccttgtgttttattgatctgagttgcaa

SEQ ID NO: 97092 - DNA, 870 bp, Cannabis sativa
ttagaatttgaattatttttataaaaaacattatcataagaagtatgtcaaactattagtatgattatgattaatgaggtatgtattttctattttctattagtatttttgaatatatcatattgtgtagctcatttgtgagacattttataatcaaaaaactcccaaacattcttaccatactatgaatatatatattctactattattcaatgtaagatatatgaaaaagataaaaaaaaaaaaaaaagagagactatcttatatgtaccatcatatttattttagaacctgaaggtctttagaaaattattatatgggattgggaaggaagctaagctactggtatgattatgatttataaggtatgtattcttaatttttaattattattgttgaatatacttattttttgtatgcattctcatatatatatatatatattatatttaggcaagagaaatgctaattacaacctcctattacaaccttttagtcaacctttacgtccaaaatcacatgccgaatattttttttcaaattttttttatagcagtatttgttatagttacagtatcattcctgtagatttttgaaaaatttcgaatagtttacagtacctaaaacagagtttctgatattccagtttaccactcgtgtttaaaaaacatcaaacgtattttcaacactgtaacctatttgaaattttttaaaaatttatagggatgatgttgtaagcataacgaacacccccgtaaaaaaaaatttgaaaaaattattgcgacatgtgttttcggtcgtagaggttgactaaaagattgtaacaggaggttgacggtagcactcttcaccataaatatgaaaaaaaaa

SEQ ID NO: 97093 - DNA, 626 bp, Cannabis sativa
ggagtctaacctcaaactcgaactcgaacccgaccccggcctcaaacctcggacccaaccccagaattgtaccttgcttcgaccccgaccttgaccaggccccaatcccgaccccaaaccatgaaccccgaccatgacccaaccctagggtcgacaaaacatgtcaaacacaataatacaactcgaaacccaatgaaagttaacgattttaggttgtcttaaatgggtttgggtcgtattcgagttgacaaaactaacacgaaactagcttgttaatgacctatttaaagttattttagtactttaatatgtcataaatggaccataaacgtattaaatatgtcataaatatctcaaacatgtcattaatatattagtgggttgacatgtttaaacaaattttatttataaatgagttatacgggggtcatgtacttgtgtcaacctgtttataaatgagtcgtgtttgagttttatttttcaacaggattattaaacagttcgtattcaggtcaagcatatacctgtaacacatgagtctcaacacgatacgaacacgacctgtgaaaacaaattgccacgtctacccaacctcgtagtcggaacttaaccttgacctgacctcg

SEQ ID NO: 97094 - DNA, 584 bp, Cannabis sativa
ggtggtgtgtttgctgcaagaaaaatggggagactaaatcccatttatttttttggagtgtcccttctctcaatttctatggcataagatgatcagataatttggtatacaatggtgtatgtcttgttcaggcacccaattgtccctgtgtaaattaaaagggggcaggaggatctctacattgtggacagcaaccattcttgctatcttctggttagtctggttaagagatagcagaatctttgaagataaagaggatgtggcggaaggactgtgggtgaagactaaattttgggttgcaacataggtcttcaaagcaaaaggatttagggattatctttcctagatatctctataatgcattattcattgtttgtgtatgaaaactgttatttacatcagggatagttcttgtaaagctgtgatatagctaatttaggaaagaagttattacgttttatcaaagaggtaattttctgatgtatcaatctagacacaaaccgtgtatataaagctttatagggttcccttttccccttttcaactgtttgatgttgctttgattactttatttcatttctagt

SEQ ID NO: 97095 - DNA, 507 bp, Cannabis sativa
atttataattttactgtcacacgacaaaaattacatttatattgccgtgcctccccccctcccttttcttttatactataaatacctaaaaaaaacaagacctctattttctacacccacaggtagagccaccacaacaacacttaaacaactagaaaataatcattaattctggtgagatgaagcagaaacattaaaactattaatactggggctatcatagtttttttaatgtcatttttgagttgttccactattgtttcgtatgtctaacaaatgttagtttcaaattacacaatttttttttttttttttggtaaatcagcaagtgtattagatcaaacaagcaattttatacagcctaagagcaccctcaaaaaggcctcaagagaactataaactttacaatgagttgaaccaagcctcttcactactagttacatttttaggccatatacaagttattctattcttaatgacatctttaactttgcacacaactctatc

SEQ ID NO: 97096 - DNA, 731 bp, Cannabis sativa
  modified_base (487)..(491): a, c, t, g, unknown or other
gcgttggcacgttggcttggtgtttgcatcttgccacacatgctaccttggtcacgagtgactaggtaagcaccggtattgggatttgccttatcttagtgggaacttatggacaatgcaagtatcttgtctagagtgcctcgatgcatggattcactcatggatgcttgcgagcatgacttggtgggagttgatcgagagaaggaagtgtgcatgaggcacacagtcgcgcaaaaaatgagcccattgttactaggatggttggaaggctgaccttggcttaaagaagtcaaagtgccgcacgggtgttccgctgcctaaaaagatgagcacgtgacagttggtatcagagccaagttcatcttagtgggaggtgaatctggttggcctatcttagaggggatgtaggcgtgtggaaggatgctagaaagacaactaccacatgcaattgtagagaggcgcaacaaaatgtttgaaactcgttggnnnnntacaaggttgattgggtagtccatactatatgcttggtacactaggccgagtttgcctgagtgacatcgtaagccgcaagaggcgtttttattgaaaaggaagcttgttggcatgggtgtgaaagtagtgcaggggccgtcagattcttattagtcatggcagtggtcgagatttgatgaccgagatggttcaaattgggatagacatggaatgcttcagtggctacatgggtgtgtcaa

SEQ ID NO: 97097 - DNA, 591 bp, Cannabis sativa
aaaataaattatgtattttttaaactgtaaacataaaattttgagcttaatttttaataatttttttacaatataacaaatttgaagataattcttaaaattagttttgtaataacactttttgattgatttattattaagttttattttgacaaaaaaaattgttttaataactttacaaaacaaagagttttaaatgttatttatcctttaatttattttattaaaaattaaaaataaaacatagtatttaattgacttattttgtgatgaaatatggaacactagtcgtcatggcacaccgtttaaataaataaaaataaaaataataattatttttttaatcaaataaagacttttttatttttgggttatctaataaaatttcataaaataccaaagatatattaattcgtgttaacctaaccttcaagaaatttaacctactcattttgaactgagtaattttttttaataattattaataataatagataatgttaaaaaaagaaatgctaattataattttctatatacaatttacaatattattattataattgaaattttttgaataatttacaatattaa

SEQ ID NO: 97098 - DNA, 2951 bp, Cannabis sativa
  modified_base (2898)..(2913): a, c, t, g, unknown or other
atattcatttatcagaaaattaattaattatttatttatttaaatagaaaatcatttccttaattagaaaataatttccataaataaaatattctaatagtagtctgttctatgggttaattttttgatgaagccaagccattaatttgttcatgcaataccaaactttccacaacaaacaaaagaagtagtgaaagtcatatggggcggagggacgttaatgggtggccctggcccatgctcagttttctcttaaatattcttagaataaatataagtaaaccattgcaatacgttacatgattatagtattcaacaccttaaaatacttcataccaatgcggttaaataccgctggttatatgtattaacagtttgctcaactatatgcataagattctgagaaaaaagattaaatatttgaaagtagaatgttagatagatagtagggtaagtaaatagtgcatctcagtattaaaaccccaatgaaatgaaagcaagcagggtgggggtgggggatgaatctgcgatggaactttatttcacaagtgggcacagcattgtggtaaactttctttctatgactatgagtatatgtatgggacattaacaactatatcattgatttgattgtaagaactactcttcccatttgttgttggggttacaacttctctaacatttgtagcgactttaattttgttgggcccaaaatgtagccaagttgtgtaatgatctcttagcctattttgttgggtttttacactacatattgaattttttctttttttttttactttttttattgttgggtggaattttttttcaaaaatactgtataaattttatactatgtgctgtgttaaattttcaaagttgttccacaattattttttagttgtttttaattattctgttttgttgttttatggttgttttataaaaagttagtattttataaaaaaaactctgtgtgacaataaaattataaattttgctcaaaattcaatatttttgtaaaaattccttaatatatcttcatttttttcctccctctctctctctctcttttttttttttttacataaacaaattttatataattttttttaaatatttttattctctatgaactattaatattatcaaatcttgttctctaaattttttttacggttaaatattactcctaaactatttttcagtattaaaatataaaaattttgttaaaatttatctcatgtgcctaatacggttgatgtgttggatccagagctgaggtttgattcttggctggcaatggagccacccttgtattaagggcggccatgacctcccaaattttagaaatagtaaaaaattactctattctctttttggtttttcttttgtttttttttctcaaaatttatgctccctaattttgttctatatttattttgctccctaatgttcaagtcgacctatgtccctgggctggggttcgcatttggttctgaggttaggttcgggtccggatcggtattaagattagggtccggatttggggcgaagtttgaggtacgagttgggatacaaaatattaataaaaaaaatacaaatagattaaaattgagaaaaatacttatttacataaattttgaaagtaattttttttttttttttcaaattttgatttttattttaaaaattaaaaaagtaaaaatatttttatagaatatatatttttgaaaatatttttatttttttaattaaaaaaataaaaatttaccaaaagcatgtttagtcatttgtttatttttatttttgtatcctttcctttaggtccttacgtaaattctttgtctatttatatattacttctgtagtatgttgatgagattagagactttgtgttgacttgtataaagcaaaaactaagaataagcacaattttcaaactactttttctctaattttaccttttgaagttttagttcacgtagaaaaacaaatgatccaaacgtataaaacttttcaaaacacgtatttatgactaccaattattattattttgagaaaaatggaaatttttattaatagagacaagacaatccaacaagagtctattatatgatatgaactcaaattaaaatgacagaatgaacaaagtagcaaatcatgccacatattacttttcttcttaaacttttgaaattctttccaagtcactaattacaacgtgtataataaatggatacattttttttttatttattttattttaaggcttgactttttacaatgactcaatcaactctgacattatctcaaaaatagaaaaaaaaaaaaaaatcaacgtataagactttagagtactactatatagacttaggtcaagtgttttgatcttatacgcaagtgtttttgactgatgaatctataagaaatttgaaggagaagaaaagtaaaataaaataaaataaacctttgatttgcttttaattaagtgtttttataattaaagcaaataagtgaaacgtttatataaatacaaataaatgatctattgataatttaatgaaaaatatatatcaatggatatctttgacgtgtttagtttttcataaaatagttaattcaacttaatttcaaggattcattaatttaatacaattcgcataaaaaatattaatcaacatgtaaaagtaaacaattattcaatccaatttaattcatatatttatatatattttaaaaaaattatacatataactaatattttaatagtaaaaaataataatttaaaaatcaaatacatattatataaatacattttaaaactacttaatagatcaaatatatattccattctaatatatgattgaggtattttcttttttatttttacacttcaannnnnnnnnnnnnnnntttttgcatttttacggaattctatatagaaatcccta

SEQ ID NO: 97099 - DNA, 693 bp, Cannabis sativa
gtttccagccactcatgttattaagctctcaaaatagaagttgtaagaattatcttctctgagaaactttaacgagtgaattaaagaactcaatgaacataaataggaattcatgtatcctcaagattcagactaatctgctaatgatcatcgttgtaatatatataactctttcatggtaaacgacacgttaatgaaagatattattacgtatcgatttagtcatgcataatcaaattatacacaacacttttattacatgtctatccacatatgtgatccgaatcaaaatcacacatactagagtatacatagtatttctatattaaagattcctttttactttaatgtactaccgaatagtttcattcatgttgtatattttaattctcttgtagatccttacaagattataccttctccatatgaaataattttttttttgatatttattaattatccttctataattaatgtatttatttatcttataattatatttcatatattttaaaatattatgttagggtttatgctctaaaaaatctgtaaagatatttttgattattaaataaagagttgaatatttgatatatgtatgaatgttaaattattattagtattattattaaattattaatattaaatatctgaaaaattctttattcgtatatgacattgtggcttgtagtt

SEQ ID NO: 97100 - DNA, 790 bp, Cannabis sativa
  modified_base (284)..(285): a, c, t, g, unknown or other
  modified_base (464)..(465): a, c, t, g, unknown or other
  modified_base (493)..(494): a, c, t, g, unknown or other
  modified_base (522)..(523): a, c, t, g, unknown or other
  modified_base (551)..(552): a, c, t, g, unknown or other
ttttatttaggacataaaatccaacagaaacatcatcagaagtacttggacttaattgaaaaataccatacatcatcactgaaatactagaactcaaaacatataaattggcgcactataagtacaacttgaatccagtacccgttggtaattttgtgaatgatattaattgataggctaattagaatttttgtcccctaaactttgacatgctttgacatgcaccaaatcatgccctctgaacttttctgactgttaaaaattctccttgaactattgagatnnttggatttaaggacttttatctaatttcattcaattttattaattctatgtttgtttatgtactaaatcatgcttctcagactttgatatctaccaaatcatgccactcaaattttgacatgtatcaagttatgcctcctgatccatgttagacttttttttttttaataaaattgganntttttttttttaataaaattggacaaanntttttttaataaaattggacaaaagtcnnaaattggacaaaagtccttaaatccaannatctcaatagttcaggagaatttttaaagactttaaaaatttaaaaaatatgattttggtacatgtcaaaaatttagaggcaaaaaattctaatggggctaattgatttaatgaaggaaagagtcgtaatcataatatcattatctaatagggtgatcacatcacatctctatattttatagtcaaaattttatcaagggctaattaggatttttgccccctaaactttgacatgtac

SEQ ID NO: 97101 - DNA, 1238 bp, Cannabis sativa
ataaaaaaaatataacataaattaaatatacaccaaaataagaaattttgggtttaatgatgagactttaattaggaaatagtactactaaatattttttttctttctgattttatagtacttactagatttggggtatagtgaattttagttcctaattcatggaacagaattaggacggtttgatgaaataataaaatattatagttgcatgtgatatttagatatggatatttttcgaaaaatctctagttaattatttaattaattatatttgtgtgctaattagtgatgagtaaaaagtgttgattgggaataattaatcatgaaacatggtatcttataactgaacatgcatatttatcatcgccggtattatgatatagtacctgtaatttatatatttatatatttatattaatctctacaaaaatgcattctatttcggtaaaaatggtttttttcaggtgacgattactcacataaagacatgtataaagagagaatttatatattttatatttagtaaaatagaatacttttttatacttttttgacaagtgtgtttatgaaagctatttagtaaaagttgttatacaaatcaagtgattattaaaaattaatgtgttgttcacccaattatataaaagttgagagttcatgttgaggttgaggttggaaccattaccaataccaacaacctttttactttttacactcaggaaagaaaatttcgggggggcaaaatgtaaaaatagaaataaaaaaattacaaagttataagtcaaaaaattgattcagggtcataattaagggaaaagagcaatttgattcctgaaagtgatgagaaaaaactactaaaaaactatgtgatcatgttaatataacacaagtaattaattcttacttaaataaacctttgatgctgcaattttgataccatagggaatttctctgttttggcaagtaaaattccaaatgacagtaatcaataaaactgtattttttttatgcataattttgatctctccaagtaaaaatatcattatacagcaccagaaattttatgccaaaaggccaattatgacatattttccaccaaagatacaatataaaaaaaaatggcaaaataatttttatttcttcttttcattttgataattcttcataaaaataacctctatgtctcgtacaattcaattaaaattctggacaccctacatgtacattatttcata

SEQ ID NO: 97102 - DNA, 565 bp, Cannabis sativa
acaagacaattacctttcttttctaaatgagctttgtgctttcgacaatcagctttcttatgcccgaaacattgacaaaagttacatttttctttgaaaaactcattcttgtgaccagttgaagatgatcttgcttgtccatttcccttaggattggtcactaaagttgttggatgtgaactctccctgtgagaattgtttggatttgtaaccatggagatacttcttatgctcttccctttttcatgtccttttcttccttggcaagaatagcagtcatctcttcaatggtctattgctcattttgagcattgtagcttgatctaatcgaatcaaattgagaaggaatgattccatcaaaaaccacaccatgtaatcttcaccaagatccaatcccatatccttaagcttttggtaaaatccatgagcttgttgatatgagctctaatatcacttgtatcagcataattagtgtgatggaacaaagttaagtacacatttttctcattttttgagaacttcttgtgctttccttaatggaagcaagaaaatcctttgcattttc

SEQ ID NO: 97103 - DNA, 636 bp, Cannabis sativa
ttcaaagatcattaagttaaactttgaattgtatccaaacttactttcctagactttagaatcgcattttattgaaaatggtaaggtctatgattagttactagcagttgcctgagtccttctagggatatggcttagagacagcaaaaaatattctaaatatcatcccacataagtctgatcccaatataacctcataatgatgtaatagtcgtatacatagtgtacaccattgctagattcagggatgccctgatcatgaacttaagaaaagctagaattgttagtttaggttttcatgtttgatagatattctaaagtgattaggggtggatcattctatggtcattaaaaaagaaagtacaaatactacttttctaagaacattactaaatcttaaaacaaagtaacaaagtagaagagatactatttgattcaaaccaaaagtgttccatcatcttatactatataagatggtctcactatgtctattttatatacgtaagttgataactctatggtatagagttattttatatgattttaaactaaaagtattgtgagaagagtagtgaaaatgtgtttgtttgcttaattttagttagttttagtttcattttctatttagtaagctaa

SEQ ID NO: 97104 - DNA, 3172 bp, Cannabis sativa
aattattattcttatattgtgactataaggtccgtaattaaagacattagtcacaaaaattataatttattgtgactaaatgtatcacaatatttgaactaaaactaaattataacaatttgtatttaaatattatgttttagtcacaattattgtaagtttttgttgtgactaaaagtcacatttaatcacaaaaaaactatgttatgattaaaatgttatcactaaaaataatagtcttttagagtgtcacaaatacgataaatttagcaaaaaaaaggtttaatttcatgtattaattgtatgatataattttcctttaaaagaaaaaaatattactatgaggtacttatggtgcctactcctagcaccacgataaagtatcatattataattggataataattttttataatacttgtagggccggccctagaacgcaaataaaaaaatacctttcaaaatatatatataattttttgaataatttttaaaaatattatttttcatagtaaaggtctaattttttttttcctatgaaccatttcaactcaggactgatccttaatacttattaaagtaaaataagtgagactcactattaaattataccaatagtaataatatatttcacaaaaatactatgcactatgatttgtcctttacttctttagcatttctaaaaaaatatattgtatgatataattttcctttaaaaaaaaaattgtatgatataatttatattgattggtggagacaagctggcgcagtcggtcatgggaactgtataataagagttaacaacactaaacgtcaatgtgatgcatttcaacaaaaaaaaaaaaaatcatttcaaaaataataataataataataaaatgatggtgatgtattggaattaagaaggcacatttttttttttttatgggaatgagttcgctcctaatagtgtagggattctctgtctaaatagaaaatgtgacggaaataggtgatcactcttcttgctttgataaagacccgtttaatatattagttatattttttattaatattttatgttttgtaatacacatttatatttttttttagtatattagtattatttttataatttttaagtataatagttattatattgaataataaatattatgtaatatattttaatttattatttttatacatttaaatttttaaaataaatttcgtttttatattaggagattcacagaccgttccctgatagaaaacaagtaagatagatattaaaatatctttaacgggaacaaagacacgaaagcactactcgcgtaattcttcacccgtgtacagccctaattccaattaatattttgaactaaataattaaaatatgctcccatgaactaattaatacctttgtaaaagttttgtactttattattacaaaaatttctctaaattataaaaaaatttataaatatttttcttatatttttcttatatttatatttaatattactatattaatattctatatttatatatcaatatactatacaaatcacaagaaaaataggggtatgggttttcgtagtttaggaactttaatcttggataaacaaggttggcaattggtggttcatactaattctcttgttagtcaaattttgaaagaatgttaacgtgtgtagtgttttgtttcatttggattagaaccttaattaatattaatatttatcatcgtaactaagtgcatgttacggattaataatccataggacactaaatgttgggaaaggacctagggttttggagccaatatatggaaccaaacataagaagacataagctagtcaaattgttacaaatcgttatatatataaaaatttaattaaattataatttctcaaaatatttaaaatataagtactaatatttatatataattattctttaataaaattattaaaataaataagatttttttcccattcgaactatatactatgactctcataaagttgtttgtatttgttaattttattgaagaattatcacatatactattttttattttattttttaattttacatggtttagattgcttcgatggttgttatgtagatttgagattatgatttagattactttgtggattgctatgttaacttatttcgtaaaaatgtaaaaaaaaattgctttaaaatataaaaataaaaaattcctattttttttttaaaaaagttctccatgaattataaaatggttgcaaaatattaatttgttttttaacattaattagcatgcaaatattataactctaaactatgagcaatttaaaataggactctttttattaatatactataaaatgtaaatgatacaataataataataatactacaaatttatattacaaaaccatactttattttgaaaataattgatcattgagacaaattaaatattatttattatttttacgctaatacatatacataataaaactttttattttattttataataattcattttttttttgtaattttctaattaataatgtagaaagatgaaagatatttttatatctaaacattaattatttataatacttttaaaaataattttataataatataattttttcatgacattttatccaattttattgtaaaatgagtaaagtactactagtaattgataattgagacaaattaaatattattcactatttttatgctaatacatatataataaaagactttttattttatattatataataattcatttttttttggtaattttctaattaataatgtaagaagatgaaagatatttaatttatatctaaatatcaactattatcaactagagctatcctactattttttttttatgaaattaaataaaatataatagaagaattaataatagtgtaaaatatttagagtaaaaaaaaatactaattattaaaaatgaaagaaaattttataaaaaaattgtattttcatcaaatatttataattaaaatatcgtaaaataatcgtgaaaacttacattataatttttttttaaaaacaaaattcggtcctataataaaaaaataaaaaaataaaaaattttaaaattataaaatgtggtgtaaaatccctaaagaataaaactattgaagtaagaata

SEQ ID NO: 97105 - DNA, 512 bp, Cannabis sativa
ttagactattgttatttggctgaactaccttacactagcgatcctttcacttggattaaaagcagatataaagaagatactgttaaggagagattggattggtgcttcgtcaatgataaatggctaacaaatttcgagccgattacaacactccatttggacttctacaggtctaaccactgtgcaatctcagttacggttcagcaaatcaaccaacaacctgataatgtcaagaggaagacacggtttagatttgaaaagatgtggcttaaagatgatgaagcagcagaaatcattgcgcagaactggaacatacatagtacaacaacgagtatggatctttttcttaacaatttgcaagcttgtacaacttctctacaacattggcatgctcacaaatttggaaacatgaagcagaaaatcaccaaaatgcagaaagatattgcagcacttaataattctgttacaaggacacaacaaaccatggcagacttaaaaaaatctgaatcaat

SEQ ID NO: 97106 - DNA, 793 bp, Cannabis sativa
tctctctaacttcttcatctttgaaaccctagcccccaaaatcagccccatcaaaccccagctgactccccattccaactccacacacagccaatcaatctcatccccaactccctaaaaaatctcactcaggtctctccaacgttgttgattttcctggcctaaactacgtgctaacacccaaatttaaatttaaatgacgatatttgtcgtcttttttaccaaagcaaaatgaaacctaaagccatggaggaggggcagggatgctcggaaccggagacgaactgtatggagattgagaccaacaccgactctatcgacagctcattgatcttccatgccattaatgatgtctccggattccttctctacatgcaccaacaaatcccttcgtaagtttccttctctgagaaatcataccaaaacccgacacctaaatgattcgaattgtgtgattgtggcctgtttggtttctcggaaagttgagagtaaaattcatgcttccttgacgttttctatatatttcctgtaagcaaaaatctgatgtcgctttctttttacgtagtgtcttgcaagatataactctcgaattcgagaaatggtgcaaagagtatagtaaattggtatatttgtgagagtagattttccaaaatcgaatttggatttgttctttttctttgaagaattagggagctagggctgagattggttggcggtgcgtggagctggaatggggagtcggttggggtttgatggggctgattttgggggctagagtttcaaagatgaagaa

SEQ ID NO: 97107 - DNA, 514 bp, Cannabis sativa
  modified_base (454)..(459): a, c, t, g, unknown or other
tcgtcagaattgccattgtcgtcataaaaatcatcgaaaaaatcaccaaggaaccttcatggtaattttccggcgactatgccaattctgatgactttttcgaagtttgctgacggtactagaaaagtcaccggagtagctgctagcatcaagaaagtcgtcagaattggcttgtcaatggaaaaatatgaagaaagtggtttctttctcttcaagaaagaaaccggttttttggtattttttcagtgatttttccaccgacaatgccaattctgacgaatttttcggcaccagcagcaactccgacgaattttctggcaccgacgctactccagcgacttttccggcactagcagcaaactccgatgacttttccagcatcagtgacaaataaaacttcctaaacaaataaaaaattaaatatgggacttgaaaacctaattacatatatatnnnnnntcaaataccataaaaagacctaaaaataaaaaaatatcatataaattggtcaaac

SEQ ID NO: 97108 - DNA, 744 bp, Cannabis sativa
  modified_base (420)..(440): a, c, t, g, unknown or other
aagagcattccattggaatgccattccaataatttaaaatgcaaccaaacaaagaaatggaataaaaattgtttcctttccattccattccttttttttacctctaaccaaacgccacctaagttcaatcactgaagtacttttgttgttgtttcttgttgtatctgcaacaaaaataatattttgtttgaaaagtgtgcatttttatataaacattaattataaatctagcagtgctaatgtaatttagctttataattagaatttttgtaccccaaattttgatatgtattacattatgctcctgaattttcaagatcattaaaaaatcctctttaaatcattgagatcgttggatttaaggacttttgtctaattttagtaaggaaagtttgacatggatgaaagttcagggggcannnnnnnnnnnnnnnnnnnnntcgagggacatgatttggtagatttcaaaatctgaggagcataattttagtacataaacaatcattgaattagtaaaaatgactgtaattggacaaaagtcattaattctaacaattttaatagttcatgggaaatttttaacgatcaacaaaattcaaaaggcatgatttgatacatgtcaaagtttagagggtaaaattcctaattagtcttacataaattaattttaaaaagggttactacattaatactttttaaagattttctattagtttcaaaaccattcatctccatcacgaaatc

SEQ ID NO: 97109 - DNA, 1426 bp, Cannabis sativa
taggagctgtggtgatctcaaaacccgggggttggagcatgtagacttcctcatttaatgtgccattaagaaaagcattgttaacgtcaagttgcttgatagaccagccatttgatatagcaatggtaaggacaatgcgaatggtcacgggtttgacaactgggctgaaggtctcagtaaagtcgaaccccggttgttgatgaaaacctttggctacaaggcgggctttgaatttgttgtgtgttccatcagagttttctttctccctaaaaacccatttgcaacctatgggagtccttccttctggtaatgggacaagagtataagttccatttcttgtcaatgccagcatctcatcggtcatagcttgattccattgttcttgttgtaaggcctctttgatatttcgtgggatctttgtagtgaaatagacttttggtttgtgtatgccagactttcccctggtttgcattgcatgagaattgtggggaataactggttgtgttgctgcagatgctatttctggtgcaggaggtgctggttctgatgcagcaacagtagttgatgctggtgcagaaacaatggtagattcttgaatagaaactggaactgattcagtgtgaagagtactgagaggaactggtatggaagcactgctgttgtgaatcagggaaggagcagagttgggcaaacttgtgtcttgaaaaggttcagaagaaatcgagacagagacaccttgttcctgtgttgggacatcagtacttgccacattgggcacagaattagtagtgtatgcaggaacattatgcatgcaagaattgctaaaggtgtttgtgagaggaatgagtgcagatgtagcaaattcagcataggaatatgaatcaatagacaacttgggaattgaggtaaagggaaatgatgtttcatcaaagatgacatcacgagaaatgtataacctgccagatgtgtctaagcacttataccccttatgattaagactataccctaggaaggtgcatggagaagaccgaaattgtaatttgtgtttgttatagggtcttatgttgggaaaacacttgcagccaaatgtttttagggtagtatagtcaggtgagatgttgtataatttttctatgggagatttgtgttgaagggtaggtgtaggtaatcggttagacagataaacagaggttctaaaagcttcatcccagtatttgagaggcatagaagcatgtgcaagaagagttagaccattctcaacaacatgcctatgctttctctcaactaatccgttttgctcatgagttgtgggacacgggtgtctatgagtgattccaaattgtttaagatggtcagtaaaggacctaaattcccctccccaatctgtttgaaggcatttaatctttttaccaagttgtaattcagc

SEQ ID NO: 97110 - DNA, 3245 bp, Cannabis sativa
gtgtagtttgcacactaagtgaggggcagatggaatctcaaatcctattggttgcaccatataaacttcctcattgagagtgccatttagaaaggcattgttgacatcaagttgcttgatagtccaaccacgagacagagcaatgcttagaacaattcgaatggttataggcttgactacggggctgaatgtttcagtaaaatcgaagccaggttgttgatgaaaacctttagcaactagtcgagctttgtacatatgaggagttccatttgaattctctttctctctgaacacccatttacaacctataggagttcttccttcgggtaaaggcattaatgtgtaagttccattccttgttagagccaacatttcatctgtcatggcttgattccactgttcaagttgaagagcttctttaactgatctaggtatttttgttgtaacataggcctttggtttgcgtatgccagacttagcacgagtctgcatagcatgagaatttactggtgtggtctgtagagtagcagcattaggtgttggagcaggttgttgatgttgagaagtagcactagtctcagtagttattgttgtatcaccagtagcaggagcaaagacaacaacttgagtattggtgattggttcaacaacattatcattgagtgaaggcctttgttgctgtgaagaagtatgcaactcagagacagattcctgcacatggacagaagtgcttgccacaggtggcacaaatgtattagtgataataggttgggaatcatcattatgagagttagacatgttggctatgggaatttgagctggagtgaagaactctgtgtaggaataggaatcagtggtgagtttgggaatggatgcaaatggaaaggatgtctcatcaaaaattacatctcgagagatgtataatctgcctgaaacatccaaacatttgtatcctttgtgattcaaactatagcctagaaaagtacgcggtgaggacctaaattgaagcttgtgcttattataaggtcgaatatttggaaagcatttgcgtccaaaaggtttgagttggctataatcaggtgtgattccaaagagttttgtaatgggggatgtattctacaatacaggggtgggtaatctgttggctaagtagacagaagttctaaatacttcatcccaatatttgagaggcatggaagcatgtgcaagaagagtaagcccattttcaaccacatgtctatgttttctctcaactaacccatttttgttcatgagttgttggacaagggtgtctatgaatgatgccaaattgttttaagtgatcaataaaagatctaaactcccctccccaatcggtttgaagacatttaatctttttgcctaattgtaattcagtttctgttttgaattgcaaaaaggttttcaaggcttcaaatttatttttcagcatatagatccatgtgaacctagagtaggcatccacaaaatgaatatagtatttgtaaccattgacagaggtggttttagtaggaccccacagatctgcaacaattaattgcaagggttcagtataggtggtagatgatgacttcggaaatggaagcttattgattttgcctaagcagtaggcagagcaaacacttaagggatttttattacaaactgagatattacaacattgaagcacagctttgacaactttctcagatgggtggccaagcctattgtgccacagatcatagtcagaaatctgagttttattacagttattacaaacagaagtgggaggctctatattagaagacatggaagctgttagcacccttggagcagcaacagagttggaaggttgcacatgaaattgagaggagttaaaagtataaaggccattctggtgtgtcccagtgagaaggatggcttgagtttcctgatccttaacaaagcatttatcagcatgaaactcaaaaaagacattgttatcatgtgcaaaatgagagacactgagtaaattctttgtaatttttggtacatgaggtaaattgttcaagataagggggtgtgaggactgagtttgaatgaaagactgacctatatgttgaatgggcagtccagaaccttcaccaacatagagttgctcctctccctcatattcgatgttggtgttcagattctgcatgttgggagtgcagtgattcgaggcactagaatctggataccagcttatgtcatccatttgtgttgtttgagcaacattttcttaggcattttgagtgttagagccggtgaaaactccagtgaagcttttatcaaaatgatagaagcaatcaagaacggtatgcccaagtttgtgacaaagttggcattgaacacgattcaagggagtgggaaatctattgcctctgctactggaattaaaaccaccacgaccagtagtgctattaaaagaaggcagattagtattgttacctccagtgtgagctcctcgattgttgaatccacggccagaccctcttgaggatgagggagggattctgttttgattgtagaatctgttggtgcgatttggataattctggtatgccatgttgacttcagagtattgatccagatccagatccagatccatagtagcaaggttggcactgagctcagtttctggttcaagatcagtcttttctattcgagattctgaggcaagcaaaagtgctttgatttcagcaactgaatactcttcaacacgagtattagtggagatgatgaatgtgtcatactcaggagacagtcctttgaaaatggcagctatgtggtctctagcgcttagaatttctccaactgaagctagcagatctacatgttgtttaatcttcagaagatattcattcaatgacatagaacctttttgaattttctgcagtttggttcgaaactccaggatcttggaagagacttgcagagtgaagtgtttttccagggcattccaaatctgcctcgctgtgttgcatcccaccatgcgtgttagaaggctttctctcattgaagatagtaaccaggacactaagagttgatcttgaacctcccagtcaagaaaatctgggttgaagatgttcgatgcttgatcatcatcattcaagaatcgaggtggaggagctcgatcttgaatgaatctttgcaatctgtttccacgaattgcagcaagaacctgttgtttccataagaggaaattgtgatcatttagtctaatagac

SEQ ID NO: 97111 - DNA, 538 bp, Cannabis sativa
  modified_base (80)..(82): a, c, t, g, unknown or other
ctaatcttcttccttcaaattttataatcccctgatccatcaaacttgtcaacatccactctaatattactcatgttaannnaattgaacaagataataaaagcaagaatgtaacaagatatattctaggttagagttttatgtttatcaattttttgatagttgcagattggtttcttcaatgttttgatgatctttcttgtttcttgactttatttccaagtgttgttgaatcttcttgcttccacgaactctgataccactgtaggaaattaagcatgcccaaaatgcccctataccaacacctcaaagtacaaaaaaccaaggtaaaaaaggaccttccctcttgtgcggatcaagagtaattttccccctcaaaaccctgcctttttatggcagtataaactctttatgtagcagaataccctagttgcataaacgctccttcctctaaccctaccagtcgctcatcacttctcttcttctcttcttcttgcttgaaaacatagcagtcgaatcattctctctcagcttctat

SEQ ID NO: 97112 - DNA, 840 bp, Cannabis sativa
catgaatctcttctggcaatatttttctttcgtatataatcttctgcaccctcagaaactagggccagttcaattatctaggcataagtttgagcaaccgccggttgtttagaagcaacaatcacacccgtgcgatgtgttcatccagccctcgaatgaactttgctttcctagcagcttcagtagccacctcatctgaagcaaacttttccagtcgatcaaacttagtggcatactctatcatagtcatgctgccctgagttaatcgtataaactcttttgcctttactgcctgaaaagactcattataatacttctcataaaaaaaggcccggaaggcttcccaagtcatgttattcaggtcatgaccccgtgacacaatctcccaccaaacacgggcatcatctcccagcatataagtagcacacctgactcgatcattatcctagacccgcataaaatcaaagatggatgttatcatactcatccactactctgccttgagtgaatcagcaccaccctcaaacacttgcggattctgcttccggaaacgctcatacaacggttctaaacgattccatgcatccggtggcactaccagaggtgctagaggatcaggattaggatttagagcaggctgagctcgttgctctctcaattctctaatttgctcacgctgctgccggatagtcttttgcattgcagcgtataactcttccaagtttggtgggggtgaagggttctcgccctcaacagcagacccgagcccagctagctcgcggttacccctaccagtccgcctcgggtgcataatctatacacatgcggtcacattccaag

SEQ ID NO: 97113 - DNA, 698 bp, Cannabis sativa
ttatatattacacaatacataacctgggactcgaacccaggacctccaacacacacgcaccctcctatggtcaattgagctaccctcaagtggttattttatgactaatatctagttattacaattgtccactttctattctctttctaattatttcctttgggagggctcgttttttttccatatctttatcccaaaagacaaataaaaaaagctaaaatatattaataagtgtaataagtgtaataaatgtttattctcacgcaaacatgatatagtagatactttgataaaataaaataaaaaaaaaagtgatttttaagtgataagctaaaattgtacttataatattttgtggatgattgttaattataatctcctattataattttttaagttcagtttgacataatttttggaaatgctaaaaattacattttaaaaaagctgtgataaaaaatgtttggtaagcagttgaaaaataacttatcgaagaatttatgaaaaaactatagctaaaaggtaaagctagtacaatccaacttttagaaaaagttattttgattaaatgactaataagttatttattactaaaaatgaattatttattatatattgaaaaaataaaaatatcttttttaaatgaaaaaatatttaaaataaataatatttaaatgtaggggtttttttatttttac

SEQ ID NO: 97114 - DNA, 987 bp, Cannabis sativa
ctattgtaatggttgaatcttcttattaataaagttaccattttccttcaaaaaaaaaaatattacactaaaaaatattatttattattttattaattttttagaaagtacttctacaatgtattttttcaaataaaaaaattacacgtgcaactgcaatagacagtttaaaccttatttttaacgtgttaagtccctacaacaaacacaaaacagtgtttcagccagtgaaatatccttttctactagatatagtgcacaaaggctaatctggatgaatgaatactactagtactaatagacatgttttttatgaactcactttgttttttcctcaaaagattttacagatttttatgctatttaaaaaaaaaaaaaaccaatgcatgatagggacatatttatcatttgaaggaaagaaaaaatactatttgatttttttgggttttgcctttttttttttttagaaaaaatatacatatatattatatcaagtaataagcaattaaagactgcagaattaaagccacaattttttttagagaaacaggtgatgacgaccagtggcgtgtggtgaataacaaataataggaaaatgaagtaaagggtaaagacaaattagtaactgaggttgacccaaaatggaaatagctatagctattgcctctatccctaaaccacaaataatgatgtaactgatttgaatcctcatttattacctatccaaaattccatgcatttatcacctctctctctctctctggaatttgtaatttagtactgttctgttgagaagttgtggcattaatgcatttaagaagtttggtttataaaatgagaattacttttggggttaaatggcttcttcactcactaatgttcataagaagcaaactttggtgtaaactgtactataggttacttaactgtggcattttttctctgctaggtcagttctctcttcttctttttgcaccacttttagat

SEQ ID NO: 97115 - DNA, 577 bp, Cannabis sativa
gtacttgttcccgaaatatttaaataagaaagtacaatgaaaataatagtaagtcttcaacttttattcattttaaaaatagaaagacatcagattagtattcggtctggcaaaaaaaattaattttctgttcaaaactgagatctgactattttcgactttaaatctaacatcaacttacaaataacatacattaatcatacaatttattcttaaatcaataaatctataaataaaaccatacatttcaaccctaaatcacacaaaatacaagaaaataaaatggagaacttatattcttggcgcagtggtcgtgattcagagatcctaggtcttgggttggtagtcgtcggtgggttggtggtcttcgattggaggtgcgatggttggttttcgtgggttgatagggtcttcgtgtgcgtgagaagaagagagcaagagagatgagggagagagagaaggggtgagttatgaaagagtatttttgaatttaatgaaaaaaatgaaatatctaattaatttgatatatttagattcagtgtaccaattttgcccaaatggatgaatagtaattcaa

SEQ ID NO: 97116 - DNA, 599 bp, Cannabis sativa
tagccattggtttttctgaggtgaaaagctataatgcctttagactttactctctgatgttgaatttcttcattggtatctgatctaatttattgacctaatcttaacaggctgaaattgtggtcaattctgctctttcttgtttagccaagaataataaatcaggagatcaatgtgaaccaaaagaattgaaactttcccaggtaattctatttgattaattgcttctatcttgaagttttttctgtttgtcatatttctagattgatgtagctatttctattagaggtgggcgagatccaaatcaatccaattgtaccgaattaatcaaatccaatttaattataaaaaactggatatccaacattggatcggattggatgtgaatagttagattctaattgggttggattggttattggatgacactttcgaaatctaactaaaaaccgatccaatccaagtttcgaattgaaatctaataaatgaactgatcaaatctaattactaaattaattgaatttgattggattttaagtctaattcgattgaattggattagaacaaaaaaagttggattagaacggatgctaattcca

SEQ ID NO: 97117 - DNA, 832 bp, Cannabis sativa
gctagcgtgactaatcttcctatcattggctttgaccatgccccgatcctgcttaatccttgaggtcatgagccaaagattcgatctcctttcaggttcttagaagtttagacgtcgagccctgactgtggaaaagttgttgatcaagcttggggaaaagtgcctgcaaccataacagatgttcaatatcaaaagaagttaattacgacaaagtatgagctcaaaaaatggcatcaggatgtttttgggttttgtgacagacaactcatgtctcttcgaagtcaattggggcgtcttcaaaatgaaccaataactacttctacggtggaattagaagctcaaattcagattgagattatggaacttgaaggcagaatggataggatttggaggcaaaaatctcctgaaaattggattcggttcagggatggaaactccaaatttttccatgcctctactatcattcatagaagacggaatttcattgggagtgtagtaactcggaaggaatttggctgacacagagagacagcatcggagatcatctccaggagaattttatttctcttttcactttggacgaggtagtgagccggagttggatactctcttcatcgataaagtgacggatatggagaatgatttaatctacaaaatccctgagaatagtgagatcaaggagattgttttaaaactccatcctctgaaatctccaagacctaacggcttctcaggtttattttttagaaaatactggcatattgtgggaggggatgtctgtcacttcattaaggtttttttctcgacaggggttttaaataagaaactcaac

SEQ ID NO: 97118 - DNA, 506 bp, Cannabis sativa
  modified_base (479)..(481): a, c, t, g, unknown or other
atcccctcgtaaaataagtggcggcatgttttttccaagtgatacgggtaagtaacttaattttaatttgatgtctttttgattggctccaatcttcttatacaatttatccaataacatctcaaacgttcgaatcatcgacaattatagatataacttccttattttttggcaaccacttatatgatccctgttcatccttccactccccatcgtactgaacatagattactattcgagtcattcctgtatgaaaaaaaagatagttcatattaaaaaatagttaaaatatattgatgttaaaattataattagcaagttcaattttcaattaaattcaattaagtattatcaatgtgtccatcaaagagtttaacaataattgagtattaacattatattgatcatgtttggtcgagctagttgagctctattagaattatcatatctattgaatgtcactcttttagcaaacatcnnnaaaaaagtttaacaattaaaaatat

SEQ ID NO: 97119 - DNA, 879 bp, Cannabis sativa
gagactagctaggcattaatgagccagaaggtaatattaaatacttgggtcttctatttaggtccagacaaaaagaagccaatttcaattttataatggagaacctttcttcaaaactctaagggtggaaagtgaaaactctttctaagactagttggacgactcttatcaggtctgtgggtctcaccatgccaatgtattctatgcaaaccacaaagctctctagtcgaatggtgactaaaattgatggtaaggtaagggacttctggtggaaattgaaaaggaaaatcatgggatccacctcaaggcttgggataagctgtgcctccctaagtcttgtggtggtctaggcttccataaaacaaaagagatgaatcaggttattctagccaaatggggttggaatctgctaaccggaggtgactctctctattgtaagattttgaaagcaaaatacttacggggtaataacttctttcattaaagttacaaggatttgaggctcttagttttggaagaatgtggttaaggctagatccacgattcaaaaaggagcctgtaagctgattgttgatgggaagtccaagagtatctcggatgatccttaggtttctcacgagaacagattctttcctaaatccaatggcaatccttcctttggctataattgggcagttgatcttttgactaaggacgaggactaggacctccataagcttcactatttgtttgagcctaaaactgttgcaacaattttgaaaagggggaagccttctggtaaggggcagtaattcttggatatggactaaagaaaagagtgggaaactctctagtaaatttgtttacttaacccaagcccttgagtgggctcctcactac

SEQ ID NO: 97120 - DNA, 691 bp, Cannabis sativa
aagccgccagatgtgaagcatcaaaataatgtgaagaaaactagattttcactctaaatgaacatgtgacaaatcacacctatcaataacaaacaacctaaggtcctctaataaaaattggataaagacaccccattactacaataatggaaaaaatcatgatagaccatgttaaagttttcaaaaaataaatctcgaagaatcataaaataagatgtcaaaagacatcggtaaaaattttagaataacctatgcatccaaatccaaaacagactagagatcaaataggggtgtaaaaataatgttattagaaacaaataaaacaccaagacccttacataaagaaagacaagacaaaatggagagcaaaaaccaatggcactaatcaccaaaggaaccacacgaaattgatcattgtctcaccgaccacaccccaactgtctttgaccacagactgagaattcccaaaacccaaatacgagccataaggtccttgccaaagtctcatcgaaatcattgattaaaaaaccagatctaaaatggaccaccaaagaggaaaaactcttcttagaacgacccaacccagagccagcaccgctgaaagattcggcaaaacatgtgacccatcgcccgagaatcaacacgacacagccaaagagatatcgcagaccagcaaagacatcgtaggaac

SEQ ID NO: 97121 - DNA, 597 bp, Cannabis sativa
ctttaatctctcttctccaccagtacaccgccaagtaatgttattgatcactgttttcttatgtattgtcattttatattctaaatatttattttttctccatgtttgaagtttcatataaaaaatcggtcgagaaaacaaattttagtaaaacgccagtcggagcatcaacgtttgggtgtccaaaaattaacaggttagtttttttaatatttgtttatatgtgtattcattaaaaaaatatattatttaattttgtatgtatatatatgatatatatgtattatatatatataatacatacataatatattgataaagaaatttaaaatttatagttttgtataattttaagttatgagtaaagttcttgaaaatcggtcggactattaaagaggagtgagttataaattaaaaaactgttgggtaacaagttctcgtactcaaagtcaagctcaatcacaaggcccttctccatccattagtgcggaagatatgggagtctttgctgaatttatgttaaaaatacgtgataagattgatcagtctggcacctctagtgacctttctcttcttgacccacggtttgaaaatttt

SEQ ID NO: 97122 - DNA, 547 bp, Cannabis sativa
  modified_base (36)..(37): a, c, t, g, unknown or other
aaaaaggaatgtttatttaattaattattttaagannatagttaattataattaattaaatttaaaaaaggaaagtctacctattagtaacctgctattacacgctaaagaaaaatgtaaccatatagttacaataaaaatgtaaccattaaatagtcacccttacaccaaataaagcttcatttaattacaccaaataaaattacaccaaatcgctacttattatttgaatcctattttcagcactataagttatttacaatttttttttttaaaaaaaattaggcaagatactttagtaactaactattattaaaagaggataagaaaatcatcaaccatttcccccaaacattacccccttttaatttattatttactaacttttatacctcctactttattttatttaccaaaatatcacttgcatacataattctcttagggctggtttggaacgtcgtattaggctgtattgtatattgtattgtattgcattatattaaattggattatatataatatttttatataatactatgttaaa

SEQ ID NO: 97123 - DNA, 539 bp, Cannabis sativa
gtagcattcttcccattctccttacgaaaggggaatggttcccttcacaatctctaaagtatttttcttcctttcactgttggtacatgttctaatgaaccaaaatcagtaacaaaaggggattgaaagatcgcagaaggtttgggctcccttttctctaaatcagccatattctcagtagacaatatggccttttcagttgtgctcttcaaatcaggggaaacaacaacaaaaggtgtatgtggttctttatttttagtaatttggaaataacaagaaaacataagacaacaaaaactataaataaaagagtgaaacaattataaattattaaaacatacttgagttccttctcctttggatttttgaagaaatttcattactccactaaaaccagaataagcggcatcaacaacctcattagtaaaatcatgatcctctctaattaaagcacccttcaattttttgtcttcaagttcctgccaagattaataacaaaaatatgataataagtatctacaaaaagtaacctgatactt

SEQ ID NO: 97124 - DNA, 1337 bp, Cannabis sativa
aatcgccagtcgcaatcttgtacaggaaggctcccgagaacttcagctatctctctgtgagtcgcgtcgaatgcaggtcgagcaggtctatctgcgaaaataaaaggagcgagttagcatgaaatctcaagataattcaaaaaaaaataactaagtcaggaaacatgcgacatactaggtcgacggttaaagtcagtcctgatccaaggactttgaatatataaaaccacttcgatttccaatctcccatattggaaaccatgccttctaccccattaatctcagaggtggcccacttgctgaagtaatagaaaccgttgtggaggcctacgctctttatatcgtagaagtaactgaactcttctactgtgggtgccctatgtacatactccatatacatcgcatagaaggctagggccgtgcgataactataaggggttaattgaaaaggagacacgtcgtaacgcttgagaatggccgcaatgaaagggtgaaaagggatcgatacaccacatcaaagaatgggtattgagattaccacatcttttgtggaaatgatcgcaggattggtaaaggaaaggtgcgctctctaagtaggtttaggttgtaaagaaggaagtcgcagaaggttcagcctcgtgaaactggtaagatctgatttggtgaccctcgagaccaagtcctcgcatgaaaagggctcgttcaactgagcgttgtccaccgaatcggtcccacttacttccgcatcttcttcttcctcgactgactctcgggctggtgccgcccaatcatcgtccatctcctcgacctcgacgtcaggagcatgcctggagtggacaagatcatcacgcgctgacaccgtagattcactgtaacgaatctcaatggttcctggttcagcaagctcctgcaccatcctctcaatgtttgcgaaagacatcgggcctaatcatgcacctatcgcggttgcgatctcctcttctgagattgatgttgggataaaactgtcctcctgttgggcctcatctccatcaaacgcgttgcctcctgagccaagcatctggatatccgataggtcgcttatctgaaagatagaagatcttttcagcgtggtgaatgtgcgaaaaaaacaaagtaagtgacctcacccgcatataaactataaaatcgtcctgggaggatgatttgaactctcgcgaaaactaaccatcccaccaagacgcgaaaagtcatgtgtgagaatagaaggatatctcaaaaaacggctgggtgtatcccagtaacctaagcgacatgcgttttcgagcatgaccctgaagtgactgggaaacacccac

SEQ ID NO: 97125 - DNA, 2516 bp, Cannabis sativa
  modified_base (389)..(391): a, c, t, g, unknown or other
gctggttattatcgttggttcgtagaagggttctctaaaattcaaaacccttaaccgagcttaccgaaaagaatcagcattttgtgtggacggataagtgtgaagcaagttttcaggagctgaaacaaagattaatcacagctccagtgttagccctaccttatgataaagagaagttcgtggtttattgtgatgcatctagacaggatttagggtgtgtactgatgtaggccgatcgggtcatcgcttatgccccttgtcaattgaaaaaatatgaacagaaatactcgactcatgatttaaaacttgccactgtggtgtttgtcttgaagctttagcagcattatctctatggagagagatgtgaaatttatactgaccataagagnnncaaatatttctttactcagaaggacttgaatatgagacagaggcattggttagagttggttaaggattatgactatgagatcctttaccaccttgggaaggccaatgtcttgagcaggaagggtcccgagcaggtaactaatatgattcagatttcatctcaattagtagaggacatggtcagataaagcatcgagtttgttgtaggcaaacttcataacttgaccctgcaatctaatttgttagaatgaattaaagctgcccagttaactgatccagaattagtaaagatcagggaagaggtttcaactagtcaagccagagattttacagtgttagatagtgggatgttgttatttaggaccagggtttgtgttcaaagtagtacagagcttagagacgatattcttgaagaggctcataccactccatactccttgcatcctggcaccaccaagatgtaccaagatcttaaaccctacttctggtggagcgggatgaagaagaatatggtagaatttgtatctcgatgcctaacttgtcaatagatcaaggctgaacaccagagatcggcaggtttattgcagcctttgacacttcttgagtggaagtggaaagatatcaccatggactttgtggttggattacctagaaccacgtttatttgattcaatttgggttgtggtagatcgattcacgaagtctgcacattttctaccagtaaaaacaaccttttcagtggatcagtattccgatttgtacgtcaaggagatagtgagattacatggtgttccaaagtctatacttttggataaagattcgaagtttacttctaaattctagctaagtctacagcgggctaggggtaccaaactaaattcagcacaactttccatccttaatttgatggacagtccgaaaggacaattcagatacagaaggatatgttacgagcctgtgtaatggatttcagaggctcctggagtaagtatctaccaatgatatagttctcatacaataacagttatcagagtacaatagggatggctccttgtgaaatgttatatgatagatagtgtagatctcccaatcactgagatgaaacatgagaaaagaaatacttaggtccagaatcagtgtagcggactaatgaagcaatggaaaagattaaggccagaatgcttgcctctcaatgtaagcaaaagagttatgcacattcgaaaagcagaaatatagagtttcaggtaagagatcatgtgttcctacgggtgtctccaatgaaggggatcaaacgtttcagtaaaagaggcaaattatgtcgtaggtttacaggaccttacgagattcttgagaaggttggacaagtggcatatcgtttagctttgcctccagctctttctgtagtacacaacatatttcatgtttccatgctacgaaagtacgtttcagactctgatcatgtactaagttatgaaaatcttgagctgcaatcaaacttgtcatatgaagaacagccagttcagatcctagatagaaaggataaggtccttcggaacaagaccatagctttggtccaggtactctagaaaaacagtaaggtggaggaagccatatgagggctcggtgttcagagttgttcaggttggatttcgaagacgaaatccttttaaggggggggggggataattgtaaatatcgcttaactttaatttggaaattagctgataaataaaatttaataatgaaacttgcatattagttaagaattatcagtttacagagaattatttgaattcaaaatgcattttatatgccatatatggaattttatattttttgcatgttttgtgtccggcaatattagaacgcggtgtttggctattagaaatttagaatcacatcttagtatttttagtatagcggggcgatatagttagacattgggaatgtcgagactagtcaagattttagaataaccagaatacccctaagtgattttatgacttttagtgtgggcaagggcattatggtcttttttccctaagttagttttgtcttctagtgggattttatttgtagtataatctaaatattatgttagataagtaaataaacattaggtttta

SEQ ID NO: 97126 - DNA, 827 bp, Cannabis sativa
ttcttttaataaattcaaaacagtgtattgacgggagaaaaattatagttttacaaatattaggtacttatgccgtgccgctaaaaaaatttattgggcttatgccactttatgctgcaatttactctataaatatatataggatttaggctttactaatttgtgcttttttctccttatttttcttggtctaaatcattatgctttgattgtttgagtataatatagtttagggtgtgtttggggagtgacttaattacttagtagtgtaattatattacactgtgtgtttagatatgaggggtagttatatatgaattgttgatattttttttttgtcaaaatagttaggaaaataatattttttagtagtgaatgtttaaagtggaaattttatagtaattacacaatgtaattatactcatgattctcattagggccatgataattggagaatgtccaatataccaaattgtgtaattatctccaatccaaatcgttatgctttgattcttttgagtataatattgtttagtgttgtgttcggaagtcactttgtaattctaagtcgtgtactgatgaaaataatattttttagtagttgctatttaaattggaaagtttatagcaattacacaaagaaattatactcacggggttcatgaggatcaggatctctcaattattttcaattatagtaattacattgttagagaaatgtatattaccttcaattacacccaaatccaaattccactagggttttccaaacacacccttagtactttttgtcaaatttgacaaaaaagcttaaatttttagcattt

SEQ ID NO: 97127 - DNA, 1296 bp, Cannabis sativa
caattcatttataccatttttttttcttctttttaaagccactctctttcttatttctctctcttcactcaaattttaaaggataatttctgatcacttctctactcagagcttaataaaaatatcattgtaatttaatttaatgtgaacattttaagatgtgaaaagtatatattttttgctattctttttttttaaaaaaaaaaaaatactatttggagactaatatagtgattagttagtgttttataatttttttaaattttagttaacattcattttagattttttatttgaattatattatattatatgataactaattaggcttcaaaataataaaatatataaataattggtatataaaaatagtatgttattatattacatgacaaatcattagtttcgaaataatttttaagggtaccttaatgtattttaaattataatctaccataatataactcaaaaataattaattaattactatgatgtatataaataagttttagagataatcaaaatctatctcaaattatatgatataaaaataattttttttttttataaaaaagtaataattagtttctcatcaatactattagtatatataagtaaaaagtaatttttaaaatacaggaaaataataaaaataaaattgaaaaatgtattaagtagtaatagtaatgttattattgtaaattagatatgaaaaatgtatattattgttatttaaattatgcggagagagatctatctctagtcgactgagagtcttgggcaaattaaaacaaaatctaattgccattttttttaaataaattgttgggagtgcttatataatgatcatatttctataaagtttgactatactttttttaattaaaattggctatacttaattttgaaactaaaacaagcataatagtttgtatgtaaattgtttgtgcagatataattactattatatatcttttctaatttccttcattttctcacctgaacaatcaattttttaactatttttttgggttgaaatttatagtgttcatatatatatataggaaaaatacatatgtaccatacactttacctcaactactaggaaaaatatatatagatcgggtgaccaaattatgaaaaaattaaatcaacattttgcatgtagatgtagtttggaggaggcctttattattcaaaagagttcctaacgacaactgatgttaagtttaagtgactatatttactttggggaaaaaaaaaataactataattaattccatttctactgacaca

SEQ ID NO: 97128 - DNA, 752 bp, Cannabis sativa
gtgatgttggaactaatagttgtaaaattctcaatctcacaatttgagatatgcaatttattgtgggtgtttgatgatttatagtgtgcttatggtataatataaccttaataacttttcatctacctattacctaagccaatacattacaatgttgaaagtccttttgattccgaacaagaattgttgacattagtggagagaggtaagtcatacaagcatattgatcattggattgtggaaagttaaaaagagtagaattgatatgatatttttcaaatattgaagttaatttgcatctttacattatttttcaaagtaagcatctgaattaattatagagttttgggattgaaattctggtttaatgattgaaatttcacaggttgtagcagcaatttgattgtctgaaggcttagttaattgtgtgttagtttgtgtttctttctttgtcttaatttttcttactcgagggcgagtaagaatttagtttgggggaatttgttaggctatttttagcctaagtttcgggtcactttttataattatttttcttctttattattatttttggaatagaattacacttgttttttttggtttcaggtttcgacacttagaatgtataaattggtcaaattttaaaaacggtgatctataaaatagagaaaaatttgtaagaatataatgctgaaacttcaagcctaaattcgattatgttttgttcttattttggaaaaagtcaaaacata

SEQ ID NO: 97129 - DNA, 581 bp, Cannabis sativa
agacctggacctagacccagacccctaacctggacccagactcgaaccgcgacttgaacccggaccccaaactcagacccagaccaaaccgcgacccaaacccgaactaagacctagacctggacttgaactagtacccagacccctgacccgaccctagatctaaacttgaaccaggacctggacttaaatgaggactcgaacctcggacctggacttgaactaggttccaaaccccaaacttggacttgaaccaggacccaggaccaacttaggtttggggtccgggttttgagtttacgacccgagttcgagtccgtggtctgggtttgggttcggggttcagggttcggagtttgagtctgggttcgggtccaggtacaggtcacggttcgagtccggtattggagtcgaatttattgtaaaaagtttataattttacacaacttattagtacaaatcaatattaaacatatcattgtattaaataatactaatacaatacaacataatacaatataatccaacacaatactatacactacaatatattacggtacaccaaatgagccctaaaaata

SEQ ID NO: 97130 - DNA, 743 bp, Cannabis sativa
acataaattttttgtgattaaatacaattactataagaaaaaaataatgtaggtacgattaaattagtgtcaacaaactcagttttagtgccaatatgtaggcatgtcaagtcgtgccctttttgtcgagcctgaaaacctcaataggtaccataaataccatcgtgtcaattgactgatcaaatggcacgacacttgtagtgcctagttggatcaaaaattctatcaaccatactagttacaacaaaaaattacttgtgactaaaatatagtatttaaatttaaatacaagttgttactaatttacttttagtcacaacaagtattgtgattaaaaacacatttagtcacaactaattgtaatttttgtgactaatacttttagtcgcaggctttttagtcacaacatagatatcgtatttataattagttacaactattttacttttagttacaagtattgttgtaactaaaagtaagatttttttgtagtaaaatatgacggtactaatatcgcgtgcttattaatttgatacttaactgttacatacctacataagttttggaaatgtaacttaactattattactgttaaaaaattaaatatgagtatttataccacaaaatactttactttattttatatatttttctatatttgtgaagttgggacataatatgtttaggaaaatcaaaatgtgcaaatgttgcgggagcccgaacagtcaaatcgttcgatgtaa

SEQ ID NO: 97131 - DNA, 1379 bp, Cannabis sativa
tttttttttaagatatacacattttatagatgaagtctcgattatactataacttatgtgctataattaagtgtacggcgaaggtatattgggcagcccaatcacgaaagtagatacattttaatgaaatataatatgaatatatttttaattaataaatataaaaaaatatttcttaacttatttattttttctttttaatatgagcctatttttttttagctcggcacattttattgtgcttttcaaaatataagttatactctgctataaaaataaaataaagattgtgcttaacatttttgtaatggtggtctcactattttgtgtcctactcaaactcgtacctcgatttacttgagttcgcctatttttatattctgtcttgaatttgtgcttttttttttttaaaaaaaaaaagtatatgtattttgtgacttcaattatttttatataattttttaccgttagtagagtttgagtatttacttttaaatcaaacactatatatataattatatagttttagttttacattttctagtaattttaattatataattgttattcgtaattttggataaaagacaaagggggccttcacaaaagcccagtatggaaatcagacctttcccttggcccaaaataataagttactcggcccatccatcgagaacaggcaaaattggatcaatagtctggttctcgcatcactcctcggtgataaatttggacaacaagtcctcgataataattttacgcttagcagatgaacaatgtgaactcaaggaggatacactcaggagtcatttagaaacgaaatataaaagggcatctgagatcacttagtgtcccgaaaattgcccattatgtggcactcttttgacacgatcccgaaaaatctgacaatcccctgtgtcaggccttggagaggcacacatcaaaaagaaaattacctttttgggcagacactctttagtttggcattcctttctcccaacgacagttgacgcttcacctgccactatcaacagtacgatcgtgtacggaaggcagcccatctaacttgggtctcacctgcccaacctaatagctcaaattatattgataaataactatattttaccccatcaatgtactttttatactcaaataaccctaataggtctatattagtccgacccattaaggatatatgcctataaatatggcattatccttccatgcaaagggttggaattcttagagtccaaaaccaaaaaatacattaatcttcatagccaagagcttaataatagtgacttgtgaactaagactcattaacacttcaaccacataaaaaaaacttgtcttaatttcttcttaatctttctttcttt

SEQ ID NO: 97132 - DNA, 884 bp, Cannabis sativa
gaccatcgtcaatcatggcttcgtcatgtctgaattcgagggcatagacgaggccgtgaggatcctacgggacttgtctcctaaaaggcgggcgatcaaggaggaggtcgagcgaagggaggctcttgctaaggcgaagctcgaggaggaggccaaacagagggaagcccaggcggaggggaggctccgagaggaggtccaatggaaggaggctgagctggaggcgaggcatcgggaggcgctgaaggcagaaagtgaggccatcgccagggccaggcatgagcttcgagaggctaaggaggccatggacgaaatggctgccaaggtgaggtccttataggagtttcaccaggcggacttgcagtctaaggctaacttggccgtggagatgaaggagctaaaggacttcagagaccaggccttgaagaaggctaaaagagatgagctcctgtcccctgtctcctgcaagcactgcgtcaagcgttttgacgacggtgtctacatggcctggtcgacaaatggccaaagtatcaagcttgacttctatcccaaacctgaggaggttattgctaaatttcgggagaagaagaagaaacttgatgccatgcttgaggcgcgtctggggcctcgccttcctcctcgtattgactaggctgattgagtccagcccattttaccaagcttatatctctttttttttcttttcttttttacagctatttttcttttatccaagacaatcttaaatatgtagttgttttattaaggggagacaattgcttatggcctgtccccgggacctttgtaatataattttttttgacctgcccttagggccaggattttttgacctgccctttgtaatattaattttctatttaatt

SEQ ID NO: 97133 - DNA, 500 bp, Cannabis sativa
  modified_base (31)..(36): a, c, t, g, unknown or other
  modified_base (173)..(174): a, c, t, g, unknown or other
tctctctctctctctcttatacacacccaannnnnnctctcttcctctctctcacacgcctctaaggctttacttatgtctcattagagatcttcctacttgatccatgccttgtaaccttatagagagtcatatcagaccccacctatagtgatatgaatagtattatctcnnggtgtcaatacaactaaaaggggagtaggtcattacacgctaactaagggggtcgaacctctataaaaatccttgtcttatttactttataatccttgttgtgtaacacgtgtcaaacatcaactttacacgcccctactatcagttgatcaatttttgaggttaatactttggtgcttttattgagagcgagttgatatcacatctgatcaaacgccatggttaacacgagaagaactccatttgcaccatctacaacttcgagtcttctcaagacccacagattgcagaacttgttgtccatgttccagccacaactggaattc

SEQ ID NO: 97134 - DNA, 544 bp, Cannabis sativa
  modified_base (497)..(498): a, c, t, g, unknown or other
aattgagtattgttattcacgtcagtggatggatgagaatcgatagtgggtggcttggtgggtattgttatccacgtcgacgacagtttaaatgtggtggacttgacagttggccctcgattttagggcttttgggtggttgtcgtgggttttgtgggtttcatagtactggaagtcggcatcaatgtgacaggaaatggggtttgtcttcagtgcgagctgggtaatgtgagatggagggttggtttttcgggatagtggagcattggagatgggagccaaaacgtttgggagggaaggtggtagttagataaagagagtgtgagagttagagagagtgttttttaaatgggaaaggtattcttgaggtttaatagtattgaaagtatattttgcttattttttttaagtggtatactaaaaggccatgtatactatttaagaagggataagttgaaaaatgcctcttttattcatcaattaatcaaatttacctnnaattttatatttatttgaaacatatctctttttatatgtattgtac

SEQ ID NO: 97135 - DNA, 636 bp, Cannabis sativa
  modified_base (391)..(396): a, c, t, g, unknown or other
ccggccgaacaccaccggagaacaagaaggtctgatgccttgcaaagaattcaatttttttgggtttttaaggtccggtccgatggtcccatcggaccccatcggacgggcatcgggcccatcggacgggcatcgggcccctgacttcaaaaacccaaaaaacacatcggaccccaaaaatttagcatcgggcccattggacgggcattgagcctaacttcaaaaacccaaaaaattcccatcggacagacattgggcccatcggacccgaccccttaaaagttcaaaaaaattgaaaaaaaaaagtttttgagaggggtatttttggggttttgtaaaagtggtcgtagaaaagtattagtttagggaaaaaatattaggtatatgtaannnnnnaaaatcaaatttcccttgtataataaagtacttggcctatttttctctctctttaaaagaaatggaaaaaaagaaagaaaagaaataaaaaaggttccttgtatagtgtcacgagccgcctatttggacacccataagtaggtggaacgtgcggcacttgctggcacaccgagctagcaagtcagcctaaacgcgcctgcaggcaaacaagttcaaaggttaggcacgatacatgtctcg

SEQ ID NO: 97136 - DNA, 723 bp, Cannabis sativa
  modified_base (455)..(459): a, c, t, g, unknown or other
ccacctgaaatgaaagatcaattataaagttacaacattacataatgtaataataagaataataatgataatattaacatgttaagtaagaagatcaaaattatgagttttattattattattattattattattattattatcttgtaaccttaaaatatttatattttgtattttagttctctttgacactttataaattggagcttatttttatttttagggtgtaatttttagtgtaaaaaaactatagtaaaatttatctccattttttcttatcttttctctttagaagttttatgagaatgattagcataatggcctaatcttcattggaaggttagggatgattctatatgcaaaataaggttattttgtatttttaatttactttttgttgtaatatttatttgagtaatgtaagttatatttcacttttatttttattttcttcnnnnntctatactactatatatgctattatatatactaaatatatatagacttagtcatgctctttctatatattttctatttagtgattatagtaatggtcagtggccgacccagaattttattggagggtgggagtaaatttttttcatatataaaaatatttcaaaaaaacaagtaaatataaaggaaaacacaattcaatatttcaattcccaactaaaaagatattaaatatcaagcactaaaaatcttctaatagaaaaaaaa

SEQ ID NO: 97137 - DNA, 852 bp, Cannabis sativa
atcccaaactgattccacaaaaactgaaggtttttcatcatctaactgagaagtcaactctttatcttttgatccatagtaactacgtacttcaactagaaatccattctcgaaataataccatagtttgttaaactaacttggttgactccaaaatctaaactagacttttaagcaacgctcgctcgctagattgataagagggaaatagttattaagttattataagagagagacaacaaatttatagtagttcactccttgtatcgagaaagtaatagagctatgtctactttgagtttttatttttcatgagatggtattacagaaaaaggttaagtgtcaaagctccaatttctaaagagagaagctctgaccttgtgggtagttttttgaatgtgaaaaatgagctaaggggctctccttttataggtgaaggaggcccacaaaaatagggaaaaatacaagttagttatttttgaccataaatgatgatctaatggtgaaattaacttttggagttgacagtcattttttggagcctgacaggactagccgcgagtaaccaggaacttatttttgtaactctcatgggggtaaaatttggggccgatagctttagaattgcaattgaagtgttatatatgacttgatagagcattgaaatagcttcaaagcgcaaggttaatcacgtcaatcagattaatattgattgagttatgtttattttactaaagtgtgttcatgacccaatgctcaagttgacatctgagtgcctatgttgacatatgacgccaacttggatgttgggtaagagaaaaaatgtcgagaggatgtactttatgattccta

SEQ ID NO: 97138 - DNA, 658 bp, Cannabis sativa
acacgattcaattcaatttgtaaattcaatttaatttgcaaaatacagatatttgtatttttataaattaaattatatttaaaaatttaatttaatattaattgatatgtaaaaataattaattcaatcaaatctacacatttaaaatatatataattaatattttaacgtaaaaaataataattttaaaatataatttaaataatactaatatattttaaaacataataaattaaatttatattctatttaaaaaatatatatgcattttatcaaatagtatggggtcgttgtctcatgcgatgaagtgagatagtaaatttgagcactggactaaaccgtatgtgaataagataatggttaatgtcgataaaatacttttcaagttagaagggaagttcagtgtgagagcagtagctcgtgatagttccaacacttttttagaaggcttttcaatgagtttcatgggcgggttgaggcttcttttttggaggttgttgaaatcaaagaggtcttaggttgaatcaaaaggaaagggtgacttgatgttcaacttgacacaaattgcttagtggttatttaagtcgtacatagtgtcattcacatgtcatatttgtttagtcgtgtggttcaagagtgtatgggtttgttagattct

SEQ ID NO: 97139 - DNA, 517 bp, Cannabis sativa
aatttaaatgcatgagaaaactacatattaattaaaaaatattttgacaactaatttgtcaaaaaaagactttacgatctctccttttgacactttagataattaaaatatttttaattaacaaacacttgcaaaataaagttagcaaacaagcatataagctctccctgagaagcgtaacattaaactaaaataaaaggctaactttgaccaaagttgaatagtatggcctaaaaatttaaaaaataaaattatagtttcaaacttaactaatcaaataagtaaccaaatgtgtatgagaaaaaaaatttatctgaaagtattttaattaataaaaaataactaattgatatattatttacataaaagtaacttttttaaaacttgcaaggtactgaaatttcaagaagcgattttttctattttcggtatttattttagatttcggtatttatgctgatgtggcacatcattttttgaaaatatttaaattaaacctattttaggtataatatta

SEQ ID NO: 97140 - DNA, 552 bp, Cannabis sativa
ccatgccacggcacctgggacaaaacccaggttccaccaacaggggcgggccgcgacatgattcagagcataccgtggcacatgggttccaaacccagaaaccagcaagcatgaacacgattttcagcaagaaattccaatcttttcaccccaatttctcaaccaaactttccagttaacaaataggattactagcaattaatagatgctcaaataatgcatttcatgcatcaaaatcccataacaaaaccaaaattcagattgcataaaacaacacaaatcttgcttaaacttaacaagatttgaagtaagatgaactcaaacccaacacaatcctattaaaatccagcagcataacaccactttaacataaaattccaacctagaaatatcataaaatctctgcccaaactcaacaataaagcatagaacaacaacaaactcaatttcaacaaaattaacaccaatccacttaacatgcaataaagtacattcaaaacttaaacgagttccaattctaaattcagttacaaattaaaaattgaagagtag

SEQ ID NO: 97141 - DNA, 2124 bp, Cannabis sativa
ataaaaactcaaatttttataatgatacctactcaaagggtaaaacctattaagagtaactcatatatatagctatatatatatattcaatgaactatgaaaatttgtgtttttatatatgcatgccaataaatttttttaataacagtaaagaaaaatacaactgtaacgatcactaaaatatttgaaacttgttaatacagaaataaatttatagtaataacaaaacagaaataatagtgcagaatataaaaacttcacacaaaagaattatacatggtatcagttttctttcaaacagtactagtcaatagtgtcacgccaagagaataaaatcaattagtaaagtatcaaagattacaaaagcaattgacttaaataaaattagactcctaataatttttcgcaactctttgtaatccatctcactaatataatctcagaaacacaccaagtagtaaatttccttcagctattgatgcgtgctcacttactcctgaaatgagtctttgacagatcttcttccgaagatatatactcacttccttctgaaataagacttagaaaagtctttccccaaaaacccaagcttgttcaaagtttctcttcaacttattctatgattaacaatagatcattacaaagaaaaccaaaatctaattgaacactctaggtttttacaaaagaaacactcttctcacataactgagatatgaaaatatgagactgaaagagatgaaaatgtttggctgctctctaggtcctatttataacatatagaaaccatagagatagccacgtacgtttttacacttgtacaaaattttcctaaaaaaatcctgatttgtagtgacaaaatttcactatgcattgcccaatcaggaaacttttcaaattagtttaagattacgatttagacttcaataccaacaatataaagattatacaatttgctatattcatatgaaaaccgaaaagtgcaactagcaaaaagagaaagtaaatttttcaaaaaaaaaaataactcatttaatcaaactttccattaaaagaattcttttgcttttatgaaaacttcctaaatgaaaatgacatccataaaaatgcaataaaacacaagaaaaaaaattatattattcttacaaaatattcacaatatattaaagaatattttgataattaaattacaaaaaaaaaagacctagaacactaaaaatgtgttaatatactaaaagatgtgttaaatggacaagttcatgattcattatacctgacatatttgttagttcatttagtaaaactgaataatttataatcgactacatatttaaaacttatatataagtagtatgtctctttgttacaaatatgtctctttgttagaaattatctccccatgttacattttttttttcatatttattctgtttttatgaacaatgagtgatgtatatgagaattaaaagatttacgagttgtttgatattatttttattctctgttttaatgttttcaaaagtgacaataaaaaataatttttgtcattttcaaaatgcaagacacgtttttgctaaaatgtttttagaccttcttactactaaaaaataaaataaacttcaatattccacatctcaacatgaacccaatctcatcccaacattggccccaggccccagccccgactcctgctccaaaccctagattctagactcgactctgacccgatcccaaacttggaccacacttggcctcgccctaaacttgggcccctaactctgtttatgtagttacttagctatagttcagttgtggtaatatttgtttatgtagtcactctattatagctaacatgtacgattatttttgtttatgttatagatatgtcaaactcaggttcagactcagaattagacccaacaatggagatccctagagtgatacctaagtgaggtcgaacagagatgaacaatataagtaagttgatggaccaagaaaaaaggaagcccatgatcactacaagaaaataaattttcagcgactagattttttgtgaccaaatcaacttagtcactaatagttagattttgcgactaatttttagtcgtagatatttttagtcatgag

SEQ ID NO: 97142 - DNA, 2026 bp, Cannabis sativa
  modified_base (317)..(329): a, c, t, g, unknown or other
tgagttgggaggcctccgtgagcctgccggctcttttccagcacggtgagtagtctcttcaagttgattattatcgttttccccattgtcagccatggagaaaagtttttccttttggttaggagggattttttctaagctattttaacataggctctcaatgaaagcaccaaattgttaacgcagattttcattaacaataatgagcctaattttgtgataggtttagaacaaaaaattatagaaaataaaagaagcaaaaataacaccaagttttttacgtggttttgcagttaattctgcatagtccacgagtnnnnnnnnnnnnnacttttctgatacaaaactagggttcttatttttctctcaaggaatttccgtcccctttttctgtactttctacccctatttataatgacatagggtggcagttaattacattcagatacgaatcccacaacaatatttccttgaaattgtggaccttaattacgcaccacgtaaataaatgcggttattatttaaaaattatacatctgtgatttaaactgcttttaatgagtcaacgctgatgtggattaaaacatgctacaaagtgtatctcaccagggcatcttgctaggtacttgaacactcaatagcaacattaaccctggcagcgagttggggctcttcctatgtctttttgaggttgataatgtgaatcccatcgtttctgcgcatgaagacatgacgctccatctgacaatcgcagttcttggtgataaggtgaacttcagaaaccaacatcatttgaatgtcggcttctttctaagagagttgacgaaacggagcagtgaaattcattgaaagatgtctggagctgattagcaaaggtaccaagagtatgccttcccatggcgagatggatgtctcactattcgctattcatgtccttcaagatgtaacacttagttagtataatgtatattgtacgctaagtgttctaacagccaacacttctcttcatcacttctctacgtatcgcgaggtagatgcctcgctacgtaatatcgatgtcctcctcacgattgtgtctttttacgtgaaatggcttttcttcaatacgcaaatcaatagtttgtacatctttgtctcacttaagactatacagtcagcgagttatagatatgctctattaactccgcatttaatgagttattccatttaatatactttaatataatttccattatatttgttgattcgtattccccaaggttgacacgtgttatcttctgaagtaccagccaaatttcgggtacaacaattatttctaagtttattaatattttaatatcaaaataaaatcatttcaaattttaataataaaataagtaatatctaatcttataatttaaataaaaaaacaaacaaaaataatcaaaatttaaaaattaaccataaggctagtttgtgggaaaatcaaatttttaaattcaaaggctactaatatctaaaagtaattttaattaattaaaaatattaataaaaattaatttcgttctgatacttagatttttatttgaaaacttgaattctacacaaaattctaccaaaatttgaattttgtttcactgaaaaatgatttttgaatcaaaagatatcacaaaaacaaggcgcacatgagggtggaagtgggcgaggaaagggctgctagcagcctgcttgtgggctaatctcggtcaggaggggaaaaatttcggacatggccctgtctgaaggcctcatgtcccagcaagccttcccattcgcacgcccgtgtgcatccctttgagatacttttattcagactcaaaaaatcataaccaattcataaaaaatccaaattaagttctgtaaaagcctaaatttattaatttttttcatctactttccaggaaaaatacttttagaacgaaacaaaaaatatttatcatcgtaaattgcaaaaccgacatgaacacatccaaaccaacacaaatatcattttaaatccatatttcat

SEQ ID NO: 97143 - DNA, 855 bp, Cannabis sativa
agtgtgaaagaattgcttgaggtagtttgtcaatgaaacgctgcattttctgtttgcatgtggattatagttaaatgattctattcaactggctcttaattcttcacaggtgctccagagaatctgttctttttttggtcgaaacaagactaaaacctttttttttttaataataacaataaaaaggactattgactaggtgtgtgttgcatgagagtgactaaaaaatggttaatccgatggctagaaaggtgaagatatatcagtggcaagtgatatcaaatgtaaaggatgaggtttagtatcaaatttgtgtgagagtagttgaaccacaaacaatgcaactttctgatttttgccttgtttctgggaagttgataagtcattttatgcttattagaacaggacaaaacactaaatatttaataaaaattattcctaccaaaacaataaaccatgctgtacatatcacaatagaattaaactttgttcttatttattcttttttgtttctttactagtttccagatggacatgtcaagaccaaatctttaattcattttgacttggttaatttacaacaggttatccatttccatttcatatcatcaaatgaagttattctagaagatttgagtcttcctggtctagctgaacttaaaggtcattggcatggttctcttgaagcaagtggaggtggaaatggagatacaatggtaagtgcatgtgttctttagggcctcacccaattttgatgtttatatgtccaaactgatcaatctaaaaacggggatgtaagattcttttagaggattggagattcataaattgttgtgttatgaggttctggtgtgc

SEQ ID NO: 97144 - DNA, 694 bp, Cannabis sativa
  modified_base (432)..(443): a, c, t, g, unknown or other
gtaatttttactaataatttttccatatcattgaaaatagcccaaatttttatgtagtatactccttgaaggaatggtctggtaaattttcttatctgttttgttatttaaaaaaaataatttaatttttttttttataattatgtacattataattatttaagatcacgtgtaaatttttaaaaaattttaaataatatatactgtcaaaaataagattcaaatatttagttatcatgcatataaaaaaataaactattttattacctctaatcaaatctcactttagaattttggatttcgatcgggtaaataatattttagactctgtgttttgcaaaagttaccaattagaccctttgttttgttaaatgataaaatagaccttatattttgaaaaatggtataaataggaccctgaactgatttttnnnnnnnnnnnnatttaataataattcgatctaaatatcttataacaaaactgtttacattttctgtatctgtttgtgttaggaattgtcttcaagttggctatattaaaaaaaaagtgtcgaaaattaagctcacggtcctatttttactattttagaaaatacaagtctattttatcatttaacaaaataaaaagtcaaatctataatttttgcaaaatacagaatttaaaatatttaccctttggatccctctcctttat

SEQ ID NO: 97145 - DNA, 1106 bp, Cannabis sativa
  modified_base (58)..(64): a, c, t, g, unknown or other
atatgacaacttttataatatccctaaaatacctccccatttacatcaccccctctcnnnnnnnacccccctcatcggaccccacatcggacacaatcaaacccatcgaaccccccatcggacctacgtctcctacctcgcaaacttacagattcattaaaccccatcggacctacatcggactttgtccagatctgagattattaaatttaaatctatccctaaatctaacaaaatctatctttaacactaatatcacaaacaaaatcaataaaaaactaaaaaacagaacacgaactcatctttaacattgtgtccgatttggttgggggtgtgccgtgggtgcgctgtgggttagtgggggagcaccgtgggtcagtcagggtgcgcgcgtgggtcggtgggggtctacggggtggttcgtcgtgagttgggatgttgaaagggcctcttcaatgaatcgagcgagagagagaactgaagtttgaaaaataagaagtatttttagatttaatgtaaagtgaacctatttttaaaattttaaaatatataaatttaaagaattaatttctcaagtttatatgcaaaaataattaaattttcctatcaaatgaatgatttgttactaccctatgctatccgaacaaaatagtctcactttgtatatttcctataaagatattattaataagataaaagacatatatttttttttttgattgaagtaagataaaagatattaaattgtacgatacaattttttgtcttattatcttaataagttataataggtgttgggttgggcgcatttattgtctcgttataatattgttaggaagggatagggatcttgatcacttcggcgctcggatcaaaacatggcggacatcaaggtcgtcggagtagtgggcagcggccaaatgggctctggaatcgctcaactcgccgccgttgatggcctacgcgtctggctcttcgatacagatccaattgctctctccagggcgactaactccatctctaactccgttcaccgtttaatagccaagggtcacctaactcaggcaagcaactccgtccttctctctgctttctgtttattcccc

SEQ ID NO: 97146 - DNA, 687 bp, Cannabis sativa
ctacgcaaatcactttaacaagactaaaataaatttataccatttgattgtttgtagtcttgatgtagatgagcttcctaacttgatttccagttttgatccaaagttgacttttcccgagagttgacttttgacttttaacttttgaagtcctcttttggatagggtcttgaattcttgatctttggataaaacttttaatcttatgaagtatgaagtagttgatatacttgttgaatccacttctttgtttatgtttgactttaccgagcaaatattgatactttgtgaatttgcttgcaaaatggtcaagaaaagattagtaacaaataataatcaaatatttgttcatcatcaaaataagtgagagattgacttttggtcaacaataccatccgcactcaatgcaaatttttttcgttttttcattttttcatggaattaatttcaaattttttgtgtaattttgtatctagatttttatttttcaaattttaaatctaatcattagaataaaattaattaatttaattttaattaattttagacattagtagtttttgaacttgaaaatagataaaatttgatattttgcttaatggttaacttattttttaaattttgattattttatcttatttttaaatttaaggttaaatattatatattttacattatttaattaat

SEQ ID NO: 97147 - DNA, 1371 bp, Cannabis sativa
tacttgcgagtagatctaagatcctggtaaaataatttccaacaaatatttatacatttatattcataaatcactcattatatacatatatatatgtacatttacacacaataataatgtacaaattcacatttatatcttagaaaaaaataacagctcaatcctaaaataaagtaataaaaatcaaaatacataatctaaaataccaagcaataatactttattttaaagtcaaaatacaaaatatttcagttcaaatatataaagttgtattgcgttcgaaaatttcaactcattaattgatacacatatttcttaaatccctaaaattatttataaaaaatctctaaaaaaatatggttctcttctgaacaaatattatacaataccaacttacaaaaattaatttctatagacattaaaaataatattaccatatattatcacccaaaaaaatcataatcattccacaaacataataacattacaatttattattacaggagagaaatatattttcggattagaaaaaaacttctagaataaatgttacataaaactttgaccaaacaaattgatatcaaaccttataagaaaaatatttaaggaaattacttcatttaactttaatataaatagaaaaaaaaattcaagctcaccacagagttgaacggcagcaaatacgagctttgaattctccaaccttgcccatcgtatcctatgccctccgctgctaactgaaaaacctaaaacatagagtgatgagtgagagagattgtgggagacaaatattaaagaaaaatatctaaaaatgaagaaacttatcgatatgctatggagaaactggtgcgctggtagaggggctgagaagaagtagtcgtcgatagtaatggctaagagagattagagagaaggcagagaaaaaaatgggttgaagagagttttttgtttcttgaaaatggtaaacggtagagagagatcttgtggatctagtttttttaaaaggggtaaatactttagcttgacatggtcgtgcccaatgttgtgccctgttgtgtcaatcacgccatgtcagcataggggatgtcctgcccatgcggaaatgcgagaaagttctcgcctaaacgaacggtcttctttcgaaaatttttgggcacgacaatactgtgcccaattctattttgttggcttagttgtctccgaaattaaaaagaaggtgagcacaaaattattagtgtcagccccatttatggcatgctatgggaaccacgtggtgtcgtgccccgcttggaccggcagggccgaccctaggcataggcgggctaggtccgtgcctagggcccactatttctgagggcccaaaataaaaaa

SEQ ID NO: 97148 - DNA, 743 bp, Cannabis sativa
cctggatatgtccttccatgaacatatcttggttccgcagtcgtaaacccttctgccttcagtaatttgtccccggaagacatgtctagtaccacaagaccggagagataaaaccgtgcattcccagaaggccctttcgattttcctttatattccaacacacaaataagaaaactacagttgttagatcacaacagagtatcgtattaagattgaagggaaaacttcctataacaaatattagtaactaggagtaaccaaacttttgataactaggagtacccaagcttgtggtacttgctttgatccacatgggacaaccataaaaaggaatgactataaactagaaccgttattatgttccctacttgtcggtatttccataaatagtatattaattaaacttgttattagggacaattcttatagatttttttaaaaaaaaaaaattgtaattgttgtatacaataaaataagacatgtgataagacatcaataatatttcttatacattgaatccaaaaatatgaaatttgcacttagtgcgaaatggattggatgaacacctgaattatgaagtggaggtaaattcttaaaaaaaatgaaataaaataaaatagaaaaaaaattaagtgatataaaatcatcaaatgaaggttacaatgattgaactcatatgagttaggacaacttaccatatgtgctagaataacttattatataatttgaatcttattgattta

SEQ ID NO: 97149 - DNA, 665 bp, Cannabis sativa
aacccaaacactccatcatagcactaaggaagccccatttgacctggttaaatgccttagacatatctaatttgagagccattttcttcccattacggaattactcttttttcagacagtggagactttcaaaactcgaaatggcattttcttggatgagacaacctttgataaaagcactttggttatcagaaataactttagacatactctgcttaattcgattagccagacacttcgcaataactttataacttacattgcagaggctgatagggtgaaactcggtgaccgtagttggtcgatccaccttaggtataagacaaaggagggtttgatttagcttaccacaatccatatcattatttaaaacagacaagcaaacctgaactaaattgtcaccaactatatcccaatggtcaagatagaacaaacccaaaaaaaccatccaccccgggggctttaagggggtttatttgagaaagagcattctaaatagcagtcaccgtaaatggttccagcaaacgatcattatctggaagtttagacgacacgaaacaaatcaatgaagttgctgaaaagaagtatcagaataatgttaggaggaaaagaactgctgaaaatgagtggtaaggatctcagccactttatccgaagactcatgc

SEQ ID NO: 97150 - DNA, 809 bp, Cannabis sativa
  modified_base (125)..(135): a, c, t, g, unknown or other
acggaattctacatagaaactcttattgtaactagcggagcaacctaaattgcaacaaaaaatcgtatagctacccacatagaaactaccaaaaacccacattagaaatccaaaccgtaaatttnnnnnnnnnnnaaattaaaaaaatagtatatggggtaattccccaattataatttaattaaaaatttaaaattgaaaaaaaaaaaactaaaataattattttaaaatcataaaatttatttctttcttttctttttttttttctttattttttcttcttcgtcctcttcatgccaccaacgtcccaaatacaaccagagctccctatcccagtcataactccacgccctttccctttactccttctttgccttcgacgtccactgcaataacgacatcaatgtccccaaaatcaaaccttccacctttacaaacaactgaagtcctatttgttttttcccaatcggagtctaattcgtaaatagtggcataagtacacaaagttttaagtttgtaaactgcataaactcaatgtttatatttagctgcataagtacctaatgtttgtaaaaatgtaatttttatctaatttcatgagtatagactctgttactatcttaaacaggagacatattagactcaatttctagatcatttggtacagaaatatatagtatgaattatttctaaatattcttttaataaattcaaaatggaatctgtactgataaaattggaaggaaattatagttttataaatattaggtacaaataagagtttcaatacatacttattagtttttttt

SEQ ID NO: 97151 - DNA, 824 bp, Cannabis sativa
tttttttttttttttgagaggaaggatgccctagtacgaaagtaacgctagaaattgagagaaccgaatgtcaaatattgaagtactaattaactatttatatataaacatttatttgatagagttacatggaggaacacgtggcataaatccagagcagtatacgtgttgctcagcagattcgccagttcactgatgccatgcaagctatgggagttcaattaataatttacaaggcaactaattcgcgtcttttataatggttataatgttttaggttactaaatttttgtattaataagtggaataatatatgattaatttatggtataaataattaaatttaatttttagttgtagataaatatttaaatttaatttttatttaagttatttaagtgtaactgtgtaagtcaaatataggtataatttacaattgttgttaaatttaggtatttatttataattgaaaattaaatttgttgaccttgaatttgggtcaactggcagtagagctttatttattatcaatattcatcacttgtaatagcaaataataaagtgacagcgatttatagaggttcggtccccttgtttagtaggtaatgacttactcccctttttattgtattatttttgaaaataataccatgcatattacaagcttaaatcttgtaatttctagctatgactctcttgaatattacagtggtgagaacaaattcaaaacaattgagagaaatagactaagtgccccactagagaggaatggcgtgtaagaccaagaatggagatcgaagatacttataactaaaagctcatta

SEQ ID NO: 97152 - DNA, 663 bp, Cannabis sativa
ataatcaagagataaatttaagggttgtttgttaatacttttatttttgtaattttttaatcacaaaaatagaagtaaatttgtatgtttaaaattttgttttacaaaaaataaaaatgtgttctttaaacatttttattttttaacttaaaaaacataaacaaaagtgttttataatttttatttttattttataattttatttaagtaggaatccaagtcccaaggtttatgttggggtcaggtctaaaatattaattaagaaaaagtatgttatttaaaaaaattcaaaagtaatttttttgtttgttttaaaaatttttaaaatttttatttccaattaaaaaattaaaaagtaaaaataattttataaaatttagttgtggaaaatatttttacttttttaattaaaatagataagaataatattaagtgacaccgtattattaccacaggagaagagaagaggaagagatagacaaacattttaatatcccattcaacccattatgatttaataaatactataataaactgcttagcactgattattacatggtgttaatcaccataaagactcagattataaaaacagattttttatatataaatcaaataagaataatcttacttctttcgtatttttcttttttaaaaaatata

SEQ ID NO: 97153 - DNA, 958 bp, Cannabis sativa
agttggagagaatttaataatcataatgctaatggcacagttcgcagtgataggttatccaaccttatacgacctaaaggcggtaacatccatctaacacttttgcctaaagttcttaacaaggcatgggataggatgtttaaggggagaccaatagtcttcctgtcactattacaacttggccttatataaagccaagaaagagaagatgctcatcaaaaactctaataaagagcccaacagagggcaatgaagtccagcccaaagcggggaggtagtataaatccttgctttggggatcctgtagacaactttgggcttataaaagaactagaagaagtggaggttgatcccactttttcaacttgaagactaaagatttggaagggtctagcaccaaaaataaattcaatacagataaaatttctaaggacaaacttggacctcttcgcatggtcacatggagacatggccagaatagacccctttgtgatgacacatgctctcaacattgattcaaacttcctacatgtacaacaaaaaaggaggttgctagacaaagagcgtgcctaagcgctcagagatgaagtcgaaaaggcagttggcccacgactttaatacaaaagcattctatcaactttgggtatccaaccccatgctggtgcctaaaccaaacaaaaagtggagggtttgcatagacttcaccaacttgaaaatagcatggccaaaggactattttctacttccaaggatcgaccaactggtggatgcacaattggccatgagatcctaagcttcatggatgtttactcaggttacaaccaaatcaagatgcacccaccagatcaagagcacacaagtttcatgacacacctaggcctatgctgctacaaagtcttggccttcgggctgaaaaatacgggggccacctattaaaggcttataaaaaattttcaaa

SEQ ID NO: 97154 - DNA, 839 bp, Cannabis sativa
gtatggtacttgtattagaaacttcttggctgtgcaacacaaatggatcaaagcctcttgggttcagcaatgtaactagctatcaaaattctaatgcaattactgaacccaaaaaggaattttccatgcttgaaacctcacaaagtaattttgcacttagttcgcctaacccatgtcttgttgatactgtctttacatcaaatgagatggttgttgaagaagtgaatgttgaaggtgatgcacatggaactaaggttgttgtgcatgatagtacaaaagatctagcagttcctgcaatgggactccagaattctagaaattcttccttgagagtttcaaagttgttgagctcataccctcttgataatgatttggtaccaggtagcaatttgaaacctgcaagcgcctcaatttgtcccttcttatgccaaagtaaatattaattatttagagaataattgtgttgaagactatttttcatcattattgggagatgatcatacaaattataattcatcatacaatgcgcaacaacttgaggattcttttgaagatgaatcaaagctccctagatcaagcaataaagttggatcgaagtctcctgaattgtccaacacatctagattaaagaattctagattgcgtaacgcagctggatcacagcctcctggattcagcaatgcaactggctatcaacattccaattcaatacatgaacgcgaaaaagaatcttccattcttaaaaccatacagagtagttctacactcaattcactgcaaatggttagaccatgtctggctgaaagagtctttacaccaaaggagatggatgttgcata

SEQ ID NO: 97155 - DNA, 1186 bp, Cannabis sativa
tcatcaaaactagagaggttccgtaatgtagaattaatggctgaagaaacacgtaaggcatctgtttccacatgtgtgatttgaagctgcaattgtttagcccaattcagactatggaataaactttggcctccaattcatcagaccgaaaacatccctgaacaagttttgaaaaagcagctacaacattaccattgccatccctaataatagcaccaacccccaaaattttgtgttcctggtttacagccgcgtcaacattcattttaagacccaaaccagcaggtggagaccatgaaacctgagtgcaactgtgttgggcagcaggtcgattttggacagagctggcagtagtggtgcagacagtgtactgctgctggtttttcctaccagaccggtggtatttgtccagatataagctagcaaaatcagcaatgtcacggcttgatttcgaagcacttccatgaaccaccttattcctctcatgccatatagcccacatagtgcatacaattaattctaagtccggtttagagtgaagtgtggacaagtgaattaaataatcacccttatacatagttgcagcatgtgaatgatcaattgtgaatttagtttctctccaaacttgcttagctttgatgcaattaaacatggcatgaccaaccgattcccatgcattatgacataaagaacaagttgcggagtctataactttccttctgcataaaccagtagccactggtagtgcatcttgcattaccctccaagcaaaaaattttaccttagaaggtaagcttaaactccaaaacattttccaccaatgcgtatgattattagagccactcgtctcccttgcttcagccaagttttcggccaaatgaaagccaggattaaccgtgtagcagcccgttgttgtgtgatgccaaatgaggcgatcatttgaaggaaagaaactaagtggaatcgtcacaattctatcaacatcaatgggctggaaataggcatttaagagtggaatgttccactctctctgttcagtgataaaatgtgccacttgtagagttggagggcctgtgtagctgattgctttgaaatcattatgaccaggaatccatttatcaaaaccagctaaaacatgatagccattaccaatcttgtgtcttaaaccttcaaccaataattcacg

SEQ ID NO: 97156 - DNA, 1232 bp, Cannabis sativa
taagattataagattaattaatttgtgatttctttctatacacataataataatctcataataatattttttctttgatttagtatacacgtagcttttgctagtatatatatatataatatcacatatttgcctcacgagtataacgcattggctttgaattcttccccaaatccatggctaagaaaaaaattaacttcaaaattgatcgatggagaagtgtttttttcctttcgagaattaagtaatttaattaaagttttcaatggatttcttaactgcaattccttatcttctttttatagctttgattgaaacataatcacagtagcatataatttaaattttaaaaagtggttattaataatttatcttctttttatcttttgtgatcactgttaatttaaaataattaattaactttagtcaatgatataataaaatattattataattgtttatatgttataaaagataattatccaacaaaaaaaatataagaattaaatatataaaaataataaaaaaattacaaaaataccgttatataaaattttaaacaatttttttttatgattatatttatagaaaatatggtattttgatgaatttttatactgtattattgttaatttgttaattattatttgtatgttattttttgttttgatattctttgaatgttatttttatataattttcttgatgtttttgtattatttttataaagtaatataaaaaaacccttaaacataaaatataatattttttttaaaattatattttaaatactttgtaacattcttttaatattcttttccatacacttcgagaacgttacatttaactattttaattgaaatagcctaaattagttataaattaataaaaaaatatttatcaactattttcatttttgttttaactgttagagcgaatttaggttatttttattattttgtacatgagaatagaattgaggtgtgtacgtttttggataattaataataatataaatagataatttgtgagtttgttgattataatgtaatttaatttgaatttgaatttgaatgggatgaaagagtcatgtcctccacccattttatgtgcctttgttttgttttaagattgacccatttttgattttatccccatttcccatacactacaacactacccacacctattactgtatatatctatatcatattaatatttttaaatttacg

SEQ ID NO: 97157 - DNA, 806 bp, Cannabis sativa
tttttcattaaagaagtcttttattgtctttattttaaatagttttaaacggactagctagtgtgacgtctcgggaaatcggggcgttacatgaacatcctcattggcagctgtcttggtccagagcgcaaatttgtcctgcctctggcgcacgcttgtgaccacaccacaaatctcatcagcctcatcaaatttctctctaatcaaagccatcaactacataatcaatcaatcaaatttaacaaccctaagttacaaacttgcgccaagtaaccttttcataacaaaaaagagatgcacaagtacaatatctacacaaataaaagataaggagaggttaagatgattacagtttctaaccacatagtgtcaagggaagattttctactgctgataacagtccactttcctccattagcacattcaggatcttcccacttgggttcaaccctagctttgaacaaataaaaatctacatgtgatgtcaacttgctgggcttgaataactgcacagtccattgacaattcgacattaaagcagattcaacttttacagtttaaatacactttccttatgaaaaagacctttcattttttagttgaattgaacataaccatgtctaaagaaagcaattatgatcacaattccaaactaatcaaactataatagatcccaaaggcattgaaaactagaagactaacagagcttattagaagatagataaagttgtaataatacataaatagattaaactggccattgcaaggcacaaaggtaaaattatataaatgtatatatatttata

SEQ ID NO: 97158 - DNA, 598 bp, Cannabis sativa
tatatatatataaaaattataaaattgtaaagctgaaaaaaaaaaaccaagaccttatggcgtcagttttttcataacagcctacgccatagggtccctttggagtcaattttttcataacaaccgatgtcatagggtccttataccgttggttgttatttaccctacagtgtcacctagaacaacgtctgtagcgaattttgtcaaaaccgatgctaaaaattcttaaaaactgcctctaaagcccaattttgtagtagtgaatgttaatgcttcatctcgccgaaattaatagttgttttctggcattgtgctgtggtggttctgtccgtgggtgtggaagatagatgcctcattttttatttttggagtttacagtataaaagaaaaaaaaatatggtgaaggcagtagaaaataatttttgccgtgtagcaatataaatgtaaacagttactaaaaatctaatatttttgtaaaatctcctaaaaataaagataatttagaaagcctatacattccggttctaagtaggagacatacatgtcaatcatcaaattacgtagttaggcccatttcacttggtccctccctcataaa

SEQ ID NO: 97159 - DNA, 733 bp, Cannabis sativa
aaaaaaaaaaaaaaaactctcaaatttttgaaaatagaatggaaaaaaaaaaaactaaaatgccatctcaccttttttaaacattcttttatatttatatattgattatcaaacatattatatattattctcttattaatatataatatatatcataattttaatctctatatcatattatttaatttataaataatataatatatgagatctgaaaataaattacaccactactaatattacatttaaataatgttgagttacaacttaggtgctttctagtattttcctagaaattataccaaactggctagtaaaaagttgaatggtgcaaaagataggatcaagaccatgtgtgagtatcaagctttctcttgtgtctattatttaatattacttaaaactaaaccacattttcctttcaaactttaaatcacatgtctaatttcatttcaaatatagattagaagctctaaatattcattttctgcctacctacttggaagagatgaaaagctattttacatatatataattaatttttttttaaaagtaatgaacaaatttattgaaaatataataacattatatagtttaactaaaaatattatacaactcatgttcattaaataaatacttaacatgccatactataattaattttttttaaataaagaaaccataagatcatatgatatattactttgccaaaaaaaaaaaaaaaccataagat

SEQ ID NO: 97160 - DNA, 560 bp, Cannabis sativa
  modified_base (116)..(133): a, c, t, g, unknown or other
  modified_base (508)..(508): a, c, t, g, unknown or other
tttgaatagttggaaattcctttacataaataaaatctatatctagaagttgagaagcttctattaatttccattagaaaaatgcaccagcaactaaagtaagttgcttgcactannnnnnnnnnnnnnnnnngtataccacaagccatagatttaggtaaactcgaacctataatacaaggaacaggaagttttgttaagtccattgaatagacttatttttcaaaatttcctttcttgtcctataagagaaaactttttgttactctatatgaatggttttaaccataattctcttggcttttaatcacaagtgtctcccaagccataacaggatgtgtaagttccttgaaaccctcccactacaataaggtactgtgactttctatttaagaacgtaagttgtattattctcatcggttgtgtcaatacaacataggtagcaggaccatcttatatggaataagataatagaacgcattggaataataaaaaaaaatatctcctntactttgctactttattttcagacttagtcattttcttagaaaagtaatatt

SEQ ID NO: 97161 - DNA, 719 bp, Cannabis sativa
tatatatatatatatatgagtttctcttttaaaaaagtagttccaatattactaaaaacgaaccctaaaaatatctcagtttaaaaatggattaaaatttgaaaactgacagaaatcacatcattgttgcggcgacaagttcaatacaactcagaattagatgattcaagatgttctgaaaagctgagaacaggatctacaactttcatgttgagctctaagtccagttcggcctttgaagtcgtctaaatttatagttaagttctatcttataaaaccgagtttgtcaacttccactattttctaccaaaatgtgctaacatccctccaaataactctaaatacatgattagttattaaaataacctaaaaaattataatcacactaattaataatttaaagaatcaatataagaaagaatattaacatataaattgtctatatttataagataaaatatcgacttatcagtcccaaatattttttgttggggggggaggtggtagtcgagtatcagttagtactccgagtgagacaaaatatgtctccaccacctgcacttattgtacaaccacttcttcttcagatgcatgcatacgtaattttacatatattttattgtttgtctctttcgcattcctcctttttatggctcatgctcaagatgcgatgataacacttataaaatttatctaagtgtttagcccaagcgggcctt

SEQ ID NO: 97162 - DNA, 515 bp, Cannabis sativa
gtcacccctaaaaacctttataatcatccctaaaatgtcttagggatgacaagttgcctccagcatgtcgctcataatacttcatcccttattctcctttttagaggtgaccaaataaattgcccttaaaagtgattattaggggaaactatttttcgcccctgaaagtgttaaaatcacccatattttatgcaaattaggaacaaaaaaattgtgcataaaagtgtaatgtcacccctattcatatgcaagcatgataatatagcattagtcgaccctatattatttaacatcaataattaaatttaatatattttttccttggcattaaaatcgcaaatactccatttgtaaacagttttgaatttcaattacaaacaaaaagttgtttattaaataaattagtgttattcatttttaaactttctagtttctggataccatatgtataaagcagtgtacatagtatggtaatccaacaaaaagagatgataatgacctacattattcttcta

SEQ ID NO: 97163 - DNA, 516 bp, Cannabis sativa
ttaattgatgcttactattagaatgaaaaagaatgccacaaaaagatgtcataccataacatactttatattttctctttcttattttttttttattattttatcctaaagtaaaaaaaaattgtttatttaatatatattcaaaaataatataatattgttttaataatttttagagatgtttatcattgaatcattttacaacaaaaagtgccaaaatgatgtggaagagagatagaataaaataatatatttttaagtgatatagaaatttttgatactcttaaagaatgctactattgaagatgctcttagtagtaatagaactaatgaaaatctttttggtatttaatttgccgaaaaataagatatgatgtttaagtgtatgaaatcgaaaatatggtatttatgctgcaaataacccactactatataaatataagagtaatttgcattaggaagctatgtaaggggttattgacggcgaaaccccttatattttgattttatacactt

SEQ ID NO: 97164 - DNA, 678 bp, Cannabis sativa
aggtttgagctttcaaactcaaacgtggtcctataatggtggatttgtgcttaggggcttatggttgctgtttagtgttggattatgtttcttagacccaaaatactggttttcggagccttgtagaagatttgggatagttttggggttaaaatgggatttttggaaaatttgtagtagaaaacgatagactattttttcataaacgatctttcgttttctctggcagtgtcccagaaaaatagctaaccagttttaggaaaacggcctaccattttttaggatttttcccaaagccttgtttttggtgttttctcgatatttagggtattactgcgctatttatcgatagagaaacttttagttttgagtataagtcccagaaaagtaatttagcgggtcacttaccaaattatgtaaattgtgatttagggccttaaatcgtcaagtagcaatttccactcaggttgaccggaacacttgaattcaaaactgagttaagattagtataatgatatgcatgcttacatgtttagcgtacatgttttttgattgcctagtagataacatatcagtaagaggagtattaatgtacatagagttgcactgaataccaatgggtatatgtttgggaaagtacgaattgacgatattacatcagtacgattagagtaccga

SEQ ID NO: 97165 - DNA, 796 bp, Cannabis sativa
tagttacttcttcaatttttttttacagattttttactttagagcagttgttgagactgctcttgaatattaagtttgactaaaatgagacatgtaaacattatattgacaataaaataatttaaattcaataatgaatacataagttagttaaaatatatatcgatatatactctaaaaaatttaatattgaaataatggaaattagtaaaaatatatatatttatactctatatatttatactctatatttatactatttatatatgctctattaattaatggaaattctatttttaatatataatgaaattatcttaatgtatactcgatctattccatttttttaatcctaatcttattatcttgatatatactctattaatttgttcaaaagaaaaatatatactctattaatggaaatttcatttttcttcaaaaaaaaaatcttaatatcaaaaacatcagattttttttttatcttaaacatagaaatggaatgaattagaaatcatgtttggagtaacttttctttatattacattaagaattatttaaatatttttagaaaatatgattttttttttatttgttttttccatttttatagattttgaaattatttaatattttaaaatatattttaattagttttcataataatcaataaatttaaaattcgggcttttgaatataatgtatccaataatttagtccagatttattagaagtttagaacgcaatacattataaattatcctaattatttgcaaaagaacaaaacactaattaatag

SEQ ID NO: 97166 - DNA, 646 bp, Cannabis sativa
  modified_base (221)..(223): a, c, t, g, unknown or other
  modified_base (276)..(276): a, c, t, g, unknown or other
ctgatgaaactagtttcagttaactttattatttaacatttattattttttatgattttttatagcgtcaaaactagtttcataggttttaactattttctaatggggttgctccatttttatgatgttattgtatattttttagtttgtataaaatcagttttattatagtatgatatttgaatattaatttgaggaattaccccatatactatttgttnnnactttttttttcaaatttacggtctagatttataaagtggttgcagcgctagntgcaataggagtttctatacgattttttgttgcaatttaggttacatcgctagttgcaatatgagtttctatgtagaatttcgtaaaaatgcaaagaaaattgttttgaagtgtaaaaatgaaaaaacccctattaatttttgttttattttaaataatcactatttgacacatatattattttattattttcataactggtttttttaagtaactagttttcattacttgttttttttattgttattcattaagtttcaattttttttatttgatcattttagaaaattggtttttatttgtttatttttatttttgttattttactaactggtttctcacattccactgtttttttttgttattcttt

SEQ ID NO: 97167 - DNA, 558 bp, Cannabis sativa
  modified_base (504)..(533): a, c, t, g, unknown or other
agtttaaaataatttttaaaaatcagcattaatattttttaatttcaatacttattttaattttattatttataaaatattttggatcttgtataatttttttaataaaattttacataatttttattttaattttttgttataaaagttaaaatataatttttttaataagattattttataaggatataaattgaaagaataaaatttaaaaaaatattatacttaaatatacattttatgaaaaatgaaaattattaaaatgaagtgtatttataaatttttaaagtgtaattaaattttggggagttatatttacactccataaaattataaatacaccccattattaaaaaaaatataaacttaaattatttttaagaattactcttaatacttttttaaaattttttcctcacattattttatgttaattttaatacttattttgattttattttcataattttcctttaactcatgtatatttttttttattttttnnnnnnnnnnnnnnnnnnnnnnnnnnnnnntaatttttttgtcataatttttaaa

SEQ ID NO: 97168 - DNA, 500 bp, Cannabis sativa
ttaagttatttctcatgccgattctttgcatcaagcaatggcagctctggtgtttaatgaacacaagtgacacgtgctccatagccatgttcttcttgcccatgtgagccaaactcgtcaagtaccataggttgaaaccccacatggttgctcgtggtgtttctcttcctttcacggccaagaaattattcaattgtaattaataagaatgtcctttgccaaaccaagcatacagagatcctaccgttgattcaaataagaatcattgaaggagatcctaccttctaataaatactttcataaaattaatataatggatgtttatgttgaaatattaacttacatttagttggatctatatttgaaggaattatatctcattatgatattttggagaagaaatggagcaattaagcgcctttttagttgaggttcttatgaggagcaaatggtaatctaccatcctccttccagtgtatcctttacatttcctttgttgc

SEQ ID NO: 97169 - DNA, 720 bp, Cannabis sativa
cactcattataagaacccatactagaaatatatattgggaaattttatagtgcaccacttaaaagggatacactgatacatctttatctgttttagtattcaaaataattttttagtgaaattttttctaatggtcatataaattatacttatttaagacattttgcaaaattttaagaaatttagattagtttaacacgccgaaaattgcgttcaaacaatatgttgcacgcgtgacaattttattttgtacacgtataaaatagactttttgaacattttgcacattattctgaattttcttaaaattttattagatatcttaaatagctataacgtacatgaatatgaaaaaaaattacactaaaaattttttttggatgccgaaataaatagagagtacatcaatacatccattttaaggggtgcacccttaaaaggttttttctatagatttatatgttatctaaaaattataatattgtgtaattgtatagtgtaagtataccctatattctcatggagaccataagaattagaaaacgcaattgaaatttctcaattatttttaattacacaagcttaattttgggataaagtgcttaatgctcacctaggtcccagcatccaaaatttttatataatatatttttttgcattaaaaaaaagtatttttgtaaaatttttttaaaaaatatctaataatactcatattttact

SEQ ID NO: 97170 - DNA, 736 bp, Cannabis sativa
aattttactaatattttactgaattttaacatgaaaggtaaatttaaatgttatatcaagattagtaccttgtgaattttgtccaacaacacaatgagtcattctatttttattgggggagatttaaggagctcggagagaaatattatttaaatttctcaagtgggtattttactctgttcttttataagggacttgatgatgaaacaaaaaactgggtagattatgtagcagaagtaactggagagcctttgttaaagaaaagccatgatgtaaaaacttgttatgaattttccaatacgtaagcaaacgtatcgttcccaaataatagactcacaagtgtacaaatttaatagggatatgtttcttaaataagtaagtcttttgatttattttacattcttactttccttaatttttattttccaaaatactatatgaaagttttatatttacaaaaatacaaatattgagagaaagctcatttgcgggaaagaaagtgaagtgcactagtaatttaggtgggcaagttttcggcaccattaccgagaactgtttcagttaatatcaagatagttgagttctattttaatttggtttctttttatttattttactaatgttttattgaattttgacatcaaaggtaaatttaaatgttatatcaagatcagtaccttgtgaattttgtccaacaacacaatgagtcattctattcttcttggaggagatttaa

SEQ ID NO: 97171 - DNA, 1606 bp, Cannabis sativa
accgtgttctgtttttatgcttattaatgatgaaaatcctaatttattcaaaaaaaaaaaaaaaaaaaacaaagtaaatcaacatatatttatactattacttataacccacatagcctgatgtaatattattagtaatatttttatttaaatagaaatcattcaacttaaaagctttgtgtattatctatatacaaatattactcttatttgtagtggtctcctgtcaagtgttctcatatcaacaaggttgtactaaattaagaaagaatattttgtattagagaaatactaaagggcaccagtggtgcttagcaccttcctacgtgtcaatatttttattggtccaactataatttaatataataacttttaagaagtatcactaaccaattgcaacacaacatgttaagaaggtgctaggtaccactagtacttaatagcaatgctctttgtattaatatcattactgttgcaattaaatgtgtaatcatttttccacttctgtcgtcttttatgtaaataatttgtaatattttgataagattttacaggatcgcgtatgaatatgtaattttattttgatttaaattaaaagttattgcagggtgttttaatttatgagttatttcatttaattcacttggcttagttgacgttgattaacaagattagcacagtataataatcacaatacatagcgttcctttaattagggcattacatgttcacttgaactttaatgtcgaaggatggcagctagaaacgttttcactggatcttaatgccaacctaggcatccactattatcaaccggggcaccgacatagttttcaatgcctaagttgaccaccattagtcccggtggctaaggcccagggttgttttcttcttgttgcgtgtcaaaagtgttgtccatgtcatcagatcaaatttctaggtagacacaagaaagggagtaatggtgaatattatcggataactatggcaagtatgtttaggaaacaagattgataaggttttgtaagcccaaagttatgacattcttattaatttatttttttaaaaaaaaaaatagaactaatggaacattgtaaaaactagagtaaaatgcatatctaataatgtgaagactgtttggcattgtgaagtgataaatttggaaactgtaattgaccaagttactttaagccactgagtaactatctcgggtaagctcatcttacaagcatatatgtacaccaattcgcaaagtgtaactttgtcacgcagaaggcacatccaatcaatctacattggaccttgtaaaacaatgaaatggggtcattctatgtaaccgcgtaactgtggcaggtaagtttaggaaataaggtaatctgaaaatttgtaaggttggggaatagatgagacgatgaaatataggtgggaaagaaggtgttgaccccaaaatttactaagtattaattttgggttctctagattaaacgagagaatttttttaaaaaacacttcaaagtgtataaataagtcaaatatgggttcgctctgcatgagaacgccccgcacgaggaagccccccgacacgaggagcaacaagccgcaggca

SEQ ID NO: 97172 - DNA, 563 bp, Cannabis sativa
ttattttcttagtaattgcaataggtaatgcattacaatagggattttttaagaaacataaatattttttttctattttattgtttcaaaaataataataaatagatattttattagatatgtgctatgtgtttaaatttaaattgtaattttaaaatatatatatagccacatttaatataagataaagataaaagagaatgtgtagtgagtttaagtttgaattgtaatatttgaaaattaaaagataaaagagatatgaaaagtgagtttaaatttgaattgtaattgttatcctaaatttcgcacaaggtgacgtgccactcaggaaggtaacacgtgttctaaatatttggacctggatggaagttaaatccctctggaaccataataagtcaaagccaagttgactagtttatcctccaatgtccattatccaggaagatctcagacctcacactactccgaatagatcaggatgccgagcaaatgccattcgtcgaacagctgcacgcaacgaataaagatatctagatatatttttttaatatctccacaattat

SEQ ID NO: 97173 - DNA, 579 bp, Cannabis sativa
tatgttagttttataaaattgtaccgttactacagaaaaggatagataatgaaaaacatgattactaagatataatacacatgaaatatatattagttttgttatatgataaattttatgtgaaagttataaatttaattaaacagttctagttgtttttgacagatattttatctcttatttttaaattaatttatataagataggaatttgtttataaatgatatatcatttgatttatatgtatagatgcataaatatccatgtttctctattactcacactctttattttaatatcacgtatgggttctcttttaatttattgaggtttaatagctatggatttttcttgctcaaacaaaactttaacaataaaactaacaatggccgtacttctgtcaatgtttgatttttaagattttttgatgacttttcatattacacaaattgaggagggggatcatatttctcattgttggttttgttgttctgcttgataataatgtatagaattaaaatgtaaattaaattcaaacatttatggtggatttctctaggaaccttacaaatggcatca

SEQ ID NO: 97174 - DNA, 723 bp, Cannabis sativa
agtatgttcataactcgctggctgtatagtcttaagcgagacaaggatatacaaactatcaattcatgtattgacgagaaactatcttgcctcagaaggcataatgccaagggagctataaacagcacatagcgaggcatctacctcgctgtatgtaaggaagtatcgacgaggtgaattagttattggaacacttagcatataacccatgttataacaactaagtgcaataaccggaaggacatgactgtccagtctgcaaggccttatggtcaaagagcagttcttaaatttggtcggtatattggtgctcatgccattgctagaatacaagtaaaccaaagtcattcatatgtgtacaaagtgagatgcctccggcaagatacctttggaagggagttcctattcctgtcagcgttgaccgcattaaagatactttaagtcacagttgtgtgtgttttctaatgttatctacacgtatttaaatggaacataattaaagcccacaatttcgggggaatattgttatagaattcgaatttaaatgtaattaactgcctacctatattactataaataagggcaggttatacaaaaaaaagggacagaaaatctttgagaaaagagatactaattgtaaaaccctaattctatatccaaaagatatctgaataagatagactcgtggactatgcagagttaattacaaaaccacgtaaaaac

SEQ ID NO: 97175 - DNA, 577 bp, Cannabis sativa
tcattatttcttaaaaaaaaaaataagtgtctttaaaagaataataataaaaaaaaattaatcagtcaaccagacttcccactcgccaatttttattcatcctttacgttacaggaaaaaaaaaattattggaaaaaatagggtctacaaataagaggagttgagaactgagaaggggatggagacttcgaaaaaaaaaaagatctaagagagagaaaagaaacacaggaaaaaaaaactacggtacttttctagcaacaatcaaaaagcttcaagggtaagtgttcagggaatgatcccattcctatttctttttcttttgatgtatattttgctcctctcccgttcttattttttgtttctctattcatttatggaacgccctcattccataaatgaaaatggatgccctcattccacaaaaaaaaaaaaaaacaaaaattagatgctctcatccatggaatgtcattatttcacataaaaaaatagatgctctcatccaaggaatgccctcattccacaaaaataatagatcctctcatccaaggaatgacctcattccacaaaaaaaaaaaaa

SEQ ID NO: 97176 - DNA, 714 bp, Cannabis sativa
cgattatataaaaaatgactaaaattattttaggtgccgaaacaaataggagtacacttttagaaaaatatattaaagaattttctaaaataaatttttaattttataaatataataatatgaattttaactaaatatatatataaatgccgtaactaaatatatatgccgtgcgctgtagaaaaaatttgataatggtgcaaagtttggtgtgtccttggagcattaatcacactaataatgctgttgaatttaatatacctaattgaatttaatttgtacaatttaatcaaatccaatcaaattcgtaataaagtataaattcgtacttgcgcggattgaaaaatgaaaaattagtatatttagatattgattaacatgtaaaagtaattgattaaattaaatctatacatatctatatttttttaaaaaaataatatatacacatttaatattttaatgtaaaaaaataataatttaaaattttaatatatataatataaatatattttaaaattttataaattaaatgtatagctcatttttttataattaaaattgaatcttatctaaaataaaattaaacatttgttttacatttttttttcttttaaatttgttataagtaactaataaaaaataatcgatccaatccacatttttacgaattgaatttgaattattacgagcataattagattagatgattaccct

SEQ ID NO: 97177 - DNA, 3101 bp, Cannabis sativa
atatatcgcaaacgtcgcgttccaatgttgtcaggcataaaatatgaagaacataaaattttatttataacataaataatacacctagaattcaaatattatatctccataaatttataaatcgtaattaaaagtctaatttttgaattaaactttaattatctgttaattttcatactaaaattaagcggtctttactgtaaaggagatgataaccttgtgatattttgaatctgctatctgatgaagtgatttatatcgaacaagttctttactttttctttaattgctaccagtttgggccataaccagctgcctaaggctggagctttataattccaccattcttcctccttcagatacacattatgcacccatttcacccacaagttatcatcctttttagcaatagctcaaacatacttaaacatggctgctacattccaattgaaatgtttctaaatcccattcctcccgaagatttagattggcatagtgttccatgctacagctgatgtccctgtaaaatactgactaccattccacaagaaaccacgacatataaattcaatttcactctcaactttttttggtagcaccattacttaacactagtaggagtggatagccatcaacactgagttgatgagtacaacttgcccatcaaaagacaaattttgagaactccgtgttcttatctaggccaccaccttctcaacaaggacactacaatcctttgttgaaattctcttgggacagattggtacacctaagtacctaaagggcagctcctatttcttgaagcccaaagcatctacactctttaaatatcagtgttactcatattgctacaatagaaagaagtttttatgggattaggaattaaacctgatgtttgggagaataatttaaggccttgtaacatgaggtagatgcttttaaagtccccattgcaaaatagaaggacatcatccgcaaagctaagaaaccatgtaaggagccattgaacatcaaagagagaatcttggtgtttgaagacaaatcatcaccaacttaatgaatttggctagaaacttaaaagcatagagcatttcttttataaagtcccactcaatagtgtcgtatgcttttcgtagatccagtttgaacatactattttctttggttattttcctcccataatttcaaatgaggtcttgacaaattatgttatgacctatgaatctcccttgagcaaatcctccttggttttgagcaactaaaccaggaaggattgatttgagcctccaacaaattaactttgtagaggctttatagagaacattgccatggcaatgggccgataatcacttaccatattaggacacttaattttaggaataagtgttaatgcaatagatttgatctctttaaaaagttggcctgtgcgtaagaatgaggttataacttcataaatgtcattgcctattaattcccaattatcttggaaaataaactattgtagccatctggcccaggtgctttgttaccaggaatgtcaaagataactttcttaactttcttaaaagagaattcatttaagagagcatccgcttgattcctcgaaaccacaggaccctgctaaatgactgaggccaaaaacgatttcccgttctctatattactgcacaacaaagtcttgtaataatccaagaaagttgtagtaacttgttgaggatcatcaacccttgttccattagcattagtgatagaaagaattttgttctaagctcttatagctctaatgttgctgtgaaggaaggttgaattccccatcttttatccacttcaatttggctttttgttgaataaaagagtgataagcttccaacactttagcatatgcttccctagcttccaattcctacagctataacacattgtttaatgggtcttgatgcagagcaatttgacttgaatctagcaattctatggctttaattgttgttgctagtatatcagcaaatccttgctgattaatgagcttaaaagtcaacttaaggcatttcaatttggacactatttgaaacatttttgcacctgaaaactgctagtgccaagtctatgctaccatttcaacataattaggatgggatagccacatcctaaaatatctaaatggttttttgctacttgcgattgaatcatacacagtaagaactgatggtgtgtgatcaaaagtccctcattctagaacaaaacttctgcaccaggataggaattaaaccacctttgattcgcaagcaccctatctatctttgaatatatcctttctttacccatttgtttattactccaagtgaaaaaattaccagtaaacttgacatcttcaagttgacaagtatccacacattccttaaaatccataaaattcttgaatcggacacgattgccaatcctctcatcttttcttagaatatcagtaaaatcaccaagcactattcaagcttccataacaacaagctcctttagatctctccataatgttccccttccatcctcatcattgaaacaataaatgaaagtaacaaagaagcttgttttcttatctatggattcaacaaagaggtgaattaattggcttatgcattttaaaatattgatagcaaagctaagagggttccaacttacaataatccttcctctgtcatgccacacactattagaggtaaaacaccaccccaaaaatattcaaacatataaggctccaagatttcaagccttaactctcgtcttgaggagaccaataagccctattttttgattttcaatcaattgcttgattgaatttacttttgttggctattgatccctcaaacgttccaactcataatcttactcatttgtaagagagggtgctcccctcctccagttttatccttctcgagctgctttacttgatgattttttgcttacactacatctagaccttcagccaaagcctaataagtgttattagttgttgttgttggactttgtgccctaaattaagctttatttcaatgtaatcttttctattcaattatcaataaagaaacaaatttattttcattacttgttta

SEQ ID NO: 97178 - DNA, 589 bp, Cannabis sativa
tccatgttctatattgtatatatgaattatatacaatataagtacaaatacacatcgaccttaaaattaaaaaataggtcaaagttggcaattcattaaaattcatataatatagtctgaatattaaattccttatcaaaactgtaatacgtgctaattaatacacctgttttttattaataataaacaataagtaatatccgtataagccagccagttaatctgactttattaaaataaattgaaataaaataaatggtgtttaccttattaaaataaattgaaaatatatattcagttgactttttgctgccccttattatctaatatacgtaattgttattattttattttactaaaaaatattttctaacctacccattttggctagcatttttttttaaaagaacttgatcaatcatgacttattattatacgtgtaatttctgaagactgtagcgtgccacattagtttagtaaagtcatgcaaataatataattaaggctaattaagatttttgcccctaactttgacacgtactaaattatgtccttgaacttttaaggtcgttaaaaatgttccctgaac

SEQ ID NO: 97179 - DNA, 646 bp, Cannabis sativa
tgttccagttgtgtccacaggttcgttttctctggatctggcactgggagttggtggacttcctaaggtattttcctatatagtaatcatcgatattgttgcaaatgttggatttattagacttcaaaaacttatttgtggcatcattagcaataattttgaattgaagtattgtaacattatgttagctcactaactttcttcattgtgacatatatgctggagctatgtaatgtatttgctgatgattatgaatctactgattttctggaagtcatattttaaaatatggattgaaagactgggtttttgactttatgtagtcgccagaacatatgagctccttatcaggagttaaaaatttgtatgaggtttacacagtattgcatgaactttgctacttatgcaagtcttaaattctgatatgctatttttttaattatttttagggacgggttgtggagatatatggtccggaagcttctggaaaaacaactcttgctctacatgtgattgctgaggcacagaagcaaggaggttataatatttacgtttaaatgagaatctttcttgctgcataagtgatgatatattgataatttcatggagtgtctgtattgtgtatattaatttatatgaatttgtt

SEQ ID NO: 97180 - DNA, 532 bp, Cannabis sativa
attcttgtatgtagagctaatattgaagaagcccgtaacttttgaaattgtttgaaaaagttttgttcttggtcaggacagaaagttaacaagcttaaaatgtctatttttttttcagtaagaacacaattgaagaaatgcaaatgggtatcaaagatattttaggcatagacagtccaaacggaaaacatcaaatacttgggacttcctatgtttagaactcattgaaaggatgtagattttaattttatcttggagaacctttcttctaagctacaaggttggaaagtgaaaacctttccaaagcgggtcgtgctacgcttattaaatcgattggtctttcccttctgatttatactatgcaaactacaaaactttctcatgaatggcatccaaaattgatggtatggttcagaatttctggtggggaagtgaaaaggaaatagtagattttgtctcaaaatatgggataaaatttatccccccaagcctctgggagggttaggcttccgaaaaactatagagatgaatc

SEQ ID NO: 97181 - DNA, 873 bp, Cannabis sativa
ggcgagcatgtgcacagctgttgttgctaagaaccacctgggtgaggtgattcggatccacacaactcagttggacttttcagatactttgtgcggagaagcagcggcttgttgttcagccatttctctggcaattgacttagggttaaagtttattattattgagagtgactcgagactagcgatcaatgtcctcaatgggaaggagtcccattgggctcttgagaactatgcctccttttgtttgagatcaactctttcttttattagttgtaattttttgaatataagtagacattgtaactttgttgcccataatgtggctaagtgggcgtttacccaccagatgtatggatgtattcctgtctccgctctgccgaagaacctactctgtaatgaccgtgaggtctagctttcattttttatctaatgaagtaccacgctaattttcaaaaaaaaaaaaaaaaaagacatctaattatccattttttttctttctaatctgtttatccacttatttggttttccaatgtttttatttttgtttttttttatttcttcagtaaattattgaattatacatgaataagtaaatgtaaactagctaaataaaaatttaatcatgaaattatttttaaaataatttattgcattaatacttaaatttaactctcatttgtaaataaatacttaagtataatttttagcggtaataataactaaattataattttggaatttttgttggtacctagtacttcagtgttaagtaaattgctacgtgacaattcttaattaccccaagtcattaaatttttaattttgtaaaaaaattaatttaaatatactaataaaaaaatgacacgtgaataa

SEQ ID NO: 97182 - DNA, 637 bp, Cannabis sativa
ctcatcactaacatcacacactccaaatccaagcttttcttcaatggcagatacctcaagacccgtaacgggttccctgcttcaaccaatttcaatgtctcttcttcttctccaactgtttttggaaactgggcttttagattctctgttaacaaccctaagaaaaagatgaacatcgcttatgattcgactgtgtcgttttttacaaatcaacatttttggcagagactcgaatccttcctcgtcattgacgtcttcttccttcgcaccatcggagcagcactatttcaccacagtgcccaaaacgagatggagagaacctcctcctcatcgacgccttcttcctcctcaccatcaaagcggatccagatctagtttttcaagggttacaaacctccatttggctctgagaagatagaagtcgagaaagagatggagagagagtaaagaacgcgagggtctttgattagggtttcatgaatagttttcagcaagaaaattaagaagagtaggaagaagaagaagaggatggagagatgttttagtttttgtgtaatatcccgaaaaatatattgatattttaattggacatattttattaaatatgtggttgtatgggtattagagtaggattata

SEQ ID NO: 97183 - DNA, 560 bp, Cannabis sativa
gttctcctattggattttgattgtgagattttgattattggctcattatctcattttgttctctgcttgttgtctcaatttatttgctcctttatcaaatttgttggttggtttgttgtttgagttagtttggtgggacgaacataatatttgtaatggcttctggaagaccaattcttgtttctgcagatgaatatgccaaattcttacagtatcaagagtctcttaagtattcatcctcttctatcactaccattgctgatttaggtaaaccaaattcgtgtcttctttctttgtcttctaaatgggttattgattctagtgctacaaaccatttgacaggtgattctagcttcttttctgatttttaacctcatgcttcagtttctactgttaccttagtcgatgggtcaccatcttgtgttcttgggtctggtaaaattactcctactccaatgctttctttgttgtccgtcttacatttacttaattttacatttacttaatttttcttgtaatttgatctcggtcagccaactttctcgtgatcttagttgttg

SEQ ID NO: 97184 - DNA, 507 bp, Cannabis sativa
ttctgaaagtatttttcctggaaactagatgagaaattaataaatttaggctttgaacttaatttggattttttatgaattagttatgattttttgaagtttgatgaaaatattccaaaattgtagcacgagtgcgcgcgcgtggatgagggctgtcactgggtcgagctccttcagccaacagaggttgcatgcagcctccccccttgtacgctcgcaggggtatgcaactgaagccattaatttattggaggagatgaccactaatagttataattggcctaatgaaagaaatactcacaaaaaggtggttgggttacatgaagtagatcctatgacaaatatagcagctcaaatttctactttatctaatccagtggctgccttaattgctcagaacaacacatcaactatagaaaatgttgttgctgcatctacatcacaagagcctgaaataagtatagaacaagcacagtatatggccaacaaaccttataataacaacta

SEQ ID NO: 97185 - DNA, 724 bp, Cannabis sativa
gagagggttaccgagcaggtaaactgggctccctaatgcgaatggcatgcttaacgggcctaggcttggctggaagtttcttcctcctcttaagcagagtcacctgctcttcctctgcctcatcctcatgattcaaaggcttctaagcatattgtttggcccttgaacctcctttcaacttagcttcatgcttaagttgaatgagttcattctccttatgagctccctcagctcggccagcaccagatttccttttcctctccttcacaggattagggataaaatccttcggatagagcctatacttcacaaagttctcctccgaggtcaacaagattatattccgagcatcccccggtagctgagcaagccttttgagctctatccttaagagaaagtgtgaagggagggtggtcatatgtggggatctgctggaaccgagtataggtggggcccatgccttcaaccaagaagtactcgtcaacaaaattcccaattttgctaacgacattatcctcgttgcccgtcaaccacttaaagtctagttgagagaaatagaagtacccccgacctgccttgcttaggggtagacttcaaatcaaaaaattggctaacctaatggggagaaggcatatcccactactgggaggcatagagagcgaagagggcggacagatacttaatgcccttgtgagtgaactgggtcgggcagaggcggaagaag

SEQ ID NO: 97186 - DNA, 560 bp, Cannabis sativa
  modified_base (504)..(533): a, c, t, g, unknown or other
ttgggtataggcgacagtttcgagccgtgcctaatactataggcgacggttaagccagttataggcgactttaaaccatgccttatagtctggttacattttttaattttttttagggacgatttatttcagtcgttacatttgaaaaatagggaagaaaaatagattttttgtaattttttccctgcattaatttttgaattttgtacaaatctgcatagtcacaacaattaaactaacgctattatcgtgtaaatatatttaaaattatgtatagtcacaataattgaactaacgctaattaatatcatctaaatacattcaaaaatctataattaagttaacactaattataataatctaaatacatttacaaatctatgtagtaacgataaatctagatgtatacacactaaccaacacagtaactgttgtcgttccgcttccactttcacgtaatgaatccaccaatcacgcataatatttattgttgggttttatgcnnnnnnnnnnnnnnnnnnnnnnnnnnnnnnatttacttattaatatagaccagaaat

SEQ ID NO: 97187 - DNA, 536 bp, Cannabis sativa
ggtcaaagccactatagtgaaatttctaaaaattcatgaaactcatttacattgaagaaaatcgtaacaacaattcaaattcatttcatcaagaaagaaaatgtggaactggaatgacataatgtttcattgccatgttatttgcttattttaatatccagaaatacaccaacttggacccgaatttcaaaatgaggcttcccgctaacccttcttacatatagagcacagaaactacaacaattccaatagtatccgaaatgaacttatatttaaaatcactctatataattattaggatttattcaatttcgcgaaactaatttttttccagatggaaattattagaattagttttctgattgtacatatttactatttagtttcatatttgtgtttaattgcctatctatgtcatagccaagtttatttaagaatgaattatctcaattctctccctctattgattctcttcaatctctctaaattcctaattcctgtctctgttcctgaaggggctctaccgataaatatca

SEQ ID NO: 97188 - DNA, 1886 bp, Cannabis sativa
aaagagctatatgaccatcactcgacctttgcacgataagctctacagaggtagccaaacatgaaagagctatatgaccatcactcttcagtgatgacccttgaacggtacactatgcaagggtagccaaaacatgatttcaaaagcaaactttgatttgtaagcttttgttacacaaaacatgtatgttgcattgcacaacaacaactcatgtaagaccaattgtgtctaaaccactttcttgaaagataacttcttaaagttattgtttttccaattccacatgcgtacaaccgaaagccctccaaaaaaattcacaaacaaggtctatgaaacttagttgcaagtgaccaagagatcgtaagtctgctcgttcacttgggggaacccacaccatacaagcatcgaactagcacaaagaacttatgcagagaaatttaaagcttagtataagcaaaaaaattgaaagttaattcagtgcaggcatatttcgctagacataagaaaagtaaatctggatgtttacatgtctaagcataagaagatagccaagattaaagacttcctggtcggtcatatgtccatagtaaaagcctttaaggctaaacataagtagcattccaaaatagagggcctataggccaaagcaagaacatgaaaaccttaaggtcgaatataaataatgttcgaaagtaaagggccttaaggccatacagcaagaacaaaaaatcagttcaaatgcataaggtcgaggccacacaagaatcgagcagccagagaagaactagataaagttctataggaaccacgtattgggatgaatctctaaggcagaattctttgtagcttccaagccataaggcagagttccttgtagattccaagccatagggcatagttccttgcaggctccaagccatagggcagagttctgttgcagtatccaagccaaatagtagagttcctatgaagattttaagccatagacaagactctggtcaatcgtattcgtacccaatggtacttgctagagaatttcattgtacaaggctggtatcaacaaagtaggatttcaagtgtaacaacttggacaagttttgggtcttaagttgattattcaactacaatagactcaccataaagtgtcatacacagtttttaagggaacgacatatgagacaaaggttgtgcaggttcgcaaggccatgacaagattcttgctgaggtaaatagaggacaaaaaactggccacccacttaggaatgaagctctgggtcggccagagtcccaagccatcaaagagggtcggccagggtcccatgacccatgcaagaaccggccaatgtcacatgatccattcatgaaccggccaagttcctaggacaaaccctagaactggccaacccccatgacaaacaccatgggtcgaccaggtcttaaacaagaccccaagggctagcaaaggtgtgtaatggatcaaaatatgtgttttttcaagactcgaatatctcctttgtgttcttcgtgactcaaagagtcaagaatcacagcacaattcaaaatcgattctttatcatcaaaaattaaaaacattatacattctaaagctatccagcaaattataatgtgaaaagactatgtgagaatcaaaaagtttctaaaagcttaaaaatcttgaaacttatcaatgacagattcaaagaagagatgtcaaagaaaagaagatgaggcatatatggtgagagagaagatgaaagatctaaaagcatgtgattaaggctcaaatttatatattttaaaggtttaatagcgttcataaaattaatttaattaattattttcatggttttaattgtaaaattattatagttggaaatatttaattt

SEQ ID NO: 97189 - DNA, 1304 bp, Cannabis sativa
  modified_base (222)..(224): a, c, t, g, unknown or other
tgagataaaagacaagaagggaactgaaaacctagttgttgatcatttgtcaagacttgaattagaagagagccaaaatgcaaaggaggtgcagataaatgaatagagtttcccgatgagcaattttttagtttgagggaaaacttgatggtaccttcgttcacaaactatgtgaacttcttagctaaaatgttacaccccctgagatgtctcgtcaacagnnnaaaaagttcttttcagaggtgaagcactactactgggaagagccgattctttacaaacactgtgctgatcaaataataagaagatgtgtgcctgaagaagagatgtattctgtcttgaaccactgccatgccttacaatgtggggggcgtttcagtggcacaagaactgctgctaaggttcttcaaagcgggttccattggcctactctttttaaagatgctaatgattttgtgaaggcatgtgatcattgttagagaacggggaatatttctagaagaaatgaaattcctttcataggtatcttagaggtggagttgttcgatgtttggggcatagattttatgggtccttttcaatcttctttcaataatctgtatatcttgttggctgtggactatgtatcaaaatgggtggaagctgctgcaacacacacgaatgatggtaaaacagttttgtctttccttcaaaagtacattttcattcgatttggaactccctgagcaatcattagcaatgaaggggatcatttttgtaataaatatttgaagctctgctagcaagatatggagtccgccataggactgctctaccttaccatccacaaagcaatggccaagccgagatttccaactgggaaattaagttgatattggagaaaacagtgcaaagttcaaggaaggactaatcaaggaaactagatgattcattgtgggcttacagaacagcattcaaaacacatataagaatgtcaccatataggttagtgtatggaaaagactgtcatctgctgatggaattggagcataaaaattattgggcaatgaagaccttgaaaatggatttagtcgctgcaggagagaagagactgctataattagatgagtttgaagaattcagaaacaaagcatatgagaatgcaaagatatacaaggaaaggactgagaaatggcatgacagaaatttgattaggaaggaatttcaactcgggcagcaggtcttactttttaactcaaggttgaaactttttcttggaaaattgaagtcaagatggtcgagaccgtttaaggtggtcaaggtat

SEQ ID NO: 97190 - DNA, 720 bp, Cannabis sativa
atccgagatatgtcatctcatctgagatatgcgagtcattccattaatgataagtcgtcctatccgagaagtgtgagtcatctcatccaagataagtcatcacaacatctgagatgtgtgtgagttatgtcatctaggatatttaagtcttccgtcttggacgtaagtcacccctcttgcatgtgtaagtcaccccatcttagataagttaccctatctgagatgtatgagtcattctattcgagatatttcatccgatttgagatatgtgagtcatcccgttaaagataagtcatcctatccgagaagtgtgagtcatcccattcgagataagtcatcacatttgagatgtgtgtgagttatgccattctcgtgagatgtgctagtcatctcattcgagatatgagagtcttcccattcgagataagtcattccattcaaggtatataatcaaatccgagataagtcatcatattcgagatgtgtgagtcatctcatcttagatgtgtgtgagtcaccccacttgagataactcatcccatttgagatatgtcatttttcagaaatatgtgagtcatctcattcaagatatgtcatcttatttgagatgtgtgagtcatcccatatgagataaatcatccctcaaagatatgcaagtcattccattcaagataagtcatcctatttaagatgtgtcatctcatccgaaatatatcatct

SEQ ID NO: 97191 - DNA, 895 bp, Cannabis sativa
tacaataggttatttcgtagaaatgggcagcaaagtcattaaaatactatgaaaaaaatgttagaatatattagtagtatctagcattttatatcgttatcacagtagtgtcttttaataattttctaatttgatttaaaagttattattaaatattgttaattaattataaaatgttacccataaatatgatattttataacaatgtccaaatactaatcgtcatttgactttactatatttttgtttgtgtattacacgaatgatccaattaagtccagatttatgaatcattaaatgaaagggttagttgaacttcgtgtacgtataagggaatgtttgattttattttataaaagattacaagtttttgcaaataacgtccttatcattttcacatttattgattcaatgcacttgcaaagaccttgatttggtagtatttgaatgagtggaataatttaagtccattttgataaatactctcacttggtattatttgaagaagaggaatattttgaatagtatgatttgaaaaataaatggtcctagctaatgtgataaattaaacccttaactttccgtcatgaaggatgaaaaaaaaaaagataatataggaattaagattcacggttaaaaattaatgttttatactgttttaaatatattaaaatttgacacatcaactaatttaatttatattaaatatgttaactatttttgttgactttattagaggtttattttttttttatagataaaaaattaattgatgagtgtcaaattttaattggtttaacacagtataaaatagggttaatttcagaaatacacaaaaataacaaaaatacagtttcacggaattttaaacatttttatgatttttttttatttt

SEQ ID NO: 97192 - DNA, 600 bp, Cannabis sativa
gaataaatatagaaaatataaacaattttgttataacacttttagatcggattattattaaaaattattttgataaaaaattagttttgagtcttatttgtactattttagaaaatacaagatctattttgtcatttaacaaaataaaggatctaattagtaacttttataaaatacagggtctaaaatggtatttattttaattttgatatgtactaagttgtgtccttacaatttttttgctgttaaaattttttcctaaaatattgagatagttaaatttaagaacttttatccaattatactcaattttactaatgcaatgattgttcatgtactaattacattgtgtctcctgaactttaatatgtactaactcgttacctctgaattttaatatttaccaaatcatgctcatgaactttcatctatgttaggattctaatataaaattagataaaaaattcttgaatccaacgatttcaatagtttagagagaatttaaattttagaacttgagttctgaagacataatctagtacatgtgaaaatttaggcagcaaaatccaactcagaattagtcttaattttcatactaaa

SEQ ID NO: 97193 - DNA, 754 bp, Cannabis sativa
aaaaatgaaaaaaaaaaaaaaaaaaaaaaagtatgactatgaaagggatgcctctctaaggagtataatttttttaacattcaaaattacgctctaagcaccatgaatgcggtagaaggggttgttcaaggcctaagagtccaaaagcttccccaatcaaatattataccatgaaaggggttgaatgctacctaaggggccaaagctccccctataaaatcatatatcaaaaaaagattgagtgtcacctaagggaccaaaagctcccttatatccaatgagttacgtactgagaagaggtggagactaatctaagagtcaatactcccttaatggaaatgttacataagtgaagaggttgagaaagcccaagtgacagaaggctccctaataaaataatgacaacttatagaagacattgagaaagctcaaagaggtaacactcctttagtgtgataagtacccaccacaaaatgggtcaagataactcataaagccaacactcagggtcttaaaaagaaatcgagacataaatgcccacaacaacaaccatggcccatgggaccaagcgatggagacaaagtacaccaaacttagtttacaagaatacttgaaagaattcttatagactaggggcaagtgttgaccctcaaaaattactaaatgtaaattctgtggtcaaaatattaaatggatgaaagatcccaaagtgtgctaaggaaaagtgtgtaaaagagacaaaaaagagaggatt

SEQ ID NO: 97194 - DNA, 783 bp, Cannabis sativa
tttgtgtagctagctaaaagataaaataactatgatagttatgtggagtgatgtttttttctttttttggtagtgtgtagaggtgaatctaaaccatcctctatttataaataattctttcttgttttcatgaatggctcattttacacgttcatatttgatagtgacaaaagtaggccctagctaggcgttgttgttagtaatttacaacatgacagtgatcgattttactacagatagtagatgtgtaactaattgtgtcaactataatataatcaaataagacacatatatgtatgtatttctagttcaaataaataggatttttactctaattaaatttgatagaattttatcaactgattattgtaaaaaattctcacgaaactttgaagataattacaaatttaattgcctctcgtttatctttgcaaacagtttcttcatgtaacaatgagcccaaatcaactctcattcaagagttcaaacaaaaaaaataataattaatatatcaatatatatgtataaaggagagatatgaagcggtaacgtgagactccaatttttttttttaaaattaataacattatttgttttcttcttaattctcttattttttttttttaatttttttattaaatttataaatattattgattatttaattaagaaaatataaacataatttttttttaaaaaaaatcatatacctattcttttaaagccacatgtatatttatatatactaggtgaatgtacgtgccgagccacgtattgctagtt

SEQ ID NO: 97195 - DNA, 1267 bp, Cannabis sativa
gtttaaggttgggaatggaagattactgttattattgttgatgaaatgaggttctgggatcgaagatgatgagatttgatgatgattattactggttgttgttgaatctccataaagagcctcaagttgacgaaagaatctgtagtgtttaccatcttgtcttccggctttaccttcttttgtcttcttgtaatatttatacaagttttcaaatttctctctgcatttttttccactcctttggtacccatgttcttcacacatgatcctatataataataataataacatatgattaaaatataataaaataaaagtagaaggaaccctagctatctaggtagctagctagtgttataataattagttcaataatagttttaaataataaagctcataatagtttgtggaggatgtgatgatgatgatgatgatcatgatgtaagaaaatctctcattctctctctcttctgggatttaattaaaactaggagttatagtgtatgactgagatttatcccaataatatatatggatatttaaacttgaaaaacgaagacgagtagtgtagtagtagtagtagtactcggcctgcgtgcagagctgggcagctttcttacaatttttacagacatcttttcattatatcagaagaaaattgaaaaaaaaaatgataataataataaggcagaaaaagatgagtacttatacttaatataagctgtcaaaaaggtcaaccattctttcggcaaagccagaaaaacttgcacttaaaagaggagacacattttcaaatcagaaagacttaaccaagaaatacagtcttactcagtccctatcttattgagaaaatcaaaacacaccattttttttttatttagtttatactactcaattaactattattattagtatagtgtaactgtgtttttaacccttagaagaagaagaagaagaagaaaatagaaaaatcaaaatcagaataaattaagaagaagggggaaaagggttggttaattaattgtggaaggagaaagagaaagagcatacctagacacttcatcccataagggacccttttgattagcttctttgaacttagaatcaagacgggatctgatctccaatagagtaagagtctcttgtcttggccatctacccgttccaccatccatcattcctaggcacccgccgctctcacccaactccaagccgccgcctccgccgccgccgctaagagaaggagccgaagtagccgtaatagtag

SEQ ID NO: 97196 - DNA, 765 bp, Cannabis sativa
  modified_base (539)..(542): a, c, t, g, unknown or other
catgtcatatacgctaagtatttttattgttattatatctcctccacgcgacgaggttaatgcctcatcatgcacacttgcatttacatggtttatcgtcgatacacaagtcaaaagttggtacatttttgtctcgcacaagattgttcagccagcagagttataaacatactctgcaaattgtgtttgtaacgagttattccacatcaagtgtacttacgattgcgtgtttgagttcttcattcttcctagttcgacacgtgtcttcttttgatgtgcttgccaaattttgggtataacaattgccccttaaaaagttcttctttaatgaaaagagctttttaatgattacaaagggtatttttgtcatgatcctctttttgaaaagatgcatgccctctgattttggcggttgtgcggttttaacgtacatcagaattcaatgaccatctattccacttctgcttcgaattatgtctgtaggatcaaaccttttgctgatctaacaaagctaatatcatgggtataaagtaagaaannnngaaccacctttgcattatttcctccattttggaaagtctgaaaaactattaagcttcttcgtcaagaatcaccattgagtttttttgaggacttgcatgccatctctgtccttaaccttttttctaaaagtttcctctgacttcatcctctcaaagcgatccttgcttcgttcgaagatttgcagatggagtaaccagtcattcccccaagccctaactccaa

SEQ ID NO: 97197 - DNA, 535 bp, Cannabis sativa
ctgaaagtaaccaaatgaagtaagaaggttggcttttataggccaaaacaggtgtgagatagctgtgatcgaccatcattgtacggtcaggatggaaatcgattcgcattctacagatccaacggttgcaataagcactcatcaatgcggtagaaaatggttgagtgcccgactgacacccatttaatgcgccgtatcaataaatggacaaaaaacgaatcgttgtctgcaaaaagcaaatgattgtagtcatgatggttataaatacatccccacgcgcccaaggcacgtgtcgggaagttgataaggcaaccggaggcattcaagcaagccttgtttactttcttaccaaacaaggcttgggggataaatgttgcccctgattttgtccaaaatacgtggaccaaccggattgagacacgtagatcgaagacgtttaaactttgggataattcaactaagtctctttaatcaaagggatcagcatttaacatgcctcccggagaaggcatgtgagtttcacatactcccggag

SEQ ID NO: 97198 - DNA, 524 bp, Cannabis sativa
aataaaattaattagttgttttatcttaatttaagtaaaattataaaactaatgcaggaaaaaaataggggaaaatacagatttttttgctattaattttttttttcacatttctgacggtttaaaatcgtcgcctataatagggtataggtgacgtttttaaaccgtgccctcaccgtcgcctataccaccctgttataaaaccgtcacctattttgcccgttttgcgacggtcgtataagcgacggttatagaaaacgacaggaatattttaaacgaatatttaaaaacatcgagaaaaactatttttatagtagtgcataattaactaacggtctatttagtgtccttagtgctctctttatgatagcataaagtagcgctttataagagtaactgttatattattttataatataataagtataaattaaaatgtgataaatatattattatgtgaataatatatattatgtgtatggtaatgtgtaatttatgatttttagcctacacttttgtaacct

SEQ ID NO: 97199 - DNA, 651 bp, Cannabis sativa
gttggaactaatcccctctccagacacaactttgggagtatacggctctctatctttgttttgtttttccttgttcgtacaagaatggggatgttcaaagaaggagggtccatatctcgacccccaatgttgggatgtcaacctgggtgctggatattaacttggtcgttgggttgtcaacctgggtgctggatatcaacttggtcgctgggttgtcaacctggttgctgtgtgttgaacatcctccagtaaaacagtcataactccttcaatattgatccaattgacgcgatacaacttacatttcaaagctatttcaaagatctatctatcaagtcgtgtctcacacacatatcacaattataaagactttaagtccaaaatttgtgtccaagacagttgtaattttttctagagattggccaaaaatgatccaaccgatgagatttaaactccaaaaattgacgactttcatcaagaaacaccattagatcgtcatcaatggccacaatcagctcaaagtgaatttttcatatttttttgtattattttattaatattttaacaaaacctccttccttataaaaggagagctcctctagctcatttttcacattcatataagtccccataaggtgagagcatctctct

SEQ ID NO: 97200 - DNA, 923 bp, Cannabis sativa
catcttccaaggttgcaagtgatactaaattccttctcaactctagaatgtgcctcacattatgcagaatcttcacttcaccattgaattgccttatatccaccttaccagttccaacaaccctacaaaaacatcattacctattagtactctaccaccattattggtttcttgataatcaaagaaagattatatgttagatgaagagaagatttgtcttagttaattattgagttatcattttatcggttaaactgtatgttaaagattcatatatggaatgaatctctcttactatctaaatgaagctgaaaattttaaaatgttcttcaaaatgctgtgactagacttaactcctttgtcaaactatatttcttataaagtaaatgtacgtccacgggaaggtgctagcaccatatttattgaattgaggcaaaatttttggattgttcatttatttattttgtgtttaatattttagtgcttttttataaacatttaaaaactagcaatagaacattgtctgctgataaattatttcacttgtaaatgagttttgatttgggaatattatactcaagtatcaacaatctttgggtagtatcaagttatgtgttagattatttttagctatgttttgtgtcactttttatacttatttttcttctttattattatatttggaatggaattacgcttgttttctttggtttcaggtttcatgaaatgtattaattgactaaatttcgaaaaacaacaatctatagaatagagaaaaatttacaagaaattaaagctaaaacttcaagcctaaatttgactatgttgtgatcagattttggaaaaattcaaagcatataagctttatatttatttttcttctttctaacacatcttgaatcaactcatttggagttcgtatg

SEQ ID NO: 97201 - DNA, 584 bp, Cannabis sativa
gtcctaggtccgggtcttgggtccaggtcccgagtcccaagttcggcacccgggttcaggtccgggtctttggtctcggtctaagtttcgggttcaagtcccgggtcctgggttcgggtctgagtcttaggtccagggttcaggtcccggatcccggatcccaggtccgggtgtgagtctaagtccaagtctgagttcgggtcctgggtttcggtccgggttcaggtctcgggtcccgggtacgagtttgggttcgagttcaagttcgagttcgggtccgagtcagatattggtgttgatcccgaatcctttgttaatattataatacaagctaatacagactatttgttatgtattaaataatacaatttacattgtattaataatttggttgtaataattgatacaatacattgttttattcaaatatagtgctttttattatttaatacaataccacctttatatggcgtaccaaatgaacccaaatgtgtggagcataaaagaaaaatgattaactaaattgaaagcatataacattagtcttgattaaaatttgagaaatgttagtgtacaattgttac

SEQ ID NO: 97202 - DNA, 711 bp, Cannabis sativa
  modified_base (419)..(420): a, c, t, g, unknown or other
acgatttacaaatgtatttcaaagcttctttgctctcgccttgctcaagcccttcctggtttaatcaatcaaaatcaaggagcctttgttcaagggagatctatagctcacaatgtgatgattttgcaagacttgttgaaaaattataaacgggaaaatgtttcccccaaatgtgccattaaagtggatattagcaaagtttatgacacggtgagttgggattttcttgaagatttacttaatgcttacaattttccttccaggttcataatgtggatcatgacttgtgttagagcaactagctactcaattgtcatgaatgggagcattcaaggaagcttcaaaggggaaaagggtctaaggcaaggtgatccattgtcccttctcttatttgtgcttgttatggaatatctaacccnntgtcttcaaaaagttgctagttgtacccattacaggtatcatcctatgtgtaaagagcttagaattgtgaatatttgctttgttgatgacttaatgctttacagtaaaggtactcaacaatctgtcagagctctcaaagatactcttgaggagtttagtgctgtgagtggcctattatcaatacttataagtctcaaattactttggtggggtggagtgagatacaaagcagagtattctgagagattttggtctgatggaaggaaactttcctcttcgatacttaggagt

SEQ ID NO: 97203 - DNA, 555 bp, Cannabis sativa
atcttttctcaaatcttaattgccactttttgctaatttcaggtcatggctaaaatcatttaattcttttctggctttgatatcacacccagttctaatttgttatactccatattatacatttataaaaacagtataaaataaaatatactaaatccaaaacctaatcaagtaaactttaattaataatttacaatcaaaatcaataagaatttcacataatactgaaccccaaaattttggtttagggcttcagtaagccaaagaaaacaccattatatacttgtaaaagaaattacaaataaattatcaaaatcaaaatagaatgatacaaaaatacctcaagcagagttccagcttggagaagagaatgcttagataaatggaggagcaccgatgggtcacaatctctaaaggtggagagcactatctctccattaattactgtaaatagaaaattagggtttttggattcttacttctttgtctaagacatataagatagaaaatgaaaattcacataaatatattcctatatatgtgtggctacaaaat

SEQ ID NO: 97204 - DNA, 1051 bp, Cannabis sativa
  modified_base (838)..(839): a, c, t, g, unknown or other
caagtcgtcccagccgtccgtgctcacgatctagatggatttctctttggcacaagaccgattccgcctcagtacctcgaagttccaaactaagttaaccccgagttgtagcagcagcaagtaaattcccaatttattctctgggttcgcaccgaccaagccattttatgttggcttttaaactctatttttgaggccatgcttggccatgttttacgctgtcatatgtttcctatgaactctggtctttgctgaaaaatctcttcacaactcaatctcgagcacgcatacttcaactccgctttaatagtaacaattaattatttcgataaaattctttcaaaaaaaataatatcaacaaaatatctaaataataaattttaggttaattatgatctttttcgacaggtgccatattgtgttcctgaatacttttaaaaattcttcttgaactactaaaattattgcggattcaaagattttcgttcaatttcattcaattttactagcagacatctaaataacgatatgattgaatatgaattcattaggaatgtttagtaattttttatgacaatcattaaacttagatatgtaaaacatgatatacttaattatatcaataataatagaattttttttcagctaaaccatcttaactatcattcgacatgcacttaacttttaaatctcaaattttggtggtaaaaccgtccaaactactcaactgttagtaaatttaaagtattatctatttttcacagttaactgtcaacatggactgcttatgtgtacactcttatacacataacgtgtttatattggtacacttaatatnnttatttaaaaattataaaaataatttcaaaattataatgtatatttttttatttttatcattttatttaattttaaaataaactttgaaataataatattaagtgtatatcaatataaacgtgccacatatataagagtgtacacataagcagtttatggtggcaattaaccgttaaatttgctttctgttcagtaatttagaaggttttac

SEQ ID NO: 97205 - DNA, 880 bp, Cannabis sativa
tcggtttgggcgggttattcggtttaggcggtttacaaatttttttgtacaaccctaattcaaatgatcgaaacgttattacgtatacaaatatatactatatatatatatttatatgaacacttggctttaataagtttttaattgtgtacagcagtatttactatttttagatatgatagtttttaaaaattattacatttagtattcaacggtatgaaaattaaatatgtatcgtagtatgaatcaagcaagtagaaattatgtatcctatagaaaagagaaatggaaattattaaaatattaagaattagtcagattaattattacagcagagatctaacacatttttaaagcactacagatcacgttctatggacttctaattgtcaatgatcatcacagtcaaacaaacatatatgtatatatatatatatattccagctgtttcttttttcttccttttcttttcaagtcaaacattcatataaagtaatacattaggtacatgtagataaattaacaaatccaacttgcaaatatatgcattgaaacaattcatttactttaaagtatgtataaactccaatactccatatatccatttctcttgttagtaaaacaaaattagtaattacaaaaaaaaaaaaaaaaaagaataaataaaatttttgccctcaattactattaactacaacattattagattgtgtcctctcattttgttcacattgtaaaatttccaaattatggacattactgaattatgcacattacaaaattatgcaaattgacaccaccgaggagactatcactaattttcctatttaaaagatcatagttccttgtcataaagagagggtttctacaaaattatttc

SEQ ID NO: 97206 - DNA, 806 bp, Cannabis sativa
  modified_base (54)..(70): a, c, t, g, unknown or other
  modified_base (780)..(781): a, c, t, g, unknown or other
ctaaaaaattacctaatatgattccatgttcttttaaatcacaaaattgaaatnnnnnnnnnnnnnnnnntcaccaagcacacggatttttcgaaaaaaaatgaacttttcaagtcatgctatctaaaaattttaaagacttaaaaatttcaaaactaaaaaaatataaaaattttaagttcaccccctcaaactaaagtgacacattgtccccaatgtgacattaaagagagagaaaagggaacttacctgagtgccacatcagtatggcggtggtggtggttgtggttgaaaaattcaactaggatacagtccacctcttgcatctataagggccttgtaccaaatgacgaaaaatgtcatccaatgttgcaaatttcaaagctatgcctagagtgagagtcaccttcccaattcccgcacatcagttttttcatacgtcgtcaaaaagttaaaaatcgttctttggagttccctttcttcctgttggtcgttacttcttcactatcctttacaacttccactcgacaataggtagaaatttcagttgcaacaaagacattgaaagtttcttcttccttttgaacacacaactttaactccctcttttgcacatcaattaacgctctccctgctactaagaatggtcttcccaaaatgatggaaatattctcatcttcctccatgtcaagtattaaaaaattagcagggaagatatgttggaatatgttttagcaggatctagatttactaccgtgtatgttgtttaacatcctaaanntgaatttctaaaacaatgaaattaa

SEQ ID NO: 97207 - DNA, 1156 bp, Cannabis sativa
ccccctctcttcaacccatatctataaatagataaaaagataaccaaagtatttgagattattattgaagatagcataaacaagagtgatcagttccatttaagcaatttgttgtctatgatttctataattgagaaaattttaaatataatatgaaaagataagtaaagaacacagagttttttaaaaaggttcggccccgagcagttcggtaatagcctactccccttgatttatattgacttaacaacaaagaatacaatgattcttctcttagagctcttacaatgaaatctctgagtatactctcttagataattctttcgacctcttgccaagtgagaatagatcactatttatagggctctgtgcttgagggaaggttttccttttgtttagaatgtctataattggtaagattacacattacatatatagagtacactgattgagggatttggacagcttgccatatctctgtgatatgatcccagatttatagggatcgctcttatgctttatgatgcaaatgctagaatttctaagtgttggtatgctattcggattatccactggtcggctaggaggacttcgtctgtgtaggtatatgtggtattctgatcagaacatctatttcgggcaaatatggggaatcaattccacgtgtcaccaacatgtgatgccatgtcaaagtgcaaaaattaggataacatttgcctccaagtctgtacggaacatctagagttgcgtgtagactttatctgagctgcttttatacttgaatgggtgacacgtgtcgggtgcgtctgtccgggaatcaatgtgagtctgaccaggcgtctctttggtttttagctaattaatgttctgacttaattaatgcctctagacacggtttcctttgatgctttgatggttacacttgattgctttaatttcccaatatttgcttttggggggaaatcaaaacgtctgtggattttgaaatgattaccttttttcaccaaatttcctataaataaggctggaactccttcagaattttattttcaccattttctccacaaaataacatcagagcaaaaaaaggaactttctttaagtttgtcgtgggatttctagcagaggcattcgagcaacttcgtctagactacgt

SEQ ID NO: 97208 - DNA, 628 bp, Cannabis sativa
tatttatcgtcaaccggtagagtactacctagctagcccttttaaaattatatattaaaaaattaaatactctttaaaaaagaaaaggtcatatttgcacaacttttgtaaaaaccaatatgtattttagctaaataccaaaatattttttttttaatttaccaaaaaaaaaagccaaagtttgtcaaaaagaaaattaataacaccattttactcttatttcattacaataatatttaattaaaaaattttattatatatgcatgtatttattttttttgaaaaaaaaagtatgcatgcatttattgaaactagaagtaaaacactaaaaagaaaaagggtcatataaaaaaaataagaatattaatttttatattaaggatgatacctcggtaaatttgtaatccagaaaagatatcataattcaaaacactttgttttgatccatttatttctttttattcagcaaaaaaaatatcatctttttattttataaagtaataaaaagaaatagataaattatgaaaaggtttggtattttaaatatcaaaaatgtatcaaatctatttgacaaaaatatgatcaaaaaaacaccaaatagattttgtcttaagaaagtattcactaa

SEQ ID NO: 97209 - DNA, 659 bp, Cannabis sativa
gattcaaatatacatggttctaaaattcttgtttattttaaaatttataattttttttattgaaaactgaatttataaagtattgattgatatatattttaataaaaagtttaattttaatttttcatccaaaattctcaaacttaaactggcctttgagctatgttaaaaaaactagaaataatacaaggacgtgccctttgaccgataaatttttaagttgtacttttcaaaattggagtgtgttaatttctctttttgtttttgggcattattcaaaaatcaaaatagacattattttcaactaaaattatgattataataaattctataactctatacgtacctacgtaacctttcaaaattaatctggtcctaaacctataaaccacgtgatgaaaaaaaaaaaatcagttgtagtaaaaaaaaaatgttggtgcctgcaaaacctattgtatattcaaataggctttttaattatcacaactaattgcaatataattgaaattaaatcacttgaaaaaaaaaacgtgatgaaaaaaaaaatcagttggtgcaaaacctattgttcataggcctttaattattacagcttaccaattcccaaaccaatcgaaatcaaaacacttgaacacttaaaaaaagaaagaaagaaaaaa

SEQ ID NO: 97210 - DNA, 520 bp, Cannabis sativa
ggttgggtcaaatataatgaatgaagttttgaaaatggtgggggggtcatggcccctataacttaatatatacctccgtccctggtagctgttgcgttgtcttactttaatcaatagaaggatggtcatgaactttcaactaacactttggtttccaacgcgcttgtattagtgtagagcattggtcgactccaagtgttgatacgattaaaatcaatgtaaatatctctgtcatttctggagcgaaattttttgggattggatggcttgctcgtaaccatcatggtaatgtgtaatttcattcttcgaaacagatacttgggggagttcaaccagttgtggttgaggcaattgctttaaaggaagcgctaagttgaatcaaacaacagggattctcacgcgcagtggttgtgtcagactgcaagagtgttattgatgttcttcatagttcaggtcatacgatctctttcgggtttaattatttattgtcgttttttagtttttgtgatcaataatattt

SEQ ID NO: 97211 - DNA, 650 bp, Cannabis sativa
acactaataataatacactaaacatcatttatttcctctagtatttttctaaattaaattctagctttcaattacaaagaggtgtcaacataggcgtcaaaggaggtgagaactattgtaatattcattctcgtcctcatcaattattattatttccactaattataatcataacactcttgttaaatgatattcgtttgatcatgattacttaattaattcattggtttcccaccaagtgtgtaaattaattatgtttactcacatgatttgcaaccgagaagtatgtcatcagtggtggtgaagacgctagggagttttgtggggggattttattcagacaaatccaaataatttactagtaaatggagggattactagtaatgtagggtcttcaatatgcaatgagtgattgcgagcttgtggatcttgagcttacggggtatccattaatttacacgagaaaagggaagagggactgctcaattgggttgaagtaagattaattggataaagcattagtctcttattctcggttgagattttttcgtggggctaagttgtataatattgaagtttcttcaagtgatcatactcctattttcatagttcctgctgttgaaacacgaatttctttgagttatagtttt

SEQ ID NO: 97212 - DNA, 501 bp, Cannabis sativa
gtaatgggttttatttagggcacaaaatccaacaatatattctttgaatgcaaaactaggaagtgtttgagtcggtttagaaccaatatataatttcacccgttctcatttgcatcggttgaattgtgtttggggtagtcaacattataatcttctagtgttcttattgatgactgcatatatatatatataaatatatatatatatatatatcacgctgtaccagtacgtaagtactctagctatatattcttttccctgtattcaagtaataagggtggccgtccaatagaacttggatataatctttcctttctatccttatcattccacgaaaggattgattctttacctcataaaaaaattatacattggaacattataagaaaaaataaaaactttttcttggtaggcatattgtagaaaaggatccatacatacaaatgttcttctttttagtagtcagaaaggaataagaaccttcctttattaattccaaaa

SEQ ID NO: 97213 - DNA, 2285 bp, Cannabis sativa
  modified_base (291)..(292): a, c, t, g, unknown or other
atctaggacccagacccggacttggactcaagacccagacccgagactcaaacctggacccggacccggacctgggacccggacctggtcctgaccccggacccggacccggtcttggacccggacctagactcgggatccgggactcggactccgacccggacttggaacccgagacccgtacccgtagttggtgttgagatcgaatgtattaaaaatatattataattttacacaatcaattaatacaagtcaatatcaaatattgtattgtattaaataatattaatnnaatacaatataatacaatacattacaataaggcataccaaacgagccgtatagaagttatataatattcttatcttcacgtaatgcattaattaagcgttataaattaacaaaaagatgaattagaatagatatgcataataattttgctgtgatatatattttagttcatcttttttagtctcataattgctttcactcaattgtttttttagttgcacaatttgattttgaaagagtatactactattaatattttctttagtaatttgggttatattaatttgctatacattaattcttaagaaatactattttaccatttaatattttttagattataaaaattcttctatatttcaatcttctaaggtacaacttagaaagaaaaagaaaaaaacagattctaaccatattaaagtcaatgtagaatgtaatcaatattaagtagattaagaacacggtacatgttaagaggttcaattccattatttggtaataaattactctttttttttttattatatttaacttttgaataaagaagtaaaaataacttgatctctcttgaaagtttacagagaaaatgagcagcacaataactgttttaaacaaataatttcggatccttaattttacaataaaattgctccttaatttataagagaagtttacaatagaaatagatttctcaaaaatccgttaacccacgaaaataaaaaatatatgaaaattcctttaaattaggattcgattacatataaaatggaaaactatatcgaattgtatgagattcagaccatttctctccgaccagatcaacctatgcttattctatgcagtaaattatacttggttcgtctgctattacatcagtcctagtacatgccttgagcagggcatttcgtcaaactctttctccacccatgccttaatatgatgatacgtgtcacccgaaggaacgtgccacatcattcgaataaaattcaggataacagaagtattttttaaaagtgatgctttgattaaggaagggttgctttggtggatgtcttggatcagccataagaccatccgtggatcaactcttctcattttattttgacaggtttaaaagtacagcaattaatgaagccatatgcccatgaatgagatcatgcaattaataagccatattactatgatttgttgggctttatgaagagcaaaggaatgatgttttgtagaatggtaagggtcttgctagatcagtagtgtcatctgcgttaacttatttttatcaatggaaaagtgcaaattcagaatctcattcggtgtcatttcatcctctgatgttgtggttgaagtgcactggaaatcaccttgtgttaatacggtgaaaatcaatgtagaccctttggtgtaggatggcttgctctagattcagaaggaagcttgctttttgcttcagctgattacaaacaaggcattgtggatctagcagtggcagaggcaattaggttaaaagaagctttaggttggttgaaatataaagattttccacatgttgtcattgaattaaattgtcaccagcgacattcaggatttttactttgtgggagcttatttatcattataaaatatttatacttatattataatcactcttactagatttatttaattttgtgggggcatttttattattttggtttataattatcaaattaaaaaaaatatttttgttagtgggggctatagcccccacattgttaggagtaggtacgttcctgattgtcacactacaagaatcgatacttttccaacatatttttacgctagtaaaagttgggtattatgctaataaaatagaatcttctttgtctatgcattgttccactggcaaaagaggtcagtgttagacatttatatgtataaactgaaatatatatgtttatgtataaaatgcggaattaaatcaaacatatatacactatgaataaggatcgaaatac

SEQ ID NO: 97214 - DNA, 855 bp, Cannabis sativa
  modified_base (380)..(380): a, c, t, g, unknown or other
gagaataagttcagaaggcatcaagtcacaaaacccagaagacaactggggcatgatactgttggagaacttgattcggaagcctcaagattaaagagaaaagataattccaaaaggctacccaaggataagaaacctaacaagtatatccctctttatgctaaacataccgacctcaatgaaacttggagaaatatctacctcgcacatgtacaagaagccagttttagtgagccaagacctatgaaacatgcgaggcataagagggatccaatcaagcggtgtgaatatcatggggatattggtcataccacggaagaatgtcgtgagctgaaagatgagataaaaccactagcagccaaagacaaaaccaggattanttcacctggaaccccgggatatgtcagggattgaccctggatattgaaacaattgagggagtatgtgaggaattgaccctaaacatcaaaacccgttttatcgaaaccagatgcttctggaagattgataaaataaacgattgagctggggaagttcttatgagattaatggttgtaaatcacattgttgatgaaatattttgaacttcagttgtgaataaaataatcatttctttcaaacaagtaattataaagcgtaaaccctttaaaattatttgaggggcatatatgtatgatcaaccgaaattaatctagaaatatatagtacaatgcaaacccatcatttcaaaaaataatttcttttttgaaaactttttaagggcctcaaccaaacctatttgacggaaaaagggtcgaagtgttataactccctgaccaaacctttttgacggaaaaggggtcgaatcgttataac

SEQ ID NO: 97215 - DNA, 537 bp, Cannabis sativa
tgaaaatatatgagcctaagacgaattagattttgggaccctaagaaatatatataaaaaaaaaaataaaaagtgctatgggatttgaacccatgagtataatatgtcatacgcgtcaaccaactaacttatgagcatttgttgtttataatacacttaattttactttaataaaagtttaatgaaattttttaattttttattttgggcctccaaaaagtgtgggctctaagtacgggcctagcccgcctatacctagagttggccctgcttggcatctctctctttacgttgatgatgtgagtgtaacacttagaaatttaactaagtgatgggtccatgagaggtaagttttgttgtttagacttagtagggacttcctctttaatcccctttggtagtcactccattgcaacatatatactcttaagtattattgttcatttgtatggagcaagtagtattagatggtgactaaagtagtgagagagagagagagagagagtacatgattgagattgagtggaggccgacgtt

SEQ ID NO: 97216 - DNA, 524 bp, Cannabis sativa
aaaactaattagtgatgagtggagtagctcatgttcttatatataactcaatattctactatttattccatgtaggacaatgtccacaataatgtataatttttttaattataagtaaaatcgtgtagagtctaatgtgcattagtgctacagtccttattgtaattaggtaactacctaccattttgtatcttattcttatttttgttatcaacactatattgagaattatatttttctgtaaatttataaaaaaaaaaaaatcgtattataaataggaaagaagaaaaacaatttgtaaatcttcaatagattatgggatttttaaaccatatactgaaatttctaacttttttactgtgaggtggaatttttttaaaaaatactaagttttttttttcaaaaatattgtgtaagttttgtactgtgttaagttttccatgttatttcacggttgttttataaaaagatagtatttttgtaaaaaattccatgtggcagtaaaattgtaaatttttactcaa

SEQ ID NO: 97217 - DNA, 852 bp, Cannabis sativa
ctacgagtagaatccagtacaggttgagctgacccacctgcgattgataaaaacagacattagtgactgaacaaggtgataaaaatatacactaagtattaggatacacgacatactagtttgacgattgaagtccgtcctaactcctggtactttaaatgcgtagaacaatttcaatttccaatctcccatattggaaaccgtaccttctaccccattaatcttaaagtttctccatttgcaaaaataataaaagccattttcattgccaacactatttatatcgtagaaatagctaaagtcctccatcgttggctttccatggacatattccatgtacatcacataaaaccccaaaattaggcaataactatttggagttagttgaaaacgggagacattgtaatgtctgaggatagcttgtacaaacagatgaaaaggcagtgttaccccacattgcataatggaaatcgagaccaccatgtcttgcgtagggatgatctcagggttagtaaatggaaggtgaggccactgagatgttgaaggacgtaaagtcctatatgaatcaaatttagctccgcaaacgtatgtaggtctgattttgtgactcgcgagaccagatccttgcatgaaaattgttcattcagttgagtgttttcaactgaatccgtctcacttccatcagcatctcccccttcctcaaagtcgtggtcaggtacctcgaagtcttcccccgtttcttcaacctcgatgttaggggcatgcctcgaatgaacgagataatcctgggttgacaccgtggattccctgccgcaaatttcaaccgttactagttcagcgagttcctaaacc

SEQ ID NO: 97218 - DNA, 660 bp, Cannabis sativa
tggtgagaaatattggcatgtgaatttaactattaataagcgaccagagtataagttttcttctggatgggctgcatttgcaagagacaactctcttcagaaaactgatgtttgcatctttgagctgattaacaagaatcaagctaagatcaaagttaccatatttagacaaagtgaaagtagtatggctcaacaataaactcttgtaattataccaaattttctacttatacaatttaccccaactgaaggggttttatttttttataactgacccttaatcaatatgaggactaaaatggttgctaattaatgtacatgttattagtgttttgttaatttgtaattaattctcttaagccatgcctatttgatttctaaagttcactttaaaggatactttaaaccaacaagaagattacatcttttaaaggggtgttctctatgcattagaaattataaggaagcttatgaacaaatgttaattaactcatatggcaaaccacaagaagtgatgatgatatgaatctattcttattgtattgagatatgtaagagcaaaatcaaactaatatagaatgtcttcaagagtgataataattgagctgagatgagggaagaagcggatatatagtcatattttcaaccctacaagcaatc

SEQ ID NO: 97219 - DNA, 911 bp, Cannabis sativa
gaggaccggtaccagaagtacctcttccggagggaacatgagctagcttacaccaaagcccatgcttccgctggaaggactcttcgtctggaggctggaccaggttaggtgccttctaggcccaagccgctggccccggttcccaacacaggagctcccgacgccagtacgtccggctctcgtaagtcccctttaacaattcattatgtcccctctgtccaagagtataaccgacgtaggcctataggatttgatgagcgcctttgtaagtttataatgccttccacttggtggggggatcatgccaaagacttttatttttcccacttgggccatttcttaggccgatcccggataggctctggacctcctgcacccattcccttggatcattcagcctacttgtcctccagctggtttctcccttcggacagctttcttggggatgacgaagttagcactgtagttcaagactttgctagggctgagttagagagtcagggtaggattagctttatcgctttgctgtcgggtgcatgccttcttatagttattctaacacttcgtttatttctttgttgcagcagccaagtccatggaagatctcctggcgactctagccgaagcctacagcctggactcttctctacctccgcctccatcccaactggtgaccctcgggaggtcgtcttctagtgcccccttaggcacaatcgtcttgatagatgaggaaagggaagtcgaggaggaggaggagggcgagattgcggcttcccttgatcgtaagcggaaggggaagatggtcgaggccaagacttccaagaggcccaggaggagggacactccggctgttagcaccgactcagggattccttcggaagcggaggcgtacatgttgggttttatgccct

SEQ ID NO: 97220 - DNA, 873 bp, Cannabis sativa
ttttttgcgatttcagagagaggaagagagattggggtccgatggtcggaccatagggtccgattggtccgaccatcggactgggggaatttttttttttttaattgtgcaataaccaaattgaacttgtttcttgggattcaaatttttctcatttttgctaaaaggatggaataagttagaaaatgcaaatattagttaagtagaagaaattttggaaaagaaaaaagtattgattccataaaataaaataaataaatgaaaaaaagggacatatatgatataatataaatatatatgtaaaaatatgtataaagaaaaccacctaaaaaacattgttggaaggcaaattggcctcttctcaagggttatgatcatcatcatcttcttccaatgtatttcattccaaccacagccatttacaacccaacccaacccaactcaactccctacacttcttcatttcccaaatgagactcaaaacatttacaacaaatttaacgactttttaaaaattaaataaataaaaatcaccaaaaaaaaaaaaagaaaatagtaatatctaaaaatatttcataaaaccatggctgccttttgtctgtactcatatcatcatcatcaccaccaccaatcacctagaagggtgttgttccgaggcttggccactcagtgaagggttcgatgaattcgaagggagtgacccgttatcttgagaaggtgttccgccccatttcagctccacatctgatggctccactacatgtaccgagccgtctgtcattcccagtgcaacttggttaggctcagacgggtgagctgcaatgactacaggatagaccgagctgttgctgctacacaagtagaaagaacaag

SEQ ID NO: 97221 - DNA, 779 bp, Cannabis sativa
aagctagagcctgcttccagtgtggggtaagtgggccatttgaaaagaaattatccacagttacaatgaccaaaatagaagaaagatgacactttgattcatgttcgagagttcgcgttgacacaggtagaggccgatgttggtccttccaccgtgacgagtcagcttttttattgatgataccttgttgactgttttaaattgattctggagtaatacattcttatgtgttgagtatagcgattggaaatttgtataaacttagagatgttgtaccaagaggttctggtaccttactgcctagtggagaattggttatctccaataggtgggttaggtcccttccgctgtttgtaagggaaggggattatcagttgatttgattgaatttagagaattttgatgttatactggaaatggactagcttgcaaagtatgatgtaactatcgatggtaaaagggatgatggtaacttttgaaccagatggagaggacccatttatgttaatgggtaaggtttaaggatcatgaattctattaatctcaaagtttaaggaaagagatttgttgtgagatggatgggtcagtttcttagctagtgaggtaaatgttatgaagaatacctatgggaccggaacatgttctagtggtctgaagatttctgaatgtttttccaggggagttactagggttactaccaaagtgggagattgactttaaaattgatatggtacctggggcaaagtctgtatcttaatttcgtatcagatggtacttgt

SEQ ID NO: 97222 - DNA, 673 bp, Cannabis sativa
ccaaaagagttctcattgataatgggagcttagctaacgttttatttcttgatgccatcagggaaatgggacttgacggaagttcaataattagaaagcctacagttttaattggtttcagtggggagcagaagtacacaatcggggaaatcattctacctgtgtacgctgagggcgtgaatgagaaaactagattcctagtgatcgacacccttcagcctacaatgtaatcctcggtcgaccttgaatccatgccatgcatgttgtaccatgcacttaccatcaagtcatcaggttcccgacaaaatggggtatcaaagaaatctagggagttcaaaaaattgcaagagattgttaccagaatacactcaaggaaaagtcaatgaccatgtagcaactactgccagaagttttgcaccctacacttgacgagccacaaatggaggacctcgatgaaatacagatcaacccagataacttggagcataaagtacaaatatgcacaaaacttactccagaatacagagccagactcatacaattcctaataaaacatcgagattgatttgcatggtcacatgaagatatgtgttaggttatttttagtattaattttatattaattttagtatatttttaatttagtttaaatcgtgtttggagcatttttacg

SEQ ID NO: 97223 - DNA, 525 bp, Cannabis sativa
agtcgagaagggtaatagtagtttggatgtttatgtagatgaaggtaatcaagaattgggctcaaaaaacgggcctctggtgggtgctgggatctagacccaccgtccattatgagtattcttagctggaattgccgtgggcttgggaacccatgggcttatcaattccttgtcgatcttattatccagaagaaacccaattttttatttttttatttttttgtgtgaaactctttgtcggaaggacaggttggaaaggctacgggttgcggtggatggtttcaactaagctttgtctgactgtgatcttgttgatatggagttaatcgggtatccttatacttgggagcgtgggagaggcactgattcatgggttgaagttcatcttgatcaagccctcgtttgttccagctggttccaaaggtttcgtatggctcagcttcataatttggaagtttcaatctctgatcattgcccgctacttctggaatcgacagtgcattttgttacggtgccgtttcgtca

SEQ ID NO: 97224 - DNA, 530 bp, Cannabis sativa
ccatttatatcaaacaattaattaaaaatctaacacggaaaaaccagttatgtaaagcaaacaaattaaaaattgttacgtgacacactaaaactaatttcttataaactagcagatagaaaccacctgaaacttaaaactcaattacgtaaaacaattaaattaaaaaataacaaatgaaaatcagttacctaaaacaactaagtcataatgtgaaactaaaaaattaattacataatatatactacaaaactaaaaattaaacatagaaacttactacttaatacaccaaactaaaaaactaaaacaaagacaagacactcacaaaaaataaaatacaaaaaccaaacttaaaaaaaaaaacatcccacaatagatttcttaacaaatgacttccaaaattaaattacagaaattagttatataaaacaaccaattaaaaatctgataaaaaaaactaattacgtaaaataactaaattaaaaagtaacactcgtatagaaaccaaacaactaaatcaaaaattaaaa

SEQ ID NO: 97225 - DNA, 676 bp, Cannabis sativa
atttaagtgtattataagcaataatattcatagcttagatggttgaagtggatgtccaagtcatgggttcaaatctcataacactcttttttttgatattttttaatacatttttgaggcctcaaaatttaattcgtcttgggtccatataattttagaaccggccctgggttatctttaatggtacagcaatccatttgattgcttaaaagatccaacgtgtaatattgagtcaattagaatatacaataataaatccaactgtaatttttatatttgaagctaatattaatttaattctaaaatagaatattaaaaaataaataaataaaaaagaagtttattagcaatatatatggtgtaacacattaacatcgctcttggcaagaactaacgaaatgttatcgaatattttttcattttcttttgtatatatatatatggcctactgaaagggattatttgaaaatgttttaaatgacacaaaactagttataatgaaacatcaaacaagtggtctgattgaagcctgagaaaaatctagtgaacagaaaatataacatgtgggttccctacatacaactcaattatatatgaaaattggtcatgaatactagtgatgattttgacacatttcttcttttcttattttgtttaattaatggtatacaataat

SEQ ID NO: 97226 - DNA, 633 bp, Cannabis sativa
  modified_base (571)..(575): a, c, t, g, unknown or other
ttagaaagatataacagtaagtttatgataacattgactagagaatttgtggagtgttgatttattctcattttttggttgtggagtatgaattaaacttcttgcaaatcaaaagattcagatcgagatgtaagattgacaataacaacttcgtattcaaattcaagataggattaaatcttcatcatagattggtcggccagaagcagctagatcatctccaaactattagcctttcttggtgtattcgagatatcctcgaatctgaagtagtcaagctctggatcttgtgatgaataattgattgaaggtgttccagaactcagcagaggtttgacaatttatgacatatccatcactttggttggctcattaagcttataaaattttgttcaccaacaagaaccctttggcgaagatgacggttattcatgcagtcaaccaatagcaactcttcacaatattccacattgaactattatatatgatgccaaataaagctatcttaggtgggtgtgtatgttgaaagtcctgggttcgagtcccaagtaaaacatgattgtaatatatnnnnncttaaataaaaaaaaaataataaagctatcttagcaaatgagacaacatcatctgctt

SEQ ID NO: 97227 - DNA, 857 bp, Cannabis sativa
atctcaatagttcggggggaatttttaacagccaaaaaagttcagggggcacaatttggtacatgtcaaagttcaggggggaaattactaattagccttctactaatgcgcatataatgatcaatattaattttatcactaataatctgctaattttcatgtctaaatatgcgatcattaccattatttctcgttaaaagaatttcgtcctcgaagtctaatctgaacaactctagatactgagccctcatatcgaactctaactcccaggtggcttccttcaccttactgtttctccaaagtactttgaccaaaactatggtcttatttcgaaggaccttattgttagggtttatgttctaaaagtaagtatttaatggataatatattatagaatatatgaaatacaattataagataaataaatatattaattatagaagtttaattaataaatgtatgaaaatttcatatttatatagagaaggtatgatcttgtaaagtaatataagagaattaagatcatacaatatgaataaaataagtcggtagtgtattaaagtgttaaatctttaatacagaattaccaagtacaatttactatgcgctatactagtgtgtgtgattttgattcggatcacatatgtggatagacgtatggtaaaagtactgtgtataatttgattatacatgactcgactgatataaaataacatctttcattaacatatcgtttatcatgaaagagttattcatatcataacgatagtcattagtaaatcagtctgaatcctaagtatacatgaactcccatttatgttcattgagttttttgattcatttgttaaagtttctca

SEQ ID NO: 97228 - DNA, 547 bp, Cannabis sativa
cttcatgttcataaacagcaaaacctagtttttcaaattagcagatcatacaaaaatttcactgagtttgttaaaattggatgacaaaaagaaaaaataaccttactataaaactataaccaaataaatacaatagagaaagagagtaagaaataacaatagtaatgatagcaaacaagaaagaaggaaaaaagaatagtatgagtttccttcgcaacttttttcactaaaaagaaaaaaaatcttaatcaaacaaatgaaaaaggacaaagagaccactagtttggcctcccccgatatatattgcaagcctcacttaaggcggaggaaaaccatagtaaacaaaacaggaagtaaaaataaaaaacgaaaaaaaactgtagaaaaaactgtgacagcagtcacaaaatcccaggttgatattaatttgtatcaatttgatattaaaaaataaaaaataaataaacataaattgacgatttcaccaaaagtcaactaatttttgtaattctccttcaggaacaaaaacagcccatttataataagt

SEQ ID NO: 97229 - DNA, 501 bp, Cannabis sativa
  modified_base (34)..(34): a, c, t, g, unknown or other
tttttttttttaaagggcccaattttaaaatttngcacaaggccccaaaatgcttgggccggccctgctcctaacaacttctctactctatctattttcttaataaaattctattttctttattttacaatataccatataccaatttttttaaaatacatcaccaaaactttatttttttaaattttaatatattttatttatttaaaatatataatattaatatatacacatatcctcatacaaaaataattattaaaactcaaaccaattaataaaatatgtttagatcaataaataagattttacaaatgtagagcatgaataataaattttaaaaaaactttaaattaaaaaaaaaaaaaaacatgtttttagtacagttctttcaaatttttaaaacttcaaactattgcgagtactcttaataagttttatctattaagtatgtaattactataacacataaaaataatagttatctttaatttattttaatcc

SEQ ID NO: 97230 - DNA, 554 bp, Cannabis sativa
ttttttgccgctttagtatatacatgaaaaaattccttaattttttgtgtgtgcgtgtgatttgaatctggaaaataagttacggtggcggcgtgtaatggtgtttttgatggtaatggttaggtgaaatggttgtggtgataattgtatgaagaatgaagaagaatagtagtaaccgaaaaaaaaaatgaaaactataatcttttagaatgaaaaaaaaaacaaatagtttgtgttttttttgaaaaaaataatttatctaattatgccacatacatgtgaacaattataaaaaggataaaaaaaatatggggtgagagaggctcgaactctcgacctcaggatcactctaagctatgagacctacgcgctagccaactgcgccaccaccccttctgttgtcataggataaccattttcatagatccatacatactaaagtttctttagtgtttggacttaaatgaaagattttaatgtataaagaaatcccctataaaaaagaaacaaaaatccttttatatgttattgcatgcattatgacttaaaactaa

SEQ ID NO: 97231 - DNA, 1017 bp, Cannabis sativa
tcctcatagagctcgtaatgctcagctccagtcggatatatcttcttctcaacttgctcacccacaccaccacctttctgatttcttctcttcttcttctccatacaattgatcatattcacttaatttagagaatactataaaaaaaaaatatatacacgacttggcaaaacatataattgatgatttgctaaattggtaagcccaatgttaaaattaaacccaaatgaaacaagaaaagtggcaaaaatgaacaaaatcattaaaatcgacgagtcaatgcgcttaattatctcacaggatttatataggaatctaacaattccatctttctggttaaatgttgcaaagatctcagcatctccgatctgcaaattgacaaaaaaaaaatgtcagctatatgaattttgaatttgctataccatttaaaatctatgatagaatttacactaacacagaaattcatccataatagcaatagagaaaaagatcccttggctgatattctccatttccccctcctacattttgatattctcttatattatcttccctgaaaaacttaactctaattcttttccttctatctacggagcatccattgaaacaagctaaacacaaacataaaaatttgaaaaatttgaacaaaataacaattatcatcacctcaaatttgaacaccgacatccacctgtatatatagatgtgactacgttgctactcaaactataaatacattagcttcaaatattgtaaattaagaattacaagagcagactttaaagataacaattatctattgcaaagtaaaatagttgcaattagagaagtcacatgatcaagaaatgcattgtacggactcatgactcaacattcacttgtcaatttaccctagatagtagggattgcagcaaccaaaacaggtccaagaccacgatcctggtgctctggctgccagcaaacaatgaaagcttaaacatcaagattaacacgaggcctccgcttcttactcagaaa

SEQ ID NO: 97232 - DNA, 608 bp, Cannabis sativa
ttcatcttaaggtaaggaactcaattttcttttcaaattgcaaggatctttgtcgggccacggaaagacaatggccaatatgggagcttgttgctttgtttattgttttttttttctagtcttgatgttttagattataatttttttttgaatttctagagatgacaataattttgcggatgtcttagcctcttggactagaagctactttagtagttctccttttttgggagctaacgcctatattattgacaaactataaagtttattagttttaataaagttttcctttagcaaaagagcattgttattgggtattagtggtgcctagcacattctaaatgtatcgcgttgcgattgactattgatattctcttaaaaattattacattaaactatatatgagatttgataaccaatagccaagaaaaagtaataaaggttaaagttaccatcaattaaacttaagtgacatatcgccaccaagtctaaccccattgcctaaacaaatgcaccttatgtgttgtccccaaaaaaaatggttaaatatataaagtataatgcgcacgttagcattgagacggttgatcttcttccctttagataaa

SEQ ID NO: 97233 - DNA, 763 bp, Cannabis sativa
atgattgtcaatctcttttatcatctattcattttcttaaaattcattttgtaaaacgttcagcaaaccgactagcacatgcaattgctaggatgtctcggtctttatcggaacgtaacatttgtgtgtccaacgctccaacaactatgctggatatcatgtattttgaatgctaaatttaatgaagttctcatttcaaaaaaaaaaaaaaaaaaaaaaaaaaaaaactttaaggcattacttatttgagtaattccatcaagaaaagaaatatttatttagttatgggatttataccatgtttagacaggttaccaattatattttacatttttaagtaattgattttgaagtataattaggattaggggtagcaaaacgtgtcattgtgtcgtgttcgtgtcatattttacgtgactcacttctatatttcgtgtcagatgtgtcgattcgttttttgactcgtgtctaattttttcaattctaacccgacccgtaaaaaattatatcgtgtttgtgtcggcccattgtgacccattttaccattattgaaactggagttataaaaaaaaattatagatttaaattcaattagaaaacttatatacatttatttatatataataataaaaataaattttttaaaatacttataatttcatgtaaaatatttaaatttaaaatgatttaacttaacattgaatcactaaatatatatttttatataattatattattattattaattttttattttattata

SEQ ID NO: 97234 - DNA, 516 bp, Cannabis sativa
atatttaagttgtgtgtttagtgatagatgtcttgataaatttaaatattggctaaatcggaaggtagaaagtaaatctttgtacaagttgttgagatggatattcagtgctaaattgaacaggttttgaaattaagtgttttcgacaataatggtgggttttatttatcaaatttgggtcaataaaaataattgttattgaaatcaaaatatacaaactatagatgtttgtgtatagaaagtatcaaaataagaatatatgagttagttaggatcatgtgctatgttagttaattagttaaatgtgtctgtttgtacagtttgttgtaactaatttctgttacttcatcatatcagcccagttgatataaatagttgtaatcccttcattttcaaactaatgagaaaaacactcttcctctccaattttctttctctctatttttctattcattttgtaatatggtatcagagcaaccatatttgtgtgacgctcttcttctttgattgtttgtg

SEQ ID NO: 97235 - DNA, 652 bp, Cannabis sativa
cttctaaacaaaagattcttttctctgaattgattaaatgggttcctccattggttacacatgtcttatattcaacttaggaatactagcaaatttaactcatattgtcaattctctaatctgtctaccccatcagatgagttaccactaactaacaaacatgcacagtctattcagatcttttgatgtcttctcattgagtgtacaatgtttaatatcgatatcaattgaaacagtaattataatattgcccataaaattataacttgagtcagtcgaaggaccgatacctgagtccccttgagtcataactagcacttgagcaagacccataaacttttttcctttaacatcagtctttcttaactgtaggtaggttcttttcagatgacctactaccccacaataaaacaaaatctggctctacattggtttatatggcatcttttacatttgggacactcaagatagggtcaccatttctcgttctcaccttgaccgctctcctggtcaccctgatacttttgttccgtcccataattggtagtttatttagtttttgcttcctaatctgcttgtaagttagttccataagtttcaccacatttagtggcacaataggaagtgtcggttgtaacaccctaactaacat

SEQ ID NO: 97236 - DNA, 822 bp, Cannabis sativa
aattattataaaaaataattaattttttttaaaagtaatttaaaataataaaaataaataaataaataatttttctttttctttttcttcttctctttcttcttccgtttctttcttcttcctcttactccaaccgaccaaacccaaaacacccaaactccaccccaaattcaaagctaaaactcaaaatacaaagaagacccaaataacaatgatttgtaaaaatattttaggtctcatttgttatgtaattaaatcgaatagaaagtatatcgaaaaatgcaaataattaaatcgatcccacaagaattataactgagtaccaaataattaaatcgatcctattctcgtattatatcgaaatctatgtctattcactatagtataataacactcacttattatattttacattgaaatctcaaaacatttaattggtgatcaaataattaaaaataattaagtacgaataaaatagatgcgcataaaaaagtagagaagaactaaatcatattataactaaaataaagtgtcaaacaatctccattaacaacttagtaaaaatcaagctactgataatcattgaaaacattcgataacaattaagtaagaacataagaaaaatagaagaaactaaagaactcttcaaaaaataaatgttgaaagtctttagagtcgttttttgtttctaaattttgtactccttaatcgtttaaatgttaaaaaataatttttatattgctaaaaaagataaaaaaaatatatatttatatatattaagaaaaataaaatatttaaataaattaattataataaaataaa

SEQ ID NO: 97237 - DNA, 802 bp, Cannabis sativa
aatggtctttgcttggctttgaaatacagactcttgtgtaccatcgccctctaccatctgatcgatgtccatctcaaaacaaagaagggatttacccttattaatggacttgaaatattcctcttccgtgggctaggtacttatttacgaccaactacaaaacaaaaaaacaatcataaattaaaaactgccaaaaaatgtcgtaaaatatatcataatttaattgcaaacaaatcataaaatgtcgtgaaatcgtcaagaacatgtcgtcaaaacaggggcagcattttaaaagaaatatatatatccaaatcgcgaatgacatcacaaactgtcgcgatacaagttgttaattgaaaagcaagcatttacgagaaatatacataaaattatcgcaaatgaaatcacataatatagcaaaacaagtcacgaaacaaaagtcaagtttttaaaaatgtgttatactcaataaatcgcgaatgaaatcgtaaggcgtcacaaaacaaatcgcaaataactaatttaacttttaaaatagaatttttactgaattaacaaaaaaaaatcttacagaacagaaaagaaacatacccgagtgttgaataatatgcacattggtgtttacctttacgtagtgcaatgggaagatcatcattgagtggcagatctaatgatgaagatgcaagtgcatgacatgaaatgagaggtggaggaggtggatgcctagagtacactacaagaggcttaggaggtggtcgatgtgaaagaattgggggagctatgaccgaggcaggcgaatgaa

SEQ ID NO: 97238 - DNA, 1048 bp, Cannabis sativa
gttaaaattaatggggcttatgagtattataccaccccctgatccttcattgttggacgctcaatcaacatacaaagtccacccttcattctttggtacgttaggatcaattccctcttctgcgatgatggccacttcgctgcttggaaatttgagtatgaaatttgcaagggcttgtcctttgattgctaatttgggtttatacctgatgtcaaactggcttaactctactgaccatttcaacaaccaacccgaggtcttgggttttgctaaaacttgcctcaaagggtagttttttaaaacttcaatgctatgtgcctggaagtaaggtagtaactttcttgatgcaattaccaatgaaaatgccaatttctccatctgcagatagcgggtttcagcttctaaaagatgcttgctgacataatacaccgggtactgcctaccctggtcttcgcgaattagtaccaaactaatcgcgtattcggacactgagaggtaaatggataagatttccccaggcatcggcttggaaagaattgggggctgccccaaatgcgttttgagggcctaaaaagcctcttcacattttttggtccattggaactttttatttcctttcaaaatttgagaaaactctttgcatttgtcagaggaacgtgatataaagtgattcaaagcaacgaatttacctgtaaggctttaaacttcttttggttttgttggagatcgtatttccaccaaagttttgattttgcgacgcttttgtcggacacctcgcacttcggggtcaacgttcaatcgatgatatatgacccgcagtgatatcccaaacatatccgaatgtttccatgtgaaaacttccaggtttttcttgagaaaagtaacaagtttttctcgttgttgaaaagttagtttagaaccaattttcaaaactttattattatcagaaggatcgattggtacctcaattgtatcctccgcggcttgtgtggtgttggtataatcgaggattctcggatccaattctggtttttcttcatgcggtatc

SEQ ID NO: 97239 - DNA, 1019 bp, Cannabis sativa
tgaactcggtttaccaagttcaggttatcagtgctgccctggctgcggtgagtttttgcgattcattcttttcttttcacttatgtcttgtctcaatgtatctgatttcatttttgtttattttcccagattaccgcagagaccggccgcctctccaagaccctgattgatcatgggttcgtcatgttcgaatttgggggcatagacgaggccgtgaagattttgcaggacttctctgccgaaaggagtgcattccgggaggaggcccagcagagggaagctcaagcagaggcgaaacaccgggaggaactgaaggcgaagggtgaggctactgccaaggctaagtgcgagctttgggaagccagggaggccatgaatgagataaccgtcaagttgaatccttggaggagttgcaccaggtggacttgctatcgacagccaacttgacagtggaggtaaaggagctgagggactttaaggaccaagccttgaagaaggctaaaagggatgagctcctgactcccgtcgtctgcaagcactgcgtcaagcgtcttgacgatggcgtctacatggcctggcagtcgaatggccagagcatcaagcttgacttttatcccaaccctgaggaagctctcgttcgcttccgggagaaaaagaagagacttgacgctttgcttgaagaacgccgcatcgattaggccgaccagttcaaccagttcaccactacaactatttttttttctttacatttacagtctcttttcctttttttcagataatttaattattatcttctaaggggagataatttttatggcccgtccccaggcccttattatttttttaggacctgcttctgggtcaagacatcttttatatttacatttaaatatatattttcgcttagatatatattcgccttgattttgcttttactttttgcctattttacatttgtccgtgtggtattccttagtaccccactgagtggcatgaaaacattgtttttaaggcactca

SEQ ID NO: 97240 - DNA, 503 bp, Cannabis sativa
ggtcgttttttctcggtgggggctgaacaaaaaggcatacgacatgtcgtttttttcccaacagaggcaaacgacatgtcgttttctgtcgtccctgtcacccgaaaatcgcacacatgagtttgcgggtctacaacccagattggtgcgacgtggtcgtatataccatctccggccaccaaaaccgatgtcgtttgaggggttttgttccattttcaatcctctatcaatttctaacatatatttcatccattttcacaaaataaacattacccataaaatacaaatctgaaaatgggtttcaccattaatgaacacctccacaacaatgaaaaataaccatccaaaaatatataaacccatttgaaaaagtaaatctcatatttacacaacattaaccatattaatccgaaaaagcaaaaaaaataataaatttcagatttataaaatgggttttttttaaaagaaatggagctcagaaatcaataattttggctctagat

SEQ ID NO: 97241 - DNA, 724 bp, Cannabis sativa
ttacatgtaacacatgcttctactaagtgttaagacttagcaaatgtttaaaagttagttggtgtccatgaacagttgaatccttgagaagtcgttgggaaatgcttgcctgcattaaggactatggtttgcctttgtgtgccatttatgtactaaaacggcaactctatgattaggcgattccattgaataatactgacgtgcgtaccattatcgtttttttaattgaacaaatcaactaaaatcaaataaaatcaaatttaattttaagtggatgagcaaagtattcaagcatacaaaacaggtgtgatatgatttattaaactactatactaattaacaatggtaataatagttggtagtattaaaggatgtgtggtgtggatcatgtttatctactgtacttactgtggtatcatataattctatatttaaataaaagggtatggctcataagtgaccactaatgagtgaaagaacaaaaatgcatcaattttggatataagtttcagttttttttttttttaatatataaataaattaaaatttaagtcactaatcattatatatatgtaataattaggaaacatattaaatattgggtgtaatcataaaagaatttaagatgaatatacagctgagaattaaatgaaattatataaaaaagaacagtctatgattcgttaattgtttattaattcgtgcattttggctcaaccaataa

SEQ ID NO: 97242 - DNA, 711 bp, Cannabis sativa
  modified_base (569)..(575): a, c, t, g, unknown or other
gagatttatttaaataagaaaaattaattcgtatagttaaataatttggtaattgcattataaattataagtttatttttttttttcttttacttatcattacaagtggttttgttggtaaggagaatggtgagctggtatgcgaaggaatatatgtagtacaaagtggtgacaattgtgctggaatacttaaaatgtttggcttggattttgagaccttcacatttatcaatcctaatcttgtttgcaacaacatctttttggatcaatggtcgactagttttcacctgagtgaatcccattttcttagagacaatggaaattttttgacattttgtagattatagtgaatgatttaggaactaacgtagctagaggttgtcgttcccatagagggcaccaaattattgacggtgagaactcttcaataaaacattaagagccaaaagtgacattcaaagatcttaatagaagaacattcaaggataaattttagactcttaaactttcctcttaaaaactattgtctcgttgatattttctccaaaagaagtccccttacaatgacnnnnnnngccctatttatagtgagttctctataattttgaatttcatcagattcccaagtttgagaatgttaggtcactttcacagtaggtaaactagtacttcaggtagcctgttgtctcagacatcttcagttgcaccaaa

SEQ ID NO: 97243 - DNA, 574 bp, Cannabis sativa
ttggttggctcagattaaaacactaaagtctgttgaaagtgtcatgtggtaacatgaagatctatttccaagcacagttttacatctttattttcagctcatattaaaatctagggatagagctacggtttcctctgccattagtgtgtacttttaataaatatggaaggaggtaacttacggacatgtgacctttgcctctttttctaaaaaaaaataaattctgctattgttcaataaaacacatctatattctgcctattgctactgttggtaccagggagtctatcgtttgtgataatacttttgttgatacttttcatcaaagttttgagcaatgtgctacttaaatcaaagaaatacaagtttagaaagaaaaataaatacctaatgagaaaatgttgtttgaacaaaaatggtactattttcagcaatgggtttataggtttatcattaaggattcagtttgttttaatgtttaacattttaatattaatctatgaatatgttttgtatcaaatatggatatgtgtgtttactccagcatgcaatgtgtatttggtttaggtaggag

SEQ ID NO: 97244 - DNA, 660 bp, Cannabis sativa
tgcgagatagagagagagatgatgcagagagagaatgggtttgaattgtgaggggggtatttttggggttttgaaaaaaaatgtcatagtttttttaaggtttaaagtttaggtttaataataaaatttttaattttttaagtatataaaatcaaatttcccttttcaaaataccatataaggtggtgtttggtttaccggaatgtaattgtaatggtaataagaatagtaatagaatgtaatagtaataataatgggaatactattactatgtttggtttattttgtaatgaacattgtaattggaattaaattgactaaaatatccttattttatttatttatttatattttcaaagtgagaaaaagaaaaagtaaaactgtctttttattatttagttgtcattgtaattctcattcatgaaatgtaagagtgtaataaaaattcataggattggtataatgcccattacaatggagttctattacaaaggttagaaacataaaccaaacattctaatggtgactttaattccattacaatcttgattacaatcaatcaaacatgttctagctttttaataaagtgcttaataattttttttcctttaccgccaaatttcagaatcgaccttgtatagcaatatgtccaagagtatt

SEQ ID NO: 97245 - DNA, 1570 bp, Cannabis sativa
gtggaggttgactaagaagatatagttagcactccttactgtaatatatatatatatatatttaatcttgttaagggtactaatttgtaatataaatttgtaaagtcgcacattctttggcgcaagcttcttttatcgaggccgattgtgtttttagcaaaatctttttacctcgcatctcccatccatagttatggttgagttgatttaatgaagttactttattattaaaaaaaaaaaaagaaacaaagaactagtatgtatattacgtgactttgtgtgctaaattgtaatgtataatcaacaatggtgttatttttgtgagattcaacttcgaacaaggcaaaaattgagcctcgttagtatatgtataaaaacaagaatatgtagttaacacactttaacgtatagaagtatttaaaaccagagatttgacaaaaattcaaccaatgatgtgatactaagtttcagggtatcattttaaaataatgtgacaattatttatcgaaaagagtaaatatatattttaattttttatttatttatataataataataaaaaagagtgttatctcatctctctctttggtatttgttcaataatgaaacttggaataagtgccgagatgggttttgtctttttgtgtaatttttacaaaaatgacaaataagtgagccatatgtgaacatgtaagtggacttccaaatagctatatagttcacttgttccaattccaagactattgagtattgagtattaatccactcatttatactatgctatatatatatatatactctagttgtactaacaaaacagattttgattggacacataaacagaactcttccttattcctcaccaaaattattgagcaaaattacaaccaaaaggatggtgtcatgagggttttcttcaaaaaaaaaaaaaaaaaatgaaaaattataggattttaccgtataaactatctagatccgatcaaattatatattgaatattagattttatcattcgatctgatctaattaatttcagtcatccagtttggattggatcgaatctatttgttggatgtatatattttttttagtttaatttaaatttattcaatattttacagctagtattttttagatcggatcggattgaatccattcaatattttaagtgcagtatatattggattggattggatccatccaattcaaaaaaaaataatgttaatttttatatatacatatatgttttacgtataacaataatcagattattaatttgattaaatattggatgtattggatttttagacactccatccaacattcgatccaatccaattggatatttaaaaataatatctaatccgatccgatcataattggatatctaatgtttagcggtcagttgtaattgaatcaatcagttatcattttagatcgatttatgcacaacactaattaagactatcaaaaattaggtcgatcggttgaaaaagatcacaaaattcgcgttattagtagttcattaaatcactagacaagtgacaaacgtatctaatatatttactca

SEQ ID NO: 97246 - DNA, 564 bp, Cannabis sativa
tttttatatagatttatgattataattaattaaattataacattcttattattacagtagaatcttataaatttaaaatactttaaaatttatatttattaaagttcaattttttttctacctgctccatatattttttctcacaattatagttacttttctccgcaatacaagcataccaaactagctttaagttatctgaatttgcgcttattgctgataatttcatcttaaatttttgagtgattccaattataaaaaaaataaaaaaaataaaataaataacacagtaaaaccatcatgaattttccaataaaaaaaaatgaggaacactacttttaactgcacaaaattctctttccccgatgacattgagattagaatcaacggttattattgctcataaacttttcgtacagtcatggtcttttcccctgacattgtaccaggtgaatatattcgctctgcatagagccatattggtaggtaagctttttataaaacgtgttcaacattgttttcttttgaaacactcattataattacgaggctatttattgtgtc

SEQ ID NO: 97247 - DNA, 929 bp, Cannabis sativa
agggtgatccgcgtgctcggtccagctcgagattggtgagtttttagccggccaggccttaaaacatattttttagttcatctaaatgtgcttgcacggatggatgaactagttcagcttcttaaatgacctatgtcacgtcaagatctcttagagttgggttctggatgtggatagctggctgagtggccggttgaacgtattgatcgtccagatttcttcttctatttaaatcattcgggagatcatggcctgtacccaatctattgaattttgaagcactatgtggcctcaatgattggctagtttggccggtaggttagctagaactgtcagtttggatggagttattaggtataactccaccttaagaacggtcaaatagggtctggccatctaccgcttagcccataggttgtgatcgagaattggatgactgaccattatgagtctgggcagtatgcccagcaagaatttattctgtaccgctcagtgggatactaaacgtagcagtcgattgctgatagcaactttataggctttccgtatcagtacggtagcctaccttgtttggtcatcgatggctacttgctgagcctttaatgtttccatctccctatccctccactcaatgaactggcatcactactcttcgaacgtaaggtttattgcagcacatagatcctcttgatcatgatgcaaggtgttagtgtgaccttgcatgagtccaagggcgttacagaggttttgaatctcagtgtcatcccctaccgtcgtctgagcattggttgtggacaggatttcagtgatgtgagtgcttcgattggttgcaaaactggtattcccagtctcttgcacacttggtgtgatcccagccaaaagggaagtcacatcttggcccacagtaggtggctgtgtgttaggctgct

SEQ ID NO: 97248 - DNA, 808 bp, Cannabis sativa
aatcaaacaaaaatcaattgaaaaataattattgtcagtcaccatgtttatatatgctacatattttaatgaattttgttacagtaatctcgtggtgttgggcaatgggtatcacactactccttaacttcttcaacttttttgcaaaattgtcccatttttataaaggcattttgcaaaataatctgtgtaatagttcagaaaatatttggtacctcttaaattatttggataaatttgtttcagagtagaaatgctaatacatactcgtgtaaaataatacgccaggatatgtaagacagtaatacaagatcataattagaaaaataacctgaaatgtaaaatgacattttatttgaagtggaaaaagaaataggtagaaatataagagagtagtagtaccttttcctcctccaagaacttgatgtatgggtctttcacgtccaaaaagccttcccccattagatatctcgttatctgaatctgacattttggtggtgggagaggaagttttatttagatgatgggataatgaggaaaagagaagaagcaaatatatactaggacatcgagttctacgcttggtaatcaagtaagcttgcaccaagtaaggaatggcttgggccttgtctttaaacattactttgcatggaggctacaacagaaatcttgttacaaaatgactgtaattagtgtaaaaagaatagaattccatatcagacatataaatttgagaaaatcaagttaaaaaattacaaaatgctgcaaaaaataaaaaaataaataaaaaaataaataaaaaattaaa

SEQ ID NO: 97249 - DNA, 501 bp, Cannabis sativa
agcattttaacattgctgtcaaactagtaagtgtagcactcaaaccaaaccagcagattctacttcgtggcaaccggagaacaaattaaaaatgaatgtcgatgcggctattcttcaaggagtaaaaattgatattggtgtaatttattcgtgattccaatggacatgttttagctacaatgtcaaaaccagcactaggaaattttaagtcccaggaaatggaggctaaagcaatgttcggtcttcgttgggctgagcaattaattgcatcttcaactagactatgtgattgtttgatgcttgtcaatgcgttaaatggaagaacatcacaatatatattctggatttatgatttggtattcaagatgtttcacattatttatttcatattagacggtgctaactaaccagcttattatggattaattggttaagcaagctttattattggatagtaattgtatttagttagaagatatgccttttactattttttatgtc

SEQ ID NO: 97250 - DNA, 829 bp, Cannabis sativa
  modified_base (29)..(36): a, c, t, g, unknown or other
ctgacttgattggcattctggtcgggttnnnnnnnnttagcgtctttctgagcggggatttgagtatgggctccggacttcatgttcgttgtagttttctgctcgtctgttccccttcttctgtttaggtcgtcccttaggtcaccgtttgttcacaaccttttgaacacaaaagaacctggctaccttagcgattggtttgcttggttgtcaggtggaatggctccattattttgtgtggatccgtcgagcatgactcctcctgatgaatttccagacaagctctgtccgcctacctcttggcccacgagtggaactcgtgaccgaggattggacgactaaccattggttgtctgggaagcattcactgtcgggtcatcctcgttttctccaatgggaatgacgctcggcgcctgctggtctacagtctgataggctctttgtattagcacagtggcttatcgactacgatcctcgatttctgcatggtgagcccttaatgcctccatctctttctccctccattcggcgaacatacgcctctgttcgttgaatgcgaggtttactgcggcacgtaattcttcctgatcgtgatgcaaagtattgttgtgaccgtgcatgagtccaagcgcagcgcggaggttttgcaattcggttgcgtctccgatggtcgtctgggagttgatgcctggtggaacagtcatgttatgaatgtcctagctgtgtgtggaactgttgtttccggtctcttgcacaccatgcacagtttcagtaacaggagttgttctatcattcaccacgcttcccgtctgtccaggattgacagcgg

SEQ ID NO: 97251 - DNA, 637 bp, Cannabis sativa
ttttgggattttgaaaaaagtgtcatatttttcttagtttaaaatgtattggtttaagaataaaatattaaagttttttaagtataaaaaattaaatttctcctttcacaaaaaataactccaaagattttttttttcgtcccaccaaaagataatttacaaaataaataaataaaaatagattagtatcaaatcttttagaatagtaccaaactttccacaagaacatccatcttccaaggtaattttatgaagaaaatttaaaattgactaactctaacaacactcacaataatttctctaaaatagaaaaaatttaaaaatttaaaagaaccgtactaaaaacacgctacaacaaatgctctaaactcattcttcattttaaaagcttttttaaaatttattattcatactttatatttatagaatactattcattgctctaaatatattttattaattattttgagttttaataattatttttgtatagagatatgttatatattaatattatatatttaaaacgagaaatgtattaaaattttaaaaaagtgaagttttggtgaattattttaaagaagctggtgtatggtgtaaagtaaaagcgtgttataaaataaataaataaaaaaaa

SEQ ID NO: 97252 - DNA, 614 bp, Cannabis sativa
taagcaatcaggttcaacttttgatgacatggggagaagacatggagctgttgagttactcaataatggaaacctcaataacttgaaaattgcaattcaagcttcagtacaaagaattatcttctcctctaagttctcaagtatgttctataattaaattcattttatttcatttttatatatgatgttatatattatagctatattagatattttacttatttttgaaaatttttaaataacttatagtgtcaaaaataaaattcaaaataattagtccatgcaagtaaagaaaacaaatttgaatcctattatcgatagtgtaatttatttataattttctgaaaataggtaggttgactaatataattataatgtatttagttattatatcaaaagaatcgggaaataatttcttaggtaccaaaataaaaaaatattgcaatattgatgcatgggagtgaaaatgatgccctagctacctaagatctctttgtgcgtctttttattaattaacaattaaatagaaggaaaaaaaagaatcaacattcaactctttgaattttgttgtgacagttagtagtttcgtgatccgtaaggggaaacaccgggta

SEQ ID NO: 97253 - DNA, 6272 bp, Cannabis sativa
  modified_base (144)..(147): a, c, t, g, unknown or other
tatagctcttacaataatatctctaaatatataattcttagatagccttagcttacagcattttggcttacaattttttggtcccttgcccaatgaacattcctcactatttatagggatggaaacttgaggaggaagagtttnnnntctcgttacaatgcgcataaatagaaagatcgtgtgatcaatgctgaatgcaaggatcgtgggtttgaggcagaatagactgatagtgggatcgtgtgtatgccacatccacgtaaattgatccctgagttgtagggattgagctggtgactcatgatgcgttaagctgaatttgctaagtgtggatcattctgcacggctcgttaagtgttctattctggatatgccagcgaggcatcctgctcggcatattgatccgcacagatgctccaagtaaagtccacgtgtcaccattctcgtgatgccacgtcagagttccaaatttgggataacagttactaacaggtaaaatttctatttttagacttaaattaattatatacttaaacttaaattaatttttcaattaaaatatctaataaaactttttcaaaaattaatatttataatttttttattttttttagaaaaataaaatcagattagtatcaagttataagtaatttattaaatatttttagtaattttttaaattaatcacaatcgtctaatgatgatctaacagttaaaaacaaatgtaatcatcatcgttacatatttgttgtgaccattgaaacttcattcatatatatatatatacaaatcaataatcacaatcaagatgcacaaccctaatcatccaacataagcaaggctagactcatcttctctctatgggttctcactcaattgaagggaatggaggagaagagtggttgagattagccttggggaccaaactcttatgttctttatatgctaaactaattagaatcccataaaccctaattaggtttgcaattggatattatatattacaaaactcatacaaaataaaatttttattgggctcatttaattagatcacttatttagctcaatttagaatatcagctcaaataaattgtcttaatttgtaagcctactttattagattactaaaaataacccaacaccatagacaatcaacgtcgcacttaactctcaaagatggatcaaaatggctaaatgctaacagaacatgagttttgggggttctaccgccaatatttgaattcgcagagttaattgctagcgaagttaagctattagaagtttttccccaatttactcttaattaaataataagttagtaattataaaatacaaaatttcaatataatatatcatttattttagatcatatttagtttctattttattatatataaaggtggtatataattttacgggtgtgctatataattttgttagtatattattattcgtgtttctgtatagaagaaaagtgccacaaggttcaacaagtttttgggctactattggtcccaaaaaggcctacatggtagtctttctcgtttataaagataataatcatgggtcatgtatcttgatcccatgcaacgctccaaattagtcagcttgctggagacaataattatgacaactttcgttactagtctttagtaatcttgaagcagaacccctaatagtcatctagaaatagaagttcaaaaggcatttgggacagcctattgtcccaaagaatacttatgtggcacttctctaacaaaattcgaggaatctggcaacctatcccctctatcagattctagaagcgctcactaaaattggtggttaccttcttatgcaatgcaccaccactttgacattctcatttccaataacggcgcacgacaccagctgtcactatcaatagtaccatgaaccgtatggtagattgctttatggaattgggcctcacctactcgacccaatagcttaagaaaaagctaatttaatgtattttatgccatcagtgggttcttttctacacaaaacgctaaatatggacccaataggcatgactgtctataaatatggcattatcttctccatgcaaagtgttgacaatctaaaaaatacagctttaagctggaaatattccatagctaaaagcttataaaatacctcgtggactaaggctaattaacaccttaaccacgtaaaaaaaatttcatcttctttaaatttatttttctttagctttatttctctaaatatttagttttcgaaaaatctcagttaatattttagtgctttcattcagggctttaaaaatattttcaccattgtttgtcatcaacaaaaatagtggccacgaggaacacggttacacacgtagggttggaaatttgtgacacgacacgatgacacaactcgaaaacaatatgaaataaatgagtttgagtgacacttaatttttgtgtcaaaatctggtcaacacatttattaaatgtgtcatttttgggttaaccgtgcattttcgggtcaacacgcttaactcaaaatgacacgattataacacgtataagaatatatatgtatttttaaatttttatataatgaaaatagaataaaaactctaaaaaacctcataaaaatatttttcttttaattttctttatcaaaataataattataaaataaaactatgaattttgtgagcaatatttgtgtttatatacataattatgttaatcgtgtcaaattcatgtcatgtagtaacatatttaatcgtgtgttaaatgtgtcaattttgagtttgtatcatgacacgtctattaaatgtgatcgtatcgtatcgtatcgtatcgtgcattctgctaagaaattatgtcgtgttcgtatttaggatcttgacacgatcaataatcatgtcgtgtttgtattcatcataaacgtgtcgtgtcataaactttttgacacgaatacaacacgataacacgaattgataggcctagttacacggccaatcggctagatgatcaaaaatgttgcagaaatctccagtattgacactttgaacccttctcctctggctgacgctcaggaagaagttgtaggagaggacgaagcatcggtcgtgggaggtgaccccctctaaaatgtcaatcagcccaaagagcttcgtgaagatgacccaaatgggtattataaagatgagccagaggagtattatgacgtagatgaggaagaagactacactccctttaaggacctagaggtgacgtgtctaaaacaactaccaagaagccaagatggtagaacaagaggaagccacacgttaaataaaacaaattgatgtttcagttgcaaactctgatttcaacaagggttcataacgaggaggttcctccaacaaaccaaaatctaggtcttggaatttagatcaacaccaatctgccagtggctatgggaaagttcgaccatcccagagctgaaccatcaagagcagttaatgataaaggaaaggccatagatgatggtctcaaaagaaaactcatctgtcaaggcctgcacaagtgaatcctaaaagcaaagtggagccaaatctaatttcgaggaagaagatttggaactttatgtcaggagaatttaaccttgttagagcacttctgaatgtcattgattgatctacacgagggaaaaacagaccccacttttcacttgtcctagtacaactgacttatgaaggtcgtgcacgtgaatgatgacgatatatgtttaagtttttcccccactttggctaaatctgctaaagaatgttggaagcagtttcgaccatactcagttcaaaattggcaagaactacaagccatgtttaagaaacagtttgtttccacaagggacttcgatatagagtttattcccctcaagaacatcaagcaatattagaatgaggccctcaaagcttatatcaaacgcttcacgaaagcaacatcgatgacgaaagttagggacgaatagaagataacggcccttcaggcagggatcatagtcggatccctactttggaatgaaatgcagaggaagacatctaattcactttctgacttcctggtaagggcccatatggtatcattaatttggaagcaatcagattttccttgttatgatttctgtctctaactatcactataataaatataggttttaggggcgacaaaaatcgcccctaaagtacagaaattcactcctaataggtattagaggcgaaaagtcacccttaaaatgtcgtctctaaaagtatgcgcataaaagtactattaggggcgacaaaaatgtcgcttctaattaggagcaacaaaagtcatccctaaaaataatcgacaaaaactgacgattacttttagaagtcacccctaaaaaagagagtcagacagtgattttgacttttaaaagttgctcctaatataattaatattataaaaaattatttcaaaatgtttaaatatattttattaataataattaaaatggtataatagtatacttggattgtttttctactcttagccatatgttatttaggaaaaacttaatctatacataccaaaagcaacacacaatatcatttaatttcaaacttaatctatcaagggaaaattaattaaaaatttgctaagttgaataaccattattcaccagcatttcaagaagaaaagaaaaataaacattcagtaccaaaaataaaaacccaaatgggaacttagatttaaaattgaaaataagaacttgaaatctagaaataataagagaaaaaagtagaagagtacgtataacaagtcaatgacatcaatggcctcatgacgcttggcgttcccaactgccaccatcacaggtaatgaagaagccttggactcttggccataatgggttgaaccattctacttcaccaaatttacaagttgagatatataatctatcattccaaaactccccaaaaatagcagaactacgttctatgctaataaacacaacccatgaaccaaaaagatgtcatttaaaaatatgagtaatagattgtttcaatatgtatatatttatatacataaatatatatatatttatatgagtagtagacaaagagagatgccttgccttcccttcttcaacttggaggtgttgtcgatattggactgagttgttcacggcggccgttagaggttgaaaaaaagagagagaacaaagggggatgagggtcatgggattgagactggtggagggccgttcatgggatgggtggctggttttgatgctggatttcaattttttttgttcatggcagagaatgaaaatgagagaaaaagaagaaaagaagagaatgggggctcgaagggaaggctaggtttttttttaaacaaactttgttgctcttaaaagttgttcctaataaataaagtttgtcaaatcacacgtttagagacgacatttgtcgcccctaatgctaatagcgagaaaaattctgccaaaacattttttttttatgaatcaagttaatttcattactccaagaaaatttttacaaaactataccaccctccatctagagtatctaaataatctctattatttacaaagtttcaaaccatattctatctctattggtcactttttttggccaaatacaagaaattcgactctttgtaacattcttgacttgtgctatgattatatcactatttacaactttttttccccaaaaaattgagtttcaggagcaccacaatgcatacaccaaagctgccagtgcagcagccaacactctccttcgaaacttgcttatttaaattttattatgcccctattaattataaaatcgttcctacttgtatacaaattaaataaaattaaattttgttaggcgcgacattgttttctcacccctaatattcctattattagaagcggctttttgttacttctaaatgtgtcgcccttaaaacctaaatatgttttagtgtatcagtctttcaccattggcatttgattccttgtaggatttttcttggtgaatttccaagaatgccctacaccaactcaagtattcagtcaaaaacgacacggacaaaactgtcccagaaaattcaacttaaaccaataccaaacgacaaagaaacactgttgtattcacctgcacaacaaatcgttttaaccaaacgatttgtcgttctgccttgaacaaaactcagtgaaatcagagctaaccctagctcatttcactcattcaaacattcgagagt

SEQ ID NO: 97254 - DNA, 510 bp, Cannabis sativa
atttatatttcaatacaaatgttttctatatatagggtgagtgtgtgtgggaacagagaccacggccgggtggtattctccatctctctctaatttttgtttgttagttttattttaagataaaagttacattttagcccttaagttaataaatttaatatttatgtaaggactatagtgataattttttgacttgttaattattggagtattttttttttaagaaacagtgctaaatcttatgtaaatttatgtggatgagattcgaaaataaaaaaaaaaaaatttgagataatgtgtataactttagcaattataaattgtgtcaacgctctaactataaaatggcgtttgatttaaaggaataaaaaaaaaatgagaatataaatatgaatataaataaaattgaatataattaaatttgaaatgcatacaaagtttgataaaaaaaattattaatttttttttcttattttgtatcttttcatccattttaaaattgaataatca

SEQ ID NO: 97255 - DNA, 540 bp, Cannabis sativa
tttcatttgttgtttataattctactgttcaggttagttttttttattattattgttattataatttttcaatgcaatactaaatagaatgcatgtacaaaacttccattttactttaaaataatgaatttgagaagagcacaattgttaagatacatgattttatggaaaattaatttgtgtaagtgtatttcacttttcactatttctttgctttatcacttcttttcttctctcctaatatttcatatttgagtaaattaattgttggtatttgttttaaaaaaagatgaatcgatgatacaaatgaaattagaggattttctttttaacagattaattaagtatatcttattaggtatttattttgcattctctatcttgctctctcaatctttctcacacatataggtcagggcttgtgcagaagttcaacggaacggtatcttgcacgcacttgagtaagtgttcaaaaatttagttacaatttataaatatatttatatgtactagaagaaaattacgtgcaaggcacgtata

SEQ ID NO: 97256 - DNA, 1182 bp, Cannabis sativa
caattatagtggtcaaatatcatagaaagattttagtgcactatcatagaaagattttagtgcactcccttaaagggatgttttagtagacagtgttttgaaatttagattaattttttagtttatttatttataatcgtgtacgttatagttatttaagattatataaatttttttaaataatttacaataccgaaaataaaatttaaatagttaccacacatataaaaaaataatcacaagtacataaaatatttgaatcttattttcaacaatataaaattttcaaaatgtgagtacatgattataaaaaaaaaattaaattaaaaatctttcttaaatgtcgaaccagaaaataagtctacggaatacccaaagtgttactatagactttcccaataggtcaaagtaggtcaacacaaacacgatacaatatttttacagatcgagttagggttcaaattaaaaattagacacaaataaaaaaaacagaacgacacaccaaacacaaaatatagaaacaaatcacataaaatataacacgaatacgataagataacacgttttgccacccctattcctaatattatatttattataagaagacctttatttttaccaaagtaacatagggagagagggacatagtattgactagttgtcaaattgtgccatagaatgttcttaagccgcctagtaatccgggcatattaaccaatccactcttagtaataataaatcaaattgttttgtttatttactttttaccttattattattctttataactaactaacacatggtttgtttgttgcagaagatatatattcattttttaatcgagtttgatttttattggtaaatttgggtgtttggttttgaattaattagctttaatttaaatgtatatatagtcaaatgacacttattctagaggactacttttatcaatcaagtaaggtgggagaagtgtacttttctactactacaactctctcaactctcaattgtcaaatttagttaccttaatttctctatacatagacatttttggtcaatttgattaattattaataatatgattaagttttggggttatatttattagaattatgagttttactattcttactgaccaattaataattcttagtgtcaaacaaaggaggacacctgagtttt

SEQ ID NO: 97257 - DNA, 682 bp, Cannabis sativa
aaaaatattatttatttcattttcatgatacggtggtaactggttatcactatattaatatatatttttttttcatagttaatgaatattccatattttagaaatttatttccggtactacctatacttttgtggaaatatattttgtttatatttataaaaatttagcttaaatatatcacgttcgttaagctaatctaataaaagtggcagacaaggccctttcattgggcctggtgggtttgggccgtatgattgtagacccagtagaactgcattatcagtttctccttgtgagatagaaggaagtaggaagtctttattcaaaaaaaaaaaaaaaaaaaattgatggcactaagagcatcttctttcaatttttaagggaaaattacactctatactcattttttattccctattttaatttttacctttattttactactctttaatttataccctttgtacatcatatctccattaaacttattttgaaattatatttaattaatgtgtaataacaagaggtagttttcaatttattccaatcttcaatgggagttactcattgagttatttttaacacatgcattgttcttaggattagttttggattaagttgttaagccttggattaggttagttaaaggttgttttgtttgttacaaatcattgttacagc

SEQ ID NO: 97258 - DNA, 579 bp, Cannabis sativa
cgttcaacttcggctttggtgacatacctaaggagaggcatagaaaagctttgtctatacattatcgtgtctaggatcgtgtacctagcaatttttcttctcaatttgtttgcttcatttttttgttctggaaaggctttagtttggaggtaagttgcgataggtgtcattcatgttggagtttcatcaaccatgttgacttcatctaggataataatgatgggttcctcttggaaccgcatgagcaccaatttttctttgccacaaatggtactggttgccatatgggcaagtgcatctgttgtagcgttctgctctctggggatctgcctgattgtgtagacttagagtttacataacaagtccttgatttttctaaattaggctaccattttttcacctcaagctatctattcacctaggacttgactcacaaccagttgagaatttctgaatattttaaggtggttagcacgtccttcatgtgccagcttgaggccagctattaaggcttcgtattcagcctcattgtttgaggctttgaagccaaatttaattgccccgtgtagctattgcccc

SEQ ID NO: 97259 - DNA, 3238 bp, Cannabis sativa
tggagatgcgggggatcgaaccccgtgcctctcgcatgcaaagcgagcgctctaccatttgagctacatcccctattttgtttgttctcacttttaaatttaattatttttaaaacatttaatatatacattttgactttcttataaaactttcccaaaaatggaaatattattaaaaaaacttggaacaattatatgctatagcattgaataagtctatggtgaagatcactaaagaaagtgccacttcatttagaaaattgtggagattttctatcataccaatagaagaattgatatgacaagttaatctattttggccttgcacagcttatttttatatgcattgtgagtaaattaagaattgtataaacttaaaagtcgaactacaaatcctagcaaatattttaattctaatagttaaaaaagagcttataaatgctaagttaaacatgactttttttttactcttacattttctttagtgctagataatttttcattattttttagtgttatcatatttacaacagtattcagaatcaaaataaattgatgaaaataaaagatacaacagtacaatgatccacatccctagccaaaagtagcccatacataaggacatcctatacatataaacacatttgaatttctggtctttgattcattggaaataaaaggtagttacatggattaatcaacataaccaagctttacattagtataataaaagttagttaccaataatcagaacaagaacaagaaccttgcttgaaacaatggaaacggtttcgatctctcacaacaatttctctattgtaaacagtggaaactatcttcatagctgaatgacagtctatgcatatccgtaaattcttgaagatataaagtggtgagccagctcttgtggttaagagcccaaaacacaaagccagtttctcactgtgaaagaacaatgcctgttctatctcctctacctcatcatctgtgttattcttcctagtagtatcacaaccatgaaaaacttgcgaagcggtattgggaacataacccgccaatctcaatcttcgaatcatctcatccaacatggtgtaaacctctgtgatcagtggatggaacttatctcctgcacaaaactgatgaacttggcccttaacataaattgagcttattcctggagcctttcttatacccttgttcttaagaacatgcctaagggaattcgcctggtctcgctttccttctaaagcatacatattcgaaagcaatatatggtactctgtgttatgaggatccaattgaattagctcttttatgacgcgttcacctagctctaactttccatggatactgcaagatccaagaagagaacccagtacaacttcatttggaggcattggcatttttcgaattaaaacctcagcctctgctaaatgacctgccctgcctaagagatccaccatacaggcataatgttctatcttaggccttatgccatatagtaattcaagattatggaagtaatattgaccttctttaacaaggcctgagtggctgcaagcacttaacaatgaagtaaaggttaaatcatctggcttgatttctttaaccatatgaagaaacaagtccaagacagctttacccctaccatgcatagctaacccactaagcatagcattccatgccacaacatttcttattgacatgttctcaaaaactttccttgcagtgtctactctaccacattttgcatacatatcaagcaaagctgtctccaccattatatctaccttcttctccattgttttaagtgcataaacatgaacccacctgcccatcattaaatcccctgacaatgcacaagcagacaatgttgaactaagtgtaacataattcagttccaaaccacaaccgaaaaccatttcaacaagaagcgaaaacccatcacgagtaaatccattggcaatatagccaacaagcatgatagtccaagcaacctcattcttctctggcatcacatcaaacaccattctcccacttccaacacttcccaaactaacctcaccatccaaaattacagtccaagacacaacactcctttcatccatattttcaaacacccttttggcttcactcaacagcctacacttaacatacatatccataacagcattacaaactttaacactagaactcaaaccaatcttctccaaaaaaccatggcttcctttaccaaactcaacattacccaacaaagcacaagtcttgtaaacgcaaaccaaggccacatcatcaactctcacgccttctcttctcatctcaacaaataaacgaagcccattttggggaattccatgaagagcaaagcagcccatcagggcagtccaatcagcagcatctttgtgtgagttgggaatttcatcaaacagttggtgcgcataggtgaaactgccacgagctgcgtaaaggtgaaggagggcgttgccgagaaaagtgtctcggaaggcgaggaggccggtggttatgagaagggcgtgaagtttggtggcgaggtcgggagaggagtgatgacgtgagcattgtcgaataagatgacgtaagcggtgaatagagagtgaagagaaggcatagttgattggccatctcatgaggtttaccaaataccaaaggctgactttgttttatgaaaagtaaaacatagttcagattttgattttaacactatactttgtagcacatcttatgctgagaaattcaaggtaaatttggactaattgtgatttttgttttttaaattttaatatatattaaattatgttttgaattttttaagtcgttaaatttttttttttaacaattgagattggtgaattaaataatttttatttaattttgtttaattttactaatgtggtgattctttagataccaaatcgtatctccgaattttaatatgtattaaattatacccttaaattttaatatgtactaaattgtatttttaaatttttatctacatgacactttagatattgaatgtggcaattttaatattttaaaaaaaaatttcaatgatttaaaaaatttagaagataagatttaatttatgtttttggacaaaaaaaattccattttatccatgttagggtacattgtaagaaaataaattattattgttatataatggtggataaaagaagtaggaaggtgtacaataaaatcagaaaacattattatt

SEQ ID NO: 97260 - DNA, 629 bp, Cannabis sativa
atttgtgtaaaaagaagtctaatttttgtaaaaaaaaaaaagtaaaattttactgtaaatattataattaaatgacttagctcttaaaataattatataaaaattatttataattattaattgttaaaagaggccttgttaaatattcagttaattattttgagaaaataattaattataattaattgattttaaaaaaagaagttttacctattagaaacatgctattataggtaaaagaaaaatgtaaccattgagtagtcacccgtatataaatacatgtataaaaaataattttggactaattttttaagcttactataaaaaattttgttgaattgaatgtttttcaatctttctttccataccaaatatgaggatttattattttttttttattttcacattttttctcgatacttttcctactttttttcttcacaaaaattatttcaaacatagtcttaaagttctttatatacattatttttaattatactgaaaaatatatttaaaattatttgatatgatttaattgttcgattaatatttatatatgtaatttaaaattttttataaacaactctacccgaaacacgatctctttactaatttagagtaattttaat

SEQ ID NO: 97261 - DNA, 503 bp, Cannabis sativa
  modified_base (245)..(246): a, c, t, g, unknown or other
taaatgtgcagaatcaaaataactgaactttaaataattaaatgattagtaatgataagattaacaaatcgagaataacaatctgatgaaaaacaagagcaaacaaagtatataaaaccaaaaacaataaatgtataaaataaagaaatcaacaccaaagtatatactggtccaagtttgatagatctatgtgatatatagctctactccagttctggaacaccaccgtaatctttctttattgnntgagcaagaataggtacaatacagtcgagacgagattctttattgagttctcactaagtgtttcaactctcacacttacacccaaaaatcttcttcatctacagattgatgatgagtaagggctcaacagcctagccatgccaaagtgagagagttttggaacagaatcctgattgagcaacacattgctcaaggacacatggcggtgtaggattggtggagtgcaatcgtggtgcaagtatgagattgcagcagct

SEQ ID NO: 97262 - DNA, 777 bp, Cannabis sativa
tcaacaaggtgcattttgttttttggtagctcatcacgaaagaattttccagttaagcgtgcttaacctgagtaattttaaaccacgtggtaaattaaaatatcaaaaattttatttttgatattataatttatttttacatatgtttttggatgtaaatattgagaaaatttttgtaattagaaattgtaattagtattttttaaaaaaaattatcaaaactattataaaatcaaaataataggagtaatataaatttcaccaatcatcaatgtgaaacaacacatacaagcttctttttctttttttaatagatttaattaaacatagttttacttcttgatatttgaattttattttcagaaacattctaccaatcaacaatcataatggccccatgtactttaaatttttaaattcatgtcctaaacctcttaatttgattttttgaagacagcacaatccttcaaattttacttttattttggtatttacttttctccttatttccttcagtttatcaagatttttaaaattaaattaaataagtatttaaattaaaaaaaataagataaaatttttatgtaattgagacaataatgagtcttagtttacgagtcactgttattgagctccatagctatggaatttacattgtatttctagttctttgaacctaaaaattcaccattcgttggtaaatggctccggtatttttcaatccagatagcatgatcttgtagcagtagattgctttgtcagtttggaaactggtgt

SEQ ID NO: 97263 - DNA, 605 bp, Cannabis sativa
cttagtgaaatcagcaggtatatataatatatatattttaattattattaatcatattttttttattaagaataaatagaatttttacttctcaaactatgaaacttataggaattttccgtcataattataaatttgcgcctttcatttgcaatatttagttcattttgccacattttcctaatgtaagaccaatgatctagagctaatttaatataatttgaaagttaaaaaaaaaaaaattgtatagattataatactagtctaactataaaatcaagggttgtactcataattttacagttaatgtttcaatatttaaattcattataattgattttagctagcttaaattagttgaataaacccttgtactgtaattatacatatagctcgagatcacattaataaattatcttaaaaatcgaaagagaaaatttacaattacctccatagttcgaacaaaaaattaaaataataattaatagagcaaaatcctacaagtatcatagttcaggagtataaatcttatttttattaattactaaaatcttttagttataatctctattatatatatctatataattattaggtggtggaaa

SEQ ID NO: 97264 - DNA, 673 bp, Cannabis sativa
ccacttaataaactccctccccatgcgaataaatctgatattcatacccctacgaattggtaaattaacatctaaaaggattctaagcctaagataaggcccagtttcttctctcacagtgtccttatcaacttcgataagatcaccaacttcagaagcaataaatctagccagttcatacaatttgcacataaacagaacaccatacacttgcacccaaaaaggaacatagtgcaaagtatcaggggttataggaaaggaggtgtcaggagcagcaaagacagtaatgctttgtgcaaaatgccaaggctggccctcaagaactctacccttgtccccttcacacccaaaagtaaccataaacaagccatcggcatgttcagacacacaaacaggaaatctacattgcgatgaccaaattccagacagggttttcaaaagagaaggtcgattaaagggtcgaacagtatgagtttaagtagcaagataataggggctggagtatcactagatggattagcatggtaggtaaagacagtattttcatcaggaggtaagacaagggcactggacacattactgagaaaatcatccatggtacacaacagcaacaaagacaacaaaagaaagaaaagaaggaaacaagggagaagcagagatggaaaattatacc

SEQ ID NO: 97265 - DNA, 615 bp, Cannabis sativa
ctccagccaagttctcccccatttctccaccatttaagctcaattttcttaaatcttctgctttcgatacttaatcccatacaacaaaaaagtttgacttttttccctctttaagtgtcatctgagcccattagaaaatagtggtgggtataattccggccaccgatatttgttaagaaaatgttgaatctcaacatccattaaggtataaatgtagtttatattcatttttataatgtacattgttttatttttggtttttgtatttttttttctggttttttcatattagtaatattattgtattgtatgtgcatagtgctcgggtttttagcagaatcagtcgtcggattgtgcttataaggtaaaaagttaaacctcaatatatatatgtatttttgtattttattgaatacgtgtgtatatatattctgtatatattatttatgtaaatacaatttttaattgtattttatatattctaagtaatatatatttactgtgaatgagaataagattggaggaatttaattagtttagaaataaaaattttaaaattgtgttagtgtgggatattattgattatatgtgtatgtataatttagtaactagtaa

SEQ ID NO: 97266 - DNA, 685 bp, Cannabis sativa
aataatacacttaagccaaaaccttaccatcttaggattgagatctattaacctaagattaactaagtaatattgacttagaaagatataacagtaagttcatgacatcttttccactgttaatatctgtccagttcgatgtacacccaatacatccgatactagtatattttactaatggcctggaaaggaaattccacataacactctgtaagtaaaatgtatcactgattattgcgtcagtgtatatccagtgcactaataaattatgggactaagtactttgaaacatataatcacaatcactttcaactgtgatgacatcattaaaattatgaataactatatggtcgaaatttaatagaatttatataataaacgtataatcatgaaaataatcatgtaaactattatcctaaattttgtccacctgacgtgacatgtccacgtaagccaaagacagagtatatgtggaatacaaccctactagtagcagaataggatctccatccaaaatatagcataactatcaagtagcaaccgaatggagtgaagcgagcccttaaggagttgtactaacatccctggccacccaaggaagcctataggccagccagggttagcatataggccggccaaaatctgggcacaagctggcgcactaaaaagtgacttccaaattaag

SEQ ID NO: 97267 - DNA, 613 bp, Cannabis sativa
tttataataattgagaattacatatattataagaattttatatattttttaagattttattcaattctatttttagaaaaataataattattattatatttgaggttaaaatcgtatcattattaagattgcatcaacgtaaatgtaatataaggtcatttttttccaaaaaattattatggcatttttttaatgaaaattattaaggcattcttacctatattggatagtttttttaaaagactatattggatagttttaaatatttttatattggcatactaaatatatataaaaagataaaatataaaaacaggaaaaacatttaattctgcgattgttctggtgttggatgcttggatggtcagggtggttatatggaagcggagactttgacgttatttcatgaagtggctctggttttgagtaagggtgctactaattatattttatgtttcttatctcttagagctcttccaatagttcctctaaaataaagattctttaaataatttaaaaacaatagagtaaaatcatctttcaataaataaaataaatgatataaattctttctctattttaaggtaagggtgtttataaattggtttgatct

SEQ ID NO: 97268 - DNA, 517 bp, Cannabis sativa
attcaggaattgaaaccaactcacgttgatcactttttaacttatccaagacgcatatgcccgagtgaggttgtcaaccaaatccaaaatggattggtcgacatcaacacgatcataagtaaacacaaaaccctcatcattcccttcaacaaaaccagaatgaacctataaataaacacaaataaaaaaaaacataaaagctaaaaataaccagttataataatgacatcactaataacaacgaacaaacaaaccaccttatcttctcgtacaatcgaaaattgcagtcttctagagtcatcatcataatcaggaagattagatttcaaaaatacctaaaaaaaagaaaaatataatcatagccggtttcaaaaaaaagaaaaatacttaaaaaaacaaaagaacttataaaaaaataacctgttatacaacataaaataaataaaaaaaaatcaaaaataaaatggaaagtaaaataaccagttataaaaattgaacaacaacaaaatgaagaaaa

SEQ ID NO: 97269 - DNA, 781 bp, Cannabis sativa
ctttgaatgtattatatataggttatacccgcgacacgctagggtttttgtgcaaaatgggccaattgttagggtaaatacacgaccttgaggcccacgatagaattatgggttgtggggcagaatcgttcatacagtggaggacccatgcaatttggacaagtgttacacatgtgtgcaactacattagacaagaaggccaaagggatgtcgttggacaaagggaatccgtctctctttgtggtacattcactaccaagccttgacatagggacgtgatctaatttggtaggctaggcgtttgagagcagtgacgtcatccaataagggcttctggatgtacctcttaagcttcccatctgggtacacttcattaatcatttggaggacgtcgttcactccattatctggttggctgaatgggcttccaagagtaagaggatcttactttggaagtgaggctcctagagatgtgatgggctggggcccacctccagtttagacttggccttcgcatgctagaaggcttgggtcgggtattacatggaccgattacatcttcaaaatgccacatgtcgcttcacccaaaaacatcaataacagattgtaatgttaatttttttatttttgttgttgatgaaagtacaaagattgtttctcaataaataagaggttaaaaaaaaaatttccatcgtcgttttatgtaggtggtgcgttgtttcttatccatatgcgagtcaagcaacattagactccggaccatctaaacattaaaaagtgt

SEQ ID NO: 97270 - DNA, 653 bp, Cannabis sativa
ccggacccagacccagacctggacatggacccaatcccagaaccgcacccggacctggacccataccaagatctagacccggaaccaaacacgaaccaggactcaaaccctgacatgaaccaggacccaaaccaagacccagaatcgcaattggaactagaattgaaccaagaccaagaccgataaccagacccgaaacaaaacacagactagaacctagactcggacccaaacccgaacccagactaagacccaaactttgacaggactgaagtcccagacccagaatgaggacatggacttgggtaaaggaattgggaacgagacctagaaccttacccagaccctgactcggacctaggaccacgctaaggacctgacacccgaactaggactcgagatcaggattcagatcaggatttggggcttagacatgaaccgtagttagtgtcgagatttggaacccagacccaaacccgagcacaaacctgaacctacacttggactcagacccaggcttgagcccgcaccccgcgacccaaaattggaaccggatatggaagcggaccaagactaaggactcggacccaaaccttgacctggaccaattccaggacctagacctggacctagacccagaaccaaaaccagac

SEQ ID NO: 97271 - DNA, 508 bp, Cannabis sativa
tatcaacaaggtacggttatcattttggtgttgatttatgtagacgatatcataataactgggaatgacagcagcaaagtacaaagtttcattgctgaattaaacaagaaattcactctaaaagatcttggtccattacactactttcttggtatagaagtgtatagggatcacacgggattgtacctaacacaaagcaaatacatcgaagatctactcaaaagaacaggttttgaaaatctgaaaccatgtcccacaccagcaactgcagggaaacccatgtccttgactgatggagaatttttaataaatcccacgacatacagaagcattattggaggactccaatacctatgccatacacgacctgacatttcatatgccgttaacaagcttaggcaattcctaaaggctccaacaacaactcattggagtggtgcaaaaagggtcttaaggtatctaaaaggcactattaccaaaggattacacatcagctgtgatgacagat

SEQ ID NO: 97272 - DNA, 2002 bp, Cannabis sativa
ctatctcattagtagatagcaagccctgagggatcctaggtgtaggggcttcatccttagatatcgaggtcggtatgaagctgtcccttctttctatttcatcagtgaaggcccctcctacagaatcgagtctctggctatccaacagattgctcatttgaaagatagaagatcttttcagtgtggtgaaagtgaaaattgaacaaagtgccctcacccgtataaaattcagagaaaataaaaataaaagaactgaccaaacatctcaagaaatagctgggagtatcttagtaacacaaggttcgtgtcgctacatgaaaattaagttactgagatatacccaccatttcgagaatatggtcaattctagtagtaagtaattcgcgaagtaaaaactaactatgtagctcaagaaatggctgggagtgtcccagtatcccaaggggcatgcgattatcgcataaacattgagttaatggcacacacccaccatttcgaagaacctagttagttgcaatagcgactacaagacaagaaaaatgaaaactaaccgcatgtctcaagaaatggctgggtgtttcatagtgacccaaggggcatgctatgactgcatgaacattaagttactgtgacacaccgaccatttcgagaactcatattgttttcataacaaaaatacatacgagcaaaaagctaaaaggtcttagtaattaatacattttggcaaaaagagggacgaaaggcttagtaattggtctagtaaagttatttctgggcattcaaacattcaaagaaacttgagaacattcaaaatgctcatcaaagacttgtgagtactcgaagttctcatcaataattttgggaacactcgaagtgttctccctgaaacccatgattactcaagtttcaagagtatatttcttaaaaaaatagggaatttaatcaaaagacaaataacaaatcctatcatttcacacattttctacctctaaaagcacagagtgtatacagattctcaaagaaaggaaaacagtaacataatggtaatctactaaccttgaagtgcggtctctcttcgaatgattcttggggttatcacgaagttcaaaattcttttcagatgaagaaaattcaaaaaaatgcaaagaagttttgaaggttcgaagttaagagaagagaaggaggggaaaatgaaaatgagagggaaatgaattaaagatcatttcggatcagaaagtttaaatactaatatccctcatttattgggatggggatacatgggaaaggaatgcctaaggtctctcaatccaacagttatcaataatcacgcctgcacaaaccccgaagaattttgatgatgtggcacctcaaaggattaaaactaatgattacaaccgtcttttcgaaactttcgactagacaatcaatggtcaccacctcgtggcaacctttcgcctacctctctctcatagtttccctcatgacataggtatcaatcgcgaatctagaggcatctgttatagtgtgaatttttcagctagaaatttgagatcaggctcctataaagatgacacgtggactcattcccctcaaggagtgctgagctgtctgaaggagaccactagagtataaacctcgcttgaaccagattcagcgagatgatgtgaccctgacagagtctagtcgcattattacgcctcgcatagtgcaggtccaagaaggtcaagtttaaggctcgcatatacccagatatatgcgatgtctataaagctttctcctgtgaatcagtaaaaatctattctttacttagcgagttggtctggaagacctaacacattcgatgacaattgaaggactcgcacatccaagtcatcgacttctacaggatatccgtatacgggactcggatagaacacagatatcttaacacatagactagattagtctcgtacgcatcttaggcccgcgagcttatgcgagaatatgaacagacaactcatac

SEQ ID NO: 97273 - DNA, 527 bp, Cannabis sativa
agtaaaaatagaaaaagaaacaaagaaagaaagaaagagcacaagtgaaaagtacctcatcattggatccctgcctcataaaattagcttgataagcagatccttggcgtgcgaaaaacagcctactgtcaaatcttctggtggcagagtttaaagtggtggtggtgttctaagacaacataggcgaatcggattaacaaaaataattgcaagtataatttatcataacccgtgtaattaaatttagcatctacaactttaaaaaagtagttagtaggggtggtcgcaatgtgaaaatttccaaaccgtacatacactgcataaacctcaaaaactaaaagtattcaacaaaaactataaaaatagcaggcagcaaataatgcagtgcggtttaaacaatacttatgaaatttttaaactacaaccgctccgtggaaggtttatttatgatgtgagcggtttgatgaacaccactagtagttagttagttgatgtgtattaagaacaaaacttactgggtttgcagt

SEQ ID NO: 97274 - DNA, 659 bp, Cannabis sativa
cctatactaccacctcaaaactcactgtagccgccacccccaaatacaacgccgccgccaaagaagaagaagatgaatctcaacccatcctccgaaacgtcagttcaccgcttcatcaccaataatttgcacactaaatttttgaggagtaaactgtaaactcaaactcttgtgttgttttgtttgtttgtgtttgggtgggattaatagacctataattgcatttttgtagtgtagttgtggaaggacatttaaaggttgactgtggggtcaatggctgaatttctagatcgagcaaattgattcattaagctcaaagaagttgttcggcgtgtggatactgtcagacaaaagaaaatccaccaacatgcaatattgacagggacatctgcttagaatccacaataccccagcagctcaaattcaaatgggaagaggtctaataacagcaacaggtagggtaatggaaagaaagcaaatttgctggccatgccaagcagtacccctgagaaaatgcctcaaaatttactgctttcttagtcctaacagatgacttagagacaatctatgcgatggctcagtctatggtgtcgtacaagaaaccatccccatgaagaaggatgtaagtaagagagatacatccaagttttgtcattttc

SEQ ID NO: 97275 - DNA, 539 bp, Cannabis sativa
gagttcttcatttcccaaaaacctatgccaaaacagtaagtggtttatttctttgtttctacttttcctttttccaaaatttgtaaccttgtttttgcttttgattgtatcttcatttactgtatctggtttaagcattttttgatttagtttttgaataatttctggggttttagggagagaatttacgtttacttaatctataggatcctggtttggattgaatttatttcttccagaaattgcaattattcttttatgtcaaaatatcccaatctagttttgaaatttcaactccagattttcttgaaatagaatgtcctaaagaattagctcttccattcaaacccaaaatccaaaaacctaaatcaaaacttgagattaatgatgccaaaattagagatcatctaataagaatcaatcaggatgaaatttctagatgctataggcgatttttacaagaaataactgagggtaaacgtcgttatctgtgagatgcagcttggcctcaatcccaaactttatcttctatcccttta

SEQ ID NO: 97276 - DNA, 513 bp, Cannabis sativa
ttgttgaggatgtcaaggcaggcatcagttaaatccaggcctatcaaatcccagtttttttggaacaaaagacctggtagtccatccttccccggggcttttaagggatgaatttggaataaggtagactttatttcttcacttgaaaaaggttctagtaatgctcggttctcatctgaactcattcggcaaggaacacatcctctaagctcttctcttatctcggatcccccattggattgcgagaatagttgttgaaagtagctgatggcaatatcagccaagtctttttcagaggtgcgccatcgtccttggctgtcatacaatcccaaaatggtgttctttttcctcctagctgacgctttaaagtggaaaaattttgtgtttcgatccccatgtctcagccaaagtacacgacttctttgtctccaatacatctcccttttttcttccacgcagttgagatccttctccagtttttgacagctaaccaatccgttaaattaggcgaat

SEQ ID NO: 97277 - DNA, 3359 bp, Cannabis sativa
aatagtgctatcctaattgtaaaatgaatataaaggatcaattttgatgccaaaaaagaaaaatgaactgaatacaataagagaattctctattatacacagagattgactcttcaaagccttgaaacctataaattatcatcactacttttttattcattgcgatatatacagcctgatgatgatacaaaaacaggacatgtagcatttcagataggaaagaaatagtagagatttcaaagaaattacctgagtcggcgtatgaggtagtcgccgtgaaccgatctgagaggagaaggagaacgagaagtgtcgagtggtgaaagggagaagatttgggagcgagacggagatggaggagaacactcagattaaggttactattgggttgggcctttatttgggctgggccttcaattgggttggacctttatttttacagaacactatttcctacaacttaattgcaaaaataccttctgagacttttaatgtgaacttatctgaaaaaaaacgtttaatgtgaattgtagatagtgcttgaaaaaaaacaaaggaaaaatatggggaaaataaatctagtttacataaatatggttaggaaacgtaatagaacaaaatatgacatttaaaataaaaaacttaacgtatatatgtcatttgtattaccataaaaacttaacgtatatatgtcatttgtattaccataaaaacttaacgtatatatgtcatttaaacaatattaatagcataaaacaacatttggttaaagggtgctccaccaagaaaccatgcttggattttggaggtttgagtttagtatttattgatgtaaagaaatacaaagatattaacaaaattcatccaactttatataaagaaacatttagaaaaaatcctcaattgaataataataatgatagtttcctcgaggcagcaatgaaatatcttaagttatttgatacaaaagcttaaaaacaaatgacattgctaacaccacccaccacagccaccgccatgctccgaccactctactccggagcacattgcttcctccttaccataaggtatttttcctgaacagtccacagattattgtttaaattcaagaatgtcactaaacatgtggaaaatctcacctatatatatatatatatatctttttgaattacattagtggaaaatgtcatagcttattttaattaaaaagccagtatatattactccataagcatataaattgcctcaagattgttattctacttctagtgatagatgacctacaatatactaaggttgagaaaagaaaaatagaaaaatgaatgagttgatcatttgtcaacgataccttattattagacaaactaagtagtaataacatatgaaattattatttttatgttaggcaaacaagtcagtttatatagaacatagcattgtagaataactaattgtgtaaaagtcctaatatttcgtaattacacaatgtaattacacttgattctcatggagactaagttaccctgtactaggggatgaattagttgtttgattatttttcttctttttctcttcattttcattacacaattatatgataaaaacaaattaatactataaaattcaatcgaacattccaaacatgacctacttgttgaaaattaggaactcgattttttttcttgccccccggagaacaattagatgatttctatgtttggagtaccgtacaactaaacttgacacagttagtttcatgagcacgtataaacggaccaaaatagtccaaaaccagtttttcttacagaaaataaaattaatttcaggttcaaatacagagcttctctcccttctatgctgaaggctttatacaagactcagaagacagcaaggattccagcacaaacaaaatgcataaaataaataattaacattataatgaactaaagactaagtccatatccatttgaaggaatttaagaacttctaaaatatgatctttcttgtaaacacaataccaaccacaaattagaaacagccttttgattcagcattctaattcacccaaactatgactttttatctcaattttcagcaagaaaataccaaatagaatcccagcaaagcttatgactccataatctctttaaattgacattaatgttatttaaagcttcaaaggaaatgaatacagatgaagaaagaattactacctgaaagacatctaagcagcagcctccagcaattcccgctctgcacgctgcctgatccttctctcaagctctggcctaaaatgcctaataagaccttgcacgggccaagcagcagcatcacccaaggcacagatagtgtgcccttcaatctgcttggtcagctcctgaagcatgtcaatttcttccaactttgcatttccaactttcattctttccataatcatccagagccatcctgttccctctctgcatggtgtgcactgtccacaactctcgtgcttgtaaaagtaagagagcctagcaattgcatccacgacatcagtcgacttatccattacaataacagcagcagtccctaatcctgattgaactgctttgagtgcatcataatccataaggacatcatcacaaatgttcttaggaagcagtgggacagatgaaccacctggaataatagcaagtaaattgtcccatccacctctaactcccccacagtgcctctcaatcaactctttcaaaggtatactcatttcctcttccacagtgcaaggcttatttacatgcccagacacacaaaacaattttgtccctgagttattcttcctcccaaagctggcgaaccactctggtccacgccttaaaatggtgggagaaacagctacagtttcaacatttgtaacagtggtagggcagccatataaacctgcatttgctgggaaaggaggcttcaatcttggtttcccttgtttcccttcaaggctctccaaaagagctgtttcttcaccacaaatataagcaccagccccataatggatatgaacatcgaaatcgtaacccgacccacaagcattctttcccaacaatccagctgcatatgcttcttttctggccttttcaaggtttaggcgctcattcacatactcacctctgatgtagatgtaggcagcagtagccctcatacccacaccagcaattaagcaaccctccaaaagtttgtgtggatcatgtctcataatttcccgatctttacaggttccaggttcactctcatcagcattgacaacaaggtaggaaggacgaccatctgaaactttcggcataaaagaccatttaaggccagatggaaaaccagcaccaccacgacca

SEQ ID NO: 97278 - DNA, 674 bp, Cannabis sativa
ttgagaactccagcgatgggtagggatttagggaattttggggtggttgagctcgtaaattttggggcttctgtgtggagacaacaagacttagttagagtgggagagtgaaagagttagagagatgtgcttttttgaaatgtaaaggtatttctaagaagaaaagatattaaaagtataagtgtgttttatttttaattgggtggtatattaaaaggttatgttttatatttaagcatgttaaaccaaatttttcaaataaaatctgtaataaactaaaagggttccattaatgaacccttgtttgtttcggtatccaaaagaattttataatttatgtatttcttcatagtcgtatacattgcaatcatttaagatatcttataaaattttgagaaattttaaaaaaaaaataacatgataaaaacatggttcaaacagtttgtcgcacgcgtgactcttttattttatacttatataatacacttgaaccgtgtttttggcatgttaattttttttttgaatttttcaaaattttacgagatgtcttaaataactacaatataaactactatgaaaaaaagatggactaaaacattctcctaaatactgaaatagatagggagtacatcagtgcatctttttgcgttttttaaaggatgcatatattgtat

SEQ ID NO: 97279 - DNA, 973 bp, Cannabis sativa
aaaaaattcggaatttttcccttctttttttttgaaaaaatcacactgccaaacgacatgtcgtttttgcaaaaagcaaaaacgacacgtcgtttttataatctgaaggtggctaaaaaaaacaaaaacgacacgtcgttttttcacaaggggaaaaacgacacgtcgtttacactcctgaatggctgcctttcaagacgaaaaacgacatgtcgtttacaacaaacaacatcatcaacgcaccatccaaacgacacgtcgtttttccacaaacgacatgtcgttttgcgtcgtcttcttcagccaaccgggtcgattttgacccgtttatctgcatgcgggtccgacgaacccgacccaaacccgatcggaatggacaattccgacgaccaaattgcgtgttttcaaatctaaaatgttctaaatcaaataataaagagatccatgtagattttatgcacgaaaacacaaaaaatataaactttaataacacgaagttaatcgggtccgaaaaagttttaactgaaaaaaatttccatctttaagtttttcaaaggattttcaatgcttagatcgatctataatactatacgaatatagtaatatatataattcgaaataaacaccgaaaaaaatgaaaaacggaaaaaattaaactttacaccgataactttatgttatatatatatgcatatatatatatcacataaattaaaatgaatattatgaatatgattatgcgataaaacatatatataatatacaatatatatataaatatatatatacacgtaaatacactgaaaaatgaaaatatatataccgtacgtgtgtataagaatataatatatacatgaacagtatgaataaatatatatatatatatgtatatacgtatgaaaatatatatatacttgagattatatgaatatgagtatatatatatatacacgaaccgaacgaaacaaatata

SEQ ID NO: 97280 - DNA, 552 bp, Cannabis sativa
ctatggtataggtcatgtatttcctattttgtatctactgggaatatgtgcccctatgaagcctgcacagaaagacaagtgaatcattcctaaaacactgtaaatacctcacaaacatactgagaaaggggtcgaggattctgggttcagaggaatcaaagagataaaataggagaaaaattcaccaagaacattctctgtaataaatactctcattaataacaaagactcgttgactaaggctcattaatgccccaaccacgtaaaaatctcatgcattaaacttcttaaagattttcctatatatcatttaatcggttgccgaaaacctcagtcaacaatttacaatataaaaagcagtgttcaaacagtctatttcacacacatataaaataaaatatagtcacacatgtagactatttgaattctatttttggcgtgttaaatttttctgaatatcttaaaattttatataatgaattaaatagctacaacgtacacaactatgagaaaaatataaactaaattttttttttagataccaaaatagat

SEQ ID NO: 97281 - DNA, 853 bp, Cannabis sativa
tttagtacttttttttttttttttttgagatatcattttagtactttataaaggagttcatttttattgtttattgtgcgcaatattatttttaagttctacataaaattaaattatttattttattttaaaaaccttatactcaaaatatataatgaacttgaatgtaactgtaacaactttaaaaatcaaaactacaaaatatctaagcaaataattcttgaaacatttctcttgtttttattttctttattccactatataaacttcgttaaacaaaaatcacaaactcttggtttaattttttactaatgttttttttatcataatcgcctctcaaatggagcaactgcacatttttaggtgttaagcaattttttttaattcattctatttgtgaatgattaactaataatacttgaatttccattttatttaataaataaaaggactaatggaaacgaaatgaaactaaaaaaaataaattaatagagagcccaactattttttaactcatagctgggtcaaaaagaaaatcgatcagaaagaagaaataataaattaatttaaattcttaatactgtaaaacaaacttaggtaattcatgtgatgatccttctaccttcttcttcaagtaatataaattttgatgatgcaacttcttcaaaaaattatttattcttttgtgatccggtgatgattcttccatcttcttcttcaagtaatctattaattttgaactaaatccatgataaacaacacaacaaaattaatataaataactacacataataataattaaaaaaaaaataatttttcaaaacagaataaataagattaaaaaatatataat

SEQ ID NO: 97282 - DNA, 1151 bp, Cannabis sativa
atttaaccccataagttccaagcatgattaagaatttttcactgtacatcatgttgtttcaaattctatctttagtatcatgttaaaattagcaaaaaatctctgaagtgagtgcaacagaagattttaagtaatttccgattcgtacattgtgttttgagagactgtatcggtcatactcatttcgtcagtgtttatttcatgtatgatcatatcgaagataggaatgaattgaagtttatatttttttcctttttatgtttctgtttgagaagatttacacgaagtgtgggagacgtgctatgccaaccatgatgatgggatctgcggcaacatttatagattgcgatgagtgctggaagctgctattggtcacaaagaaaggttccatgtatgtatgggacttattcaaccggaaatgtcttcttcaagattcgttggcttctttgtttgttgctaacacaagtgcatctgcgaaagacgcaggtaacaaacaacttttgttatggaatttaaagatctgatttttacggggatgaagttttgtattctgcttcttgctaattttcttgtattttttgcacccttttcagggtcaatcaaagttatatcagcaaagttgtcgagatctggatcaccgcttgttgttcttgccactcgccatgccttccttttcgacatgagcctcatgtgttggttgagagttgcagatgattgtttccctgcttcaaatttcgctagctcgtggaatctaagttcagttcagagtggcgagttggctgccttgcaggttgatgttagaaaatatttggcccggaagcctggttggagcaggtatgtcaccaatttatttcagttctacgttatctgtttcggctcaatttcaaggcatagaatattctcactcgaatctgttagctaatgaggtcttcactgtcacttgttatctttttatgagaatttatcgggttaaatgttggtgcagggtgactgacgatggagtgcagacacgagctcatttagaatctcagttggcttcttcattggctttgaagtctcctaaggaatatcgtcaatgtctactgtcgtatgtacgctttttggcaaggtgatcttctaatttaattattgatgatagttcgttattactc

SEQ ID NO: 97283 - DNA, 645 bp, Cannabis sativa
tgcttggatattttgcacccgatgcctgtctttatggatcattagattcctttgacagccatccagagggggcctctttccagcggttaggggacccctattcccttttttgacttacacaactataaaaatggattttagtgacacacaatgagagactctaaattgttatagtgacatttcattgcgcatcagtaatgtgggtgactgtaaaagtagtatatagtgacacttcaatgaggtcactaaattattttagagtctcttagtacgtgtcactatagccttttaaagtcatttaacgtgaaactttaaaaattacagcaacttttaatgcgtgtcaatatatcatgtatttttttaaaaaaaaaaaaaacaatcaacaaaattaaaaaaatatatatcagatttttatttttatttttcttacaataaacattattttggataaaataacaacaataaatttaaattaaaataatatacaagataaaaatttaactgaaaatatacaaaaacaatccacaaacttttataaaataaatcctttacagagataatacaatataaataattaaaaaaaaaatacgagttaatcacagtataaacataattttaaacaaaaataacaatttaaatttgaac

SEQ ID NO: 97284 - DNA, 509 bp, Cannabis sativa
gagagagagagagagagagagagagatgctctgctgggatcggtggcatctggaacttcgacgccttcttccaactacggcgatgcaccaatggaaggagacagaaatatatcgggatagatagggaaagaggaaaagatcagcgttttagggtttcaaaattaaggtttctatttatacccttttttctttttctttttattctaaaacttttttattttctatagaaaaaaaaaagtacctataagtgtcggtttataatcgagatcaaaggatattttagtgtcggttcttatactcaatctgtatgtatatatatatttaacttttttgggtctcggttattgttgtagtatcagtctactaaccgatacttaaagtcattataggtgtcagttaagaaccgacaccttagaagtctattttgtcgtagtgctattacagaaaaataacataatttgtttttacaactacacagagtgttgtttttccgttgtttcagttaaact

SEQ ID NO: 97285 - DNA, 509 bp, Cannabis sativa
gagcccttccttttcttcttaccccctctattttgagtcgacaaggatgcaccactaccaatcttaaaaggggtgttaattggaccaggggaaaactcaggaatcacattactctagtttcccatttttgtcttatcttcaagttactgttttacagaatttatttaggttgtggtggatttgactcaatggttcactgccacatcagcaatcatctatcctaagtggcatgcagttagttatttcagttggagcctacaagctacaacaacatataaaagccagtcacttccactagtctgaaaaaaaggctttcctagatttgtttgtacatagacttcatacagaaaagagattcaattgtgagaaattggagggttgtaaaagtctttcttatatatttgattgagtagactcaagtgagattaagttttgtaatgtgttgtttttctgtattgaattctttcttgtacctatgattttcaaatcattctacatgtacattcaat

SEQ ID NO: 97286 - DNA, 708 bp, Cannabis sativa
ctctccattctctactcagatctacaaaagatatatcttcgaaatgcttggttttgaaaacccatgttgctgaccaaaacttgattttattccaaaccacttctgctgaattctctgtgttttcaaaatttctggaattcctctctaaccaaatagcccaaagtgttgccaaggcagcagtcttccaaagaatacccttatgtttgcttccttttaacttacaaactatcatttgtgtaacaatttcaggaaaaacccaatacaaacccgaattcctccagcagctttgaccataagctggaagaaaatttacagtgcaaaactaaatgatccacttcttctccattgttcttacaacatacacaccacccaggagaaatgaggagaaaaggtcgccttctttgtaagacatcatgcacattaactttcccaagagctactagacaaacaaaaaatttaacccttgaagggactgcatttttccaaaaattttgatgttttctgttttctagttttttgtaactcagtttttagaaaactgttttaaaaaaaaaattggccaaatgcaccctattagtttctaaaagttgttttctgtttttaaaactaaaacagtttttaaattatgaaaccaaacaacccctagatatcctgtaagaaaaacttgcaacggcgggggcctcgaatctctttggcgtcggagagctc

SEQ ID NO: 97287 - DNA, 855 bp, Cannabis sativa
ctggttcagattgttcacatcagaggtaatgtgattgctagccccactatcagcataccaagcaccatcttcaagcatttctggtatagcaatgaatgcagcagcattttgattggttttgtttccatctgtgttgtttccagcaggtgcagaacccatgtaagactcatcataacgattgtaacaatgagcagctgagtgtccatattttccacacacttgacaagtgggttttggaccattggatctgcctcctcttcctctaccaccaccagatctgcctctgtttccaccattaaaacctcctgtggctctgttgttgtgttggctgggactgtattgaccactaggaccattcttgttagcaagattagcagtaggagaggagttatttgaagatttactatttccaaacagagtactcagcctgtcgagtttgctatcaaagttaaggagaatttcttgaagtgtttgccaggttgttttgtctcaggcttcaacctgcagaacaataggcaaatattcgatatctaatccagacaatacattagataccagtaatgcttcaggataaggatcaccagccaatgctaaaacatcagcccattgtctcttttgtctgagataatcgggcatagtcatagctcctttcctcactgtctgaatttttgttctgtactcatccatttttgctttggaatgagcaccaaaaagagattcaagagcagtccatacttcagctgaagaggagcagcccattacttctgttgcaatgctttcagtcatcgatccgtagagccaccccattagaagttgatcatgaacaacccattgttcaaattctgggttgatttc

SEQ ID NO: 97288 - DNA, 618 bp, Cannabis sativa
taacccaaccgactttccaaattcggaaaagtttgtaacagaaaaacagttggaacaactgtttggagacaaaacaaggtaaaggttttaaatggattatttttccacaaattccaccttaatccatgtaaaaccgaaccttaacaatacatgactacacttggggagttatcctgtagaattagtcaggacctatttgagcaaatccaaacaatgttggaatctgctcactggcaaagtcttagttcatgcatcagcagggttctcatcacatggcaccttatcaagatcaattcaccatcctctatcttgtctcatatccaaaaaattctgatatcaatgtgtttggatctctcatgatacacaggttttttgcttaggtgaattgaggattgattgtctaaaaatacagtcactttgcctttcatcatctacggctcccctagaattcctttgatcgatacagcttccttgaatacctctattgttgccatgaactctgcttctgtggtaaagagatctacaactggttgtagttgagatttccagcttatgcagcatgaattgagatttctagcaggttcaacccgaacccgagcaacccgcccgaacctgaac

SEQ ID NO: 97289 - DNA, 552 bp, Cannabis sativa
ttcttttttatattttctctcacaaattcgggtatgggtctgggtctggggccagtgttcgagaccgggaccgaggtctgggttggggtttgggattcagattttggtccaagttcatggtttgagtcctggggtagggttgcgagccgggtctaggtcgggtcaatgtttgggtccgggtcgaggtttggatctatgctggtcggggtcggtgatccgagtcccggtccgaggccgagtccgagttcagggtttggggtacaggtctgggttcgggtcccagggcaaggccgaggtggggtcctaggttcaggtttgtgccttgggcctggattcgtgtcccgagccccgttgtttggggtcagggtctggggttggatcccaagtccaaggtggggcttggcttcatatcgtggtatagtgtaaaatattgaagtattcttgtttagtataacaatatttagaaattgcttttagaaaatattagtcaaataccattaaatttttaaaatgataaaaaattctttctatttttacttttaaaaatacaat

SEQ ID NO: 97290 - DNA, 650 bp, Cannabis sativa
caaagtctccaacctagcagcaaatcttggtaggtaacataataatcttggtatgcaagtttataatgtatattacaattagttataagtaacataatagtaaatatttttttttacatttggtattgtagttggaatggaagaacaaaatataatcacatatttattgctggtaagaaatttaatagagatgaatttaataagaaaaatgtcaaaatgcattattagttttcaacaccatctaaacctaaatgtgccatatagtttcattagtgcaaatcaatatggaattttgcatgattattatattttaaggttgataaaataaggaaatgatcaaataatgagaatgtaagttatcagtttgacttgagatagttgttaatctataataataacaatatttcctataataattgcctgtatttagtacaaagttcagtgttttgtgggaggaatccaaacaagtttgccgttgtagcaaagataaatgttttgggcccgctgatttatgcggaattaccgtacaaacaaatatcttctacaaatatgggaatgggatttttttttaattctaattaataatacttaattagttttttttttttttttgaaggaaaatggtaactttattaataagaagattcaac

SEQ ID NO: 97291 - DNA, 507 bp, Cannabis sativa
tatgcctcctcatataactcctatcatttgaacttctcttcttcagctacaacaacattggcatatttgggatttagcttatgcgctcttgttgatctctggaattctggttggccatcatcatgttctgctctttaatgcactcctgtttgctagggaatatgtgttgtgtcttcattgccttcactttgctcttaactcaacgatttgttcccctatttttttgctgtaaattgttttccatttctttagaatcttgtaatgcttccttttacggtgactaccatgatgaagcttcatcgaataccacatttcttgaggtataacactttccagttgtaaggttataacatttccacccttttcattgactgtcatatcccacaaagatacatcgtatttccacccttactgcaggtgtatagccccacagtttctcaaagggtgaaattgttacgaaaattataaacactacgcaagtgcacgcaatcaagtagtatactcacg

SEQ ID NO: 97292 - DNA, 798 bp, Cannabis sativa
atagtttgaaacaataatcatctctaacaattatttcaagttgagctactataaatataagctttgcatggtatggcattctatacctaggaatgaagaaaatacaaacaaacaaatcctcttttacaaaactaggagttgtgccaatattaacacagtatattatatagtcaaatttggcacaataataaacttgttctttttttcaataaacactagatcaaattactttttgaaaatctcagcaccaaagaaaatgaccataaaatttttcttggcgggtacagtatattatatagccaagacaatctaacacaataataaacttatatttttcaataaatactcaatcaaattactttttcaaattttcagcaccaacgaaagggccacaaaatttctcttggttggcaccaataaaaagaataagaactttatgttggcactaaacaaacactaaaatatttctcttgacatcaagcaaaatatcaagacctttctcttggtgccaaactaaagtctcttggaaaaagaaacaaacaaaaagtctattgttaccaaacaagagaaattttcttgatattttgctcaataccatgagaaatttattggtcttttcttcagagccaagagagattattagtcttcttttcgataccaaaagaaaatttggtattttcttagggggtattgccaaggttaatttcttagtctttttgtttgatatattgcttggtgcaaggaaaatttattgatctcttgttcaattacaatagatattttttggtttgaaataag

SEQ ID NO: 97293 - DNA, 505 bp, Cannabis sativa
aaactcagcaactaccttttatccactgattttactcaatctctttcagattccacattgttcattaaaaattacaaatgcatttttcttgccattttaatatattttgatgacattatggttacttcaaataatgatgttgctgttatttcatttaaacaacaaattaattcagttttttaacttaaggatcttggtcctttacaattttttctaagcttggagattggttgctctccctccagaatttccgtatcccaatgaccattcaccttacaacttttgactgacacatgttatttaggagtttctactgcttccacaccaatagaacccaaaatttggctctcatccgatgttggggaaccattataaaacctaaaaatattgtaacatcattagaaaaactcatttacttaaccattatttgtcttgatatttcttttgctataaataagctaagtcagtttttatctaatctagagctcctcatcttactgcatct

SEQ ID NO: 97294 - DNA, 510 bp, Cannabis sativa
aaacaagctggctcattgcttggcaagagactcttgtttctctacaggttgtgtgcttcagttggaggattgttcctctgaagtacgttctattattttgagtaagtttatttaataaatctcctgattaattaaaaaaaaaaattattatcaatatactacttattttatgtattcccacaccaaatcaaacaaaataatttcaattacaagctaaatcaaacatcatagtattattcttacaactattattatttatcatcacctaattttagtttgtaacacaccttggattctcttctaaattatgttattatacctacacaggggtagaagaaaggaacaatgttttttgtcgtttccatcaataaaatcttaaattagtcccctctcggatttacttacttatttatatagccagtacatacataatttatgcataaatttattatttctgacaatgggagaaactgtgcaagagccaataggatggtccttcaacaaagctaa

SEQ ID NO: 97295 - DNA, 1103 bp, Cannabis sativa
atgcaacctctttttaatcttgtctacaataactccacaatcttccatataaatacaatttattaaaaatgataaataataacttttttatttttattttatagatataaatatagtagcattggatgattaaggttaataagggaggggttgtttaaatttgtaaacaaaaacattgaacaatatcccagttgctcaaacttgctataataatagtgttggattggtctttgaagcataattttcttctacttttttcaaaattgaccgtttatgtcaaaaaagattaacactttgatttagttttttatgttctctacgaaatcttttatttgtatttaattaattaagataatttttagattttttttactagtttacttactaatttttttgaggtgttcttaattcatgttagtatttatgaattaatagtgcctgcattcaagatgaatagtaaattaatttagatggtttttccattttttttggttgatgtactattcttttatggattttcaatgaaatgtttgttcattattaaaaaaaaaaatattgacaatgtagtgaagaatattacttaagagatgataggaaaagggattcactggttctctcttctaggagcttggtcatttaccaatctctattctttgagtttctagctttgtctaatctgccagtttagtttgtttatttttgctctcttcctaatcgtttgtctttgttcctgtcctcagttatttctagtggtttcaagtcttttcctttgttttgcttttgtgtgccttttgtctttctgtctttcattcgtgggtgtggggttgttgggattctgtggggttgtgtgtggtttggtaggtctggttgtttgtttcctaagtgtggttattggtgtgtctttgtcttttgttgtctctcatttatggagttagttagtgcagctgatgccccttgcagtggcaaaattatttcttgcttggaggctaccatttctctctccccgagtgctatttccattaaagctctctcttccctgtgtttgtatggcatggtagtggctcctatgtctgtcgatgcaaaggacgttttgggttttgctt

SEQ ID NO: 97296 - DNA, 6343 bp, Cannabis sativa
  modified_base (5906)..(5907): a, c, t, g, unknown or other
  modified_base (6067)..(6074): a, c, t, g, unknown or other
  modified_base (6271)..(6273): a, c, t, g, unknown or other
tcacctccgccagcaaccaccgtctgaaccgcctgaaaaacttcgaaccccaccagccatgttcgacccccaccagccacgtttgacccccaccagtcacctttgacttcgaccccaccagccaccttcgacccccaacttcgaacaacccttgcccattcttctcaagtcacggtgtaaaaatggccctttctcaatttttttatttttaaaaaataagagttgaacaacccgtttaattttccaactcaaaccaatgtttcttttattttagtttcctaaataatttttatttattaatatttttggaatagtttgttattgataattaaattgtaatgccatgtcattacatagtttctttacatgaaaatgtcacatcatcagttttaacaaaaatgaaatggagagtaacagaaggatgacatttaattagttgaaatagtttgaggagtatttttaacaagcagaatattataaggagcaaaatttagtagggtaaaaagttcggaggggcaaaaatgctatttatttatttttttattttttcatatttatgataataaatccccatttttaaggttagataaggcctaaatgaaatgggccttggttttgggcttttgttgggccttggttttaggcagctcagctaagctaataataatctaagctaagctactaattgttgtattaggcgtaccgaccgccacgccacgctccaccgccatggctgccactacttacttttctttcttcatataattgccaaacacagagttggttgtgaaatatttgacttttcttcttcattcattgagtttcaactaatcccatcttccttgattctcaagagtccacttcctttttgcccttttcttcttcttctcttctcacacgtttttctcttctaacaaatcattatacccaataataatacaacaactacgaccattagggtttttgttttggggggttgttcatttctcaagtaattttatcgccatggacgtcaaatcaagctctgcccttctttccaataccaatttctctggtttcactctccgcaattcggatcatgcattttctacgtaagcctgaatctttttattattattattatgaatgatccgtgaatttcatttagttttatgagacaattccatctggggttcttcagaattgtgtgaaattcaacgttgttgagctaaatcttttgtttttttttattattattaaaaaagaaagaaataatttttatatatttaaatgaaattcaaactcatagagatttgctctgatttcaggtcttgttcttatccaagatctcctatggcagtttcatgccaattatcgaagaattcacatcatgaaaatgtgacatctctaccactatctaacacgcttactaatcattgtttaacctttgacaagagaaacccattggggaaaacattttgttctgctggtgtttgtacttatgatggggttgctgtagagtctcattctggaattgttgaggaaaaagttggggttctacttctcaatctaggaggacctgacaaacttgatgatgttcaaccatttttgtacaacttatttgctgaccctgtgagtttgtagtggcattgcctcactgcattttactatttctctattgtatttggttagccataataatgttttctgaatggggtaatgcaggacatcattcgccttccaaggttgtttcggtttcttcaaagaccgctagcccaattgatctctgttcttagagctcccaaaagcaaagaaggctatgctgctatcggaggtggttcgcctttgcgcaaaatcactgatgagcaggtagatatgtctgtttgagtgattgttcatagtaaactcagcattgcttgatagtttataatgtttttgagtgttttcatttggagttgggttggacttttcattttggtttttttacatgctttattcatatgctgcaggcaaatgcacttaaaatggctttggaagcaatgaaagtatctgcaaatgtctacgtcggtatgcgctactggtatccattcaccgaggaggcaattcagcaagttagtccttcactttaacatgcattttcaatatcaacttcctagtagttcttgtcctattcatgtgagcattgtttatgatatgaacttccaagaactgcttaagattagaaaggataaattttgttttttagctctgtgcttccttggattatcaaattattttatttgttatcacattgtttgaagtgattaattatgcttaatattaggaacttatgtcagtatctatgactctataacagatcaagagggacaggatcacaaggcttgttgtgctacctctttatccacagtactctatttctacaactggatcaagcattcgagtgcttcagagtttgttcaggtgctaatttcgtgtcaacttatcatcttctgaagcatgtgatttccattcatcgttattacttgtttgttcatatagctctaaactagatttgactgtcaggaaagatgcccatctgtcaaagctgccggttgcagttataaaatcatggtaccaacgagaaggctatgttaagtcaatggctgacttgattgcaaaagaattagagaccttttctgagccttcggaggtagattaactctttcattgcagatttaaaaagtttcctaatgcagtggacatatatactttggataccaggctgcagcatattctgattttgtttttttggtggtaaaaacattaggtaatgatattcttcagtgcccatggtgtccctgtcagttatgtcgagaattcaggggatccatacaaagatcagatggaggagtgtatatttttaattatgcaagagctgaaagctagaggaattgagaataagcatactcttgcttatcaggtacttaactaaattttcgatcttgaaaatttaactgatgttctcaaatggtgaacaattcttggttttccttctggtatgttactcagaaccgtattgatttatttattttttgattggttggctttataaatcagagccgagttggtcctgttcaatggctgaagccttataccgatgaagttctcgtcgagcttggccagagcggtgtcaaaagtctcctagctgttccagtcaggtacatgtttaaaactggcacttatgtttctgattatcatgatatgatgctaacaaagtcttgcaataaatattagcatcaattatatcatttttgtcgatcggggttggttaaacaaaattctctagattgcataatctcattgtttggaactcatttgaaattactgagtaaagcattttattcaccatttgtatcttattgtgagttttcttcatctgcagctttgtcagtgagcacatagaaacacttgaagagatagatatggagtacaaggagttggctctcgaatctggaatcaagaattggggacgagttcctgcgctcggttgtacctcttccttcatcacagatttagcagaagcagttgtagaagccctaccatcagcaacagccatgtcagcctcatcagatacatctattgtagaagaagatcatgatccaattcgggacgttgttaaactgctctttggttcagtcctagcatttctcttactcctttcaccaaaaatgatatcggcggtcaagaactacctctagagataaataccatacagagctgctcttacagaataaaatacaagaatttgattttctgagattcaagttttgtttgtacaagtcattgtcagaatatgtaatttgtgttccttgaaatggctttcctaatcaaatttcactatagattttacataccatgagattattatgattatcttgtcagctcatatacactggccattgtttgcttggtaaattagtatatgacagtagatgtggttaatgaatggtctgtatttttcttaatatttggagcaatattttttgacattttgtactttgtttagtgtggaaaaagagtttgttgtctcaagcaacagcctttacagcagcccatttaaaataatgataacaaaatatagagaaatgaacaatgagctaatgaaaataccaaaatggctaattgagaacaatatagatgtatattagaagctgatcaattattttagctgagaaggttattgaggtgaatttaatccactcactcagtttccacacatatgatgttaacaaaactaattcttaaccaaaaagaagacattttcacagagcaaatgtaaaatattaactaactgatgagatgttgggaagagaagcatatgactagctcatcttcaatggaaattatttgtgtggctctgcatttaaacgtagtagccagtgaaagtgaatcctcgtcctatgatctcaccggcacaaaaccaagcaaagcattctaacccgaacagtgttgcaattccagcatcctccaccttcaactcttgtctgttcttccatagatgctttacataatctagctctttcgctaatgcttctcgacgaccaggtaaactgtaacacaaaaacaataggtattgtggttcaaactctgatcagatttctagtaatgctgtgctatatacacatttcgatagactatgaagaaaaatatccaacataatcacatgttatttgttaaataactcatgtcccaccaagcaagatacttgttttgattaatcaattcttcatgtcatgatccatgagtatatgctaaacatcaaaatcattgtaaaaatagacagtgactaacattatgagcagaaacagcttaatacaatttgttttccaagcaagaaacataagggattcttataattgtaataagtagtagtgagataaaagacatacctggctagacgagtataaaacaattgtttagccaaaacagtgcacttttcaacagaggggggttcctgaatgtactgcttgttctgctccaacaactgcttatagtaagaagtaccatgcttagccacaagctgagaggcctgagtagccttggattgtagctgaaccagctttgaagccatcagtcctaataattgcacaacccaattggtgataagtaccccaatttggaaaattacactaaatgagtttctcatctcaaaacccaattgctatattacaaagaaaaatcactactctagtttgtaattgtggagctgattatataaattatatgatgattgatgaatattaggtcataaaattggattacccaattagaagaaaatgagcaatgaaaatagaaatgcataataaagaaacccagaaagccactaaattgatcatcaagttctcatttttctatctgggtatcactcaaattaagtatatgaacaacaaaatcctcaagttttggggataatctgatcaaaattcagtaaaagaattgaattgaaaatagatctaatacagctaacaattacatatagaagaattagaaattagataaagattgattgaaaatgaattaaggtaatgatgtaatgggaatggagaaagaaaggagataccttggggaagtgatggagaggagagtgaagaagagaggtccggttaagccaaagtgattgcgttttgttgtgaacctattattattattattattattattcatctcaaactccacagtctatgccctacttttttttccttttactcattccacgtggacggtcaagatgattccaatcaaattactacgtattttaaaatgactaattaggatttttgtccttgaattttgatatgtactaaattatgcctcctgaatttttaagatagttaaaattaccccctgaactattgagattgttggatttaaggacttttatctaattnnattcaattttactatttcagttattgtttatgtactaaaccatgttccccagactttaatatctaccaaatcatgtccttggaactttgacatgtactaaattatgtctcctgaactttcttttttactaaaatcagaaaaaaaaagtccttaaatccannnnnnnnaatagttcagggggcattttcaatgactttaaaagttcagggggcatgatctggtacatgtcaaagtttaggggacaaaaatcctaattagccttttaaaattactacgtattaactttgtattattttttttgagtaatttgcggcataaatacctaagtttaactcgcacttgtaaataaatacctaagtttaannnttagcggtaataatacctaagttatatttttagaactttgtaggtgcctaactgttaaaatattatgtta

SEQ ID NO: 97297 - DNA, 2906 bp, Cannabis sativa
  modified_base (132)..(134): a, c, t, g, unknown or other
tttttaaacattgtaccaatttttcccctgtcacttcaagatactctccatgtgactctcttatgtcagggtattttgagtacaatacatataaaagaaatatgttacaattaaatataaaattagaggtannnttgattaattgattaataaaagtagtatttctcaacttctccctttcaagtttgtacaccaaaagtattaagcttttttgtttttcttttcatccaaaaccttttctcctcatcttatatattcaaaccaccattctccagagacatgacaactgtgatcactctaaggtttttagggtttcaccattagaaagagcacttcaagatgaacacaatctatatattattcattattttcgtaagactgggtatattagcagtttaaaaaaaaaaacattacatttttgttaccaaaaaaaagttttttttttattattttatattgatattggaggagctggaactcgagacctcctcacaaggtgtgaaatcattaaattatgtctacggatactatagctattgctcacatatgactattagactatgtccatgactacgagcgaaaaaataagtttaaggggttggttttgtattatgatttgaatagtaacaattttttatttggttaaacaagatttaaggataattcaaaaaaatatgtataaatttaataagtcaccaatgcgtatgtttttgctataaagtcaaatgttaattttctactctattaaacaaaagttaaagtattgtcacattaattagtttagaagaaaatctcaaaactctaccctaaataacaatagcttcaaaaaaggaaaaagatggggatatcattaaaatttatgatgtcaacaataataaagttctgaatacaacctgattatcaaactttactagttcccaaagataaaacaaacttaacaacattgtggataataatattatttgtcttagaataatgagaaagagtcatattaaagagagccaatttataatgaatatctcgaagaactaagcctaacaacaagtctaaagaaatattattattaatcttattagccatattaagacaatcaatctaaaaatgaatatttttcagagcaattaaatgacattggactcccatatgacataaagcaagagcttcagcaactttaacatgaaaatatctaatcatgtgtggaatagcccaagaataaacaacccccatgagtatcccaaataaccatacacataccatgcatagaaactttggccacatctaactaatgtcgcatcaatgttgatgttgaaggaacccaccctaaggggtaccgacagtgacggactcaggatttttactttgtggaggcttatttattataaaaaaatatttataactacgttataatcacttttattaaatttatccaattttatggagacttttctactattttagtttataattattaacttaaaaaaattacatttaattttttaaaaaacagtatttttgttagtggagactatagcccccacattaatgtgaatgggtccgtccctgggtaccgagtaaggcatggtgaacaaagagggagaagacacatactcatgccttgtagttctcaaacaatcaatctcttttaactgcaatagaagtttttaataatcactcaaaaaattacaactctaactgaccaccaactcaggagacatcaaacaattattatgcaccattttatttaaactataccaaactctccacataataacaagttaggatctctaagattaaaatcacaaaatttttggtattgtaaaagagtaaagtattccaacaaaacatgataaggggttttctcctaaacatcgtataaaggacaaagatcatcgattagtataacatgcttattcaaattcgaagatatccaattatttgaaattttccaagcaaacatttaacttttggtcgtgttcttaggaaaagttataaccctattacaactccaaactggtttattttagttttgttttaataaaattttatttagccaaaaaagaaaaattaaaaatgatagaacacaacacagaacacacaaccaatatgtagaagcaagagattgagtaattaagagattgaaagatcttgtgtcagaaaacatcacgtgaagtacacgtgtaataatattattatgattatgattatgatccatcttttcattgagaaaattaatgggaagtagtagctagctaggtagaagaagagtactgttgtaaaagcaccttgtactgtagcaaataaaacaataaacaaaagaaatcgattacacagatatgagtgtgtactactacttactgctagtcgtgtgtacgtatataatatatatatatatatataggacagttttcaggctaccaccaaaaaagtacttataattataattaacttagctcaaagtgtataatgcacttagaagtacatagaacacttttatcactttgtttcccttaaaatatatagatacttaatttttttttttttcaaatatactatgtgaattgctacattaattttcctgaatttttaaaaaaaaaaaaaaaaactttgaaatataaaaataaaaaatctctattatatttacatatatttttatataaaaaaatattaaaatttacaataattaataaaataatatatttagagaaataaatatataatattttataaatataagatatgaacgttaatttgaatatatgcggcaaaaccacctgaattttaaattttttaacagtcaacaacaaaaataaaaaataatttccgaaatatatatatttttttgttcttctttcttcttcattttttttctttcttaaactttttgaaaccctaatctctctctctct

SEQ ID NO: 97298 - DNA, 794 bp, Cannabis sativa
tgttcatctaatcagctttatagtagaggaggccaatttgaaagggccactaggtccacctcgaacgccactcaactagggccacttggttagggcctctcggcatccttggtacccattttttttttgaaaaattgagtaaacaaaagaaagtaaaatagaattgaaaaatgaattagccaaggatcgaactcaccacctcttgagagaatgatgcacggtcttccactaggctaaggatgcttatgtgaagtgaatgaagaactcatgaagccctccttatatactaggcaccttctcgatgcgtgtgccaaggatagggcttacaattcaataaggtgaaccacgacgaaacaccaattcttttagttaacatgaacacttaaaagaattcttgtagactggagagcaagtgttaaccctgacaattaacaaggttaacttctgagtttagctgatgattaagctaagagattacctaaggcatctttcggagttaaccaaaggtgacccgttcagaaaatgcacacttgggccacatgtttaagcatgcactgcatgccactcgaccaagcatgcactgtatgccactcggcaagcatgcatccatacaagcatccgaacaatgccttgcttagcggtgcaaccaatacttagtaaaaatttcctaagtgttgggaatgaaattagcaggagtacaatctcaaggacaaggcatgcacgtgaagggtgtaagacgaccatacctcctacatggtttgttaataagagagggtacgagtagtggaggaacc

SEQ ID NO: 97299 - DNA, 840 bp, Cannabis sativa
  modified_base (362)..(364): a, c, t, g, unknown or other
agttttccgtaggggacttagtgttcttgaaggtatcaccaatgaagggattatgcattttggaaaaagaggaaagctaagcccaagattcataggtccttttgagatgctggacatagttggtcaggtagctcatcatttggccctaccgccaacattagcaggaacgcataatgttttccacatttctatgttacggaagtatgtatctgatccgacacatgtgcttaagtatgagaactttaacgtgtagcaggacatgagctttatggcacaccctgtgcgtgtgatggaaaagggaataaaggtcttacgaaataagactatacccttagtcaaaatcctgtagagtgatagttctnnnagagaagcaacatgggagttggagtcagacatgtagaaaatagtatcccgagttattctttgttaagtaaattccgaagacaaaatcctcttaaggagggtagattgtaataacccaaaatataggttattactcttagatatctcgatgtggaatagtaatttttttataaaatgtcgattatttgctagtggtaatagaaagtagtatatttccctattttgtataaaaaaagtgatatttatttaaattattggcctttataactttgtctaaagatgttaggatcatgttctcatgttacaataaaatttgtagctcaaaatcctagaacgtgtaacaagaaaagtttaattattgacttttttttttctatgcatgcaatgtgtagtaattttgaagaaatagagatagctagtggactacgtgacagtcatggttactaatagactatttcttgtaagttatatgccatt

SEQ ID NO: 97300 - DNA, 526 bp, Cannabis sativa
cccaaaatttagttttctcccacacttccactgctgaactctctttttctttgaaaattctggaatttctttcactccaaattgcccacatagtggccaactgctgatctccaaagctttgtcataaggagtttgacaatagttagatggcaaagaatatgcaagattaaatttggttattataaaggttgaaatatatcggatattggctattgccaataaaaatgacttataagaatacacactcctagaaaacacaaggtttatgatctatacacatatattgtgaaagaaattataattgtacactaaatgtaatttcaagagaaactggcgcattagatttgaaaatcgtatatatttataatttgtttaacaagtttcccacacacacaaccctaaaaataacgatagtgctaagatttcagtagtataacacctttagtataatttaagggtcatgcttaatatggatggtttcacaagataaaatgaacattgaagaactttggctatgactataaaa

SEQ ID NO: 97301 - DNA, 641 bp, Cannabis sativa
tgaaaaactttcagaagctgtggaatatctaaagaaagagtttgaagtactgaaagatttaggaaaaataaaattttatcttggtttacaaattgagcatttaaaatgtgaaattttcatttatcagccaacttatactgaaaagattttgagatggttttatatggataaatcacaccaattaagtagcccaatggtagttagatcacttgatgtggaaaaagattattttcgacctagagaagaacatgaagagctcattggtccagaggtatcatatcttagtacaataggagcattgatgtatcttgctaattgtacaagacctgatatagctttctctatcaatttgttagcaagatttagttatgttccaacatatagacattggaaagggactaagcacatattttactatctccagggtactattgataaaggaatgttctattctaataattgtgggtcacaacgtattgacttcgcaaatgcgggctatttatctaatccacataaagccagatctcaaactggctatttgttcacttgaggtgacattgctatatccttgtagtcaacaaagcaaactctagtggctacttcctcaaatcatgttaagatacttgcaattcatgaggcaa

SEQ ID NO: 97302 - DNA, 709 bp, Cannabis sativa
tgtactctgggcatacaggaccacaccccgctccaccacgagtgaaactcctttctccctagcatacgagtgcaaagccgtacattccattgcgatgaaactcaacttgtttcgtgtgaagaatttcaacaaagaggtcaatgaaaaagtaatggcagaaaacttggatctcttggaggacagaagagatgtagcccaaatgagattggtggtgtatcaacaaagggcagcatgatactataattcaagagtccacatgcatgcctttaagaccagagtttcggtgctaaggaaagtcctcccaaaaactaggatccgggggaaggattcttgggagccaactgggaagggccctatcagattgccaaagtcatctcgccagggaccaacaagttggctcgcatggatgacacgataatattgagggcatggaacgcagggcatttgaagaaatactattgctataaaggtgagtcgaatgtatcctttagccatttgagttttgaaatcaaggaggaagcccataaggtaactccactagtttaagtttcctcttgtttttcaatgtttccactctaatttcatgaaacaaaaggccacccaaatagcctaaaaattgttctttggaatatatgatatagcattagaattagtcaatcacaccttatcgcaagatgacaaagtgatatatctcatctttcattaaaaa

SEQ ID NO: 97303 - DNA, 927 bp, Cannabis sativa
atgtttctttattataaaattgaactctaatgtggtgtataatttagattaaatttagtatatactaaaattatgtcaaatttgacacaaaatataatatatgagttaaatttacaccataataaatatcacattcttttcaaaagaaaaataaataaatatcacatttttacttaataataaaaaaatattacattttttatttactcttttatcactattaatataattgataaatttttatattttgtttatttatttagtagaatttttatatatattttcaataaaaaaaaattgttgtctttttaagttaaatttacacttaatatattagaatacaattataaaattttagtcaaatagaacaatgtcctcaactaacttaggtttaaagtgtattattattgagagtgactcgagactagtgatcaatgtcctcaacggaaaggaattccattgggctcttgagaactatgtctccttttgtttgagatcaactctttcttttattagttgtaactttttaaatattagtagacagtgtaactttgctgcccataatgtggctaagtgggcattttcccaccagatgtttggatgtattccggtccccgctttgctggagaaccttctttgtaatgaccgtgaaatctaacttttaattttatttaatgaagtactacgctaattttcaaaagaaaaaaagtcaaatagaacaagttcaattttttaactaattttattataattttacaacattcattggagttctgagattgtcttatgttagagtcttggagattatgtaataactagttgcattttataattgtttctatatgttttttagatttttttttgttttcctttttcaggatccaaataactatgtttaggctatttaattttcaagtatttgagact

SEQ ID NO: 97304 - DNA, 512 bp, Cannabis sativa
tgtctttgtaataaatggaagtgtgtgtgttagcaagtgttaaatagacttacgttgttgtttttatgtgtattaagcagaaaaaaatgcaagaataggtatttggatatgtttgggacgaggaaaaggagcagaaaaatacttattgctgactggcattgctatagcaatcatcgcgtagcaatttaccagcccactaagtgtattttagcagaaagtccagctggcattaatgaagaaagaaatgagctgaggtggcaaaaatgtgaccaatgactcaactaataggtggaaatgaaggacaagtggaccatgacttggatttctaattagggtaaattttagtaccctaattggggagcaaaagaaaaaggacataagatatatggtgactgcactttgagaagagggggtacgaaaatttcagaagaaaaagtacagagaaagaaaggaaaaagaagagagtacaaagaagagaagaagaagactaagaagaaggagaagaaggcaac

SEQ ID NO: 97305 - DNA, 501 bp, Cannabis sativa
atttctatttgttgtgaccttcgactgtcgatgggttcgcatctatatgttacctcttcttctatggaactagaatatcgtatggcatgcagtttgttttggttgaagagatgggagtgtgatgaggatctgattaggtgcatgtttaatgtaatggatgctacaactatcttaggcattcctttaagtttatttcatgaggaattcttttaagtttatctcatgaggaggatttttggttctggaagaaagaaactaatagagtctattctgcaaatagtgcttacaggtggtttctgtctttaaaagttgaaaactatggttatgataacatgggcttttggaagaaattatggaaactcaaggttctccaaaggtgaccatgtgttgtgtgatgtagtggtaggggagttttcactgacattcttctttgcttgggtcaaatgttcgaatctcaccacaattcctcattgggagggattatgcttggccttgggaggc

SEQ ID NO: 97306 - DNA, 540 bp, Cannabis sativa
aatctttcaatataaataattccaaaacaaaactaacattagtttatacagaaaaatagcaaaatgcaatcaatcatcaaggcatattatcacttaacatgtaacattcaaatcacacataaaaacacatgaaaaattgtttttgatatggtttacttgaacaataaaaaattatcatggctctgatactagttgttagaaagcatattttactaggaccttattttactattcaagtatgatgttattaacgacctaacatggattctaaaataattaaattaacatataagggtttatgaaatctttatagtgattgtagcaaaatttagtgtctcattccgttcaaattctctaatccttaatcctttttgtcgcaggatattattaagaatttgaccctgaatcttcttagaatgtgaaagacttcacaattccacaccatcctgagtactcctttaatttgggtgggcaaatctcaatactctcttagcactcaaatttgatgaagaaataaataagaaaatataatataataga

SEQ ID NO: 97307 - DNA, 590 bp, Cannabis sativa
aaaatacgtggaccaaccggattgagacacgtagactgaagaggttaaactttggggtaattcaactaagtctctctaatcaaagggatcagcatttaacatgcctcccggagaaggcatgtgagtttcacataatcccggagaccaaagctacatcaaagcacctccgagaggtatcaaatcctatctgaacagtcacctcgcatttaatgccgcatgggagaaggcgtattgaaatttccatatgtattaaagtatgacggcataaccccccttttgcagctactaggctatgattaatgagcctagtgacgactactttatgagaaatcacatcaatcaaggaaggataaaggactatgtccattaaacccctaaaaagcctagggattaaaccatgcatttcttatgatgtatccattgggaatgtgtgcctttactgaatattacagaaagacatgtaccttagttctagggatcaccccacaaaaacactataaataccccccaaactcattaaggcggtggtcaagaactctgggttccataagaaacagagagaaaagctcaccaagaacattttctgtaat

SEQ ID NO: 97308 - DNA, 595 bp, Cannabis sativa
attcgaaaatatgggaaaacaaacttataaattaaaattttctaaagagaaattcattaaataagtttttgaaaaaaaaaaattatgtgcatgtttggcattataattaaaaaattattttttattttaaaaataaaaaattattttttgaaaatattttgacttgtttggccttatttttttaaaacagattttagaaaacaaagttacaaaaaaacaagaattttgaaaacaacttgttttctgttttaaaatcaatttttttttggtcaatattatttttaaaaaacactaaccaaacataacttatgttttaaaaactgcaaaaactattttttattctcatttctaaaactaattttttgaaaaaaaaaaaaaacaatattgtttgctatatatttctctaacttattaagaagtcataaatcatgtaattttcacattaaaaaaaccgaaataacaaactacagtttttgttttttgtgtaatattattttatacctatacatgttattattgggcttcaactccaattgtctaaagggatcttagaaaaataccaatttttttttatcatttttactattacattttt

SEQ ID NO: 97309 - DNA, 813 bp, Cannabis sativa
agttccatagtctgatggatggtgtgaggtcaagcttccccaatgttaagacaatagctgatgtttcactagataatgggagttggaatatagagcttctaaaggaaatgtttggtgatgccttgggcgaaagaataggccgaatcccccgtttgccaactgagcaacatgatcaaattgtttggaaaaaggtaacggatggtcaattctcggtcaagagagcgtttgaagctttgcaagatcgtgatccggtggaagacaacagtgtttggaagaaagtgtggagttcaaagatccactacagacattcggttatgctatggagagctagttcgggtagtcttccaacaaaggatagactgagtttcgttatgaataagacttgcttgctctgtggaggggaggaagaaacggctgtgcatattttctaggagtgtccgtttgcaagggccctctggttcagcagcccgtttgccacttttggaggagcgggaggtggtgattcggttaagggcagattacaatggttaattgagagaatccctgctgatctcttgattcgtctcctctctttcctgggctgtttgattgaaggtatatggaaatctagaaatgaaaacttattcaaaggaggagtgcccaatttaatgcaggttcgtgaagctataatgagaagatacccggaatcaatggacataatggagagggatgcggatggtgctgcaactttttggtctggagtgtgtgaagggaaaatcagcaattcggtggagatttttgcagtttcggatgctgcttggaaagactctagag

SEQ ID NO: 97310 - DNA, 524 bp, Cannabis sativa
aaaattactaatttgatcttttatcaagtaatgatattcaatatacttgaattgaacacataattgacactaaaagaatcagtatacgtaaatttattttttttaaaaaacaaaacagtatactaaacagtatacatatatggtaaaaagataaaaaaaaaacactatataaattgtgtccatatttatatgttactggtttaaaaccagttgagtaacgcaagcatcatagaataattcatataacattagtgtgtgcaatttgaatagcattaatgttcactatatcatccaacctctttattttatttaaggcaaatttgatccaataaatgtacgtactatagacatggcttcgtaacattttgatccccaatactcattgcatgttcttctacttaaggagtaggattaggcgtaatttgaacctcgtggtggtactatatatagtgtgatatacaaatagcgcagatagtttaatatgtatgagattacatttatatatacatctacatggccatctt

SEQ ID NO: 97311 - DNA, 556 bp, Cannabis sativa
aatctcgtctcaactgtattgtacctattcttgctcaatcaataaagaaggattacggtagtgttacagagctagagtagagccatagatcacatcaatatatcagacttgaacaagtatatatcttggtgttgctttctttattttatgcatttattgtttctggttttaagactctgtttgcccctattttctgtcgattattgttcttggtttggtaatcttgtcattgataattgtttggttgttaaagtttagttgatttgattctgcatcattagtcgtaattttcccacaaattagggctatgtaatcgatcaagatcgcagaatcaagattctttctgctgcaatgttaaagaaactttcactatcatcaatggggagattcgaattggagaaattcgatggcactgggactttgctctatggagaaaaagtcttaaagggatccttatgcactagaaagattccaaggttcttcgggatgagaagttattggcaggaaagaacccaaaggaaaaatcagaaatggaggagatgacatactacacgat

SEQ ID NO: 97312 - DNA, 523 bp, Cannabis sativa
aattgagcaaaataaatcgatttgagcagagatcgattggagctttcaggtgagattgaattggttaattaatactgatagttttgtggttcgagttaggaatcagacttatgaatatacttattcacatgaccttcaacctcgatctctcgatctcttgacctgtctctctcttctctctcactctctatctctaaaattttagatttgaatttctatcttctctttcatgaaaagtaattttgtttttctcaaaaaataataaaataaacaaaaaaaaaaattgaaaatggtacctgatcaccaaaaataatttcatgcttaatattaccaaccaactaatacgtgacactacaaattcaaaaataatatttaaaaaaatattcaaaataataggatatatctcgttcaaataaaatatatctttattaaatgcggatagaatctttttttagaagccctatatatacaagaatccccctatagtatagccactcagtaatttttgtaattatttaaataa

SEQ ID NO: 97313 - DNA, 650 bp, Cannabis sativa
  modified_base (204)..(204): a, c, t, g, unknown or other
tattcttgaaagaatgaagggaatgccaacggaatgggaaacgacattgacaacattcataatctccgggcgagtgttgaatctaccaatcaaagcaatcacaaagacaaatatgctacgattagcaagcatggcaggggaggtgatagaaatccaagaaccagatacaaatcgaataacaattaatggattctttaaattcanagtcaagaactccattcaatccaaaatttttccaggatatttgtttcctcatgaaggaagacgtagatggcttcaattccaatatgacagattaccatatatgtgtttcaattgtggaaaaattgggcatgaaacacgccaatgtactgaaaatcgggcaaatgtaatgaaagaaaatggggaagtggcccaggcttatggtacatggctgaaggtggatacgacgggaaaggcggagactcctaacaatcgagagacacatattcccaatcaacaagacagccagggcactctaaacatcagtccatctcaattaaatacacacacattcaaaggaggagaggaaacaaaccagaacatcaatacaatatcaggtaacaccattcaaacacctactattataaattatccgcagaatatggaaaatgcaccagaaaccatactaa

SEQ ID NO: 97314 - DNA, 610 bp, Cannabis sativa
aaagactctcgaggagggagctgacaggcccgagcagtcaaagggcagatcggagctggtcaagagcagatatgagcagatccgggctcctgccccacctccagtattgcatccagatgctaagagaggcaaagatatgctcacccattacatgactcggtcggttcgtgaggtgaatgagtaaccagccagagctgataatgacctgtctctggagtttgtgataggaggagtcttgaaggagtttatgagggtaagtctttcctgacagtttccttctatccttctttacttggcttagattctaatattttttctttgtgcagactggtctgaagatggcttatgcttatgcccgagttaagtcggttgcctccaagaacgctgccatgtccaacaccatgagggcagaagtggacttggccaggaaggatgctgatgacgccagggttcagcttggagctgtctgaatggagatgggtgaagtcaacaaaaaacttctggccgccgaaaaaaaggtggctgagctgactaaagacctccaggcttctgatcaacttgaagctgccattgcctccttgtcaaaagaagtgaacagtctccaagaaga

SEQ ID NO: 97315 - DNA, 629 bp, Cannabis sativa
  modified_base (57)..(70): a, c, t, g, unknown or other
ttgctaatccatttcttaattccgagtattacaatttataatcatgaaataaatcannnnnnnnnnnnnncataaaatgatttctgatctttactaattagtaaacttgattatatattaaaatgggttttatttagggcacaaaacccagcagcacctgcagagctttattggaaagactcgagctatcatctcctaggtgatagagaccatctttgattttccttttaagcaagattgcacccgttttcttgtccttaacacattttatgaaattctaagaaaacaacattgtcattagtaagtttggatacactaaccaagctttttagttatggaaggaatttacaaaactgaattcaaatgtaaagaatgagaatttaaggaaagagtagttgtaccaatgttagaaatgaccaatttcttaccattagcaacaacaattgtttcttgaccagtgtagggagtgacatactcaagattgtccatggagtgtgcaatatgattggttgcacctgaatccacataccacccaacatcattaccaaaatctagcacaatttgagcaacaaaggcctgaggatcgtagttaagagactgctctatgagattggcttgtggctgagtag

SEQ ID NO: 97316 - DNA, 1000 bp, Cannabis sativa
gaattcaaatcaaataaaatacgatacgtccgtcgagtcgagatgagatcgttctcggggtattcttggattatcacaaaagagctatatcaataaagtacttaagagatttggcatgtaagattgtagaccaggtgatacctctgttgctaaaggagacaaattcagtcttagtcaatgtcccaaaagcaaccttaaaattcaagaaacgaaaaagattctctatgcatcaattgttgggagtctaatgtatcttcaagtatgcgtccagatattgcgtacattgttgggatgttaggcagatatttaagcaaccctggtgtggagcattaggtagcagccaagagggtaatgacgtatctttagaggaaaaaagattacatgctcacatacaggaactcagatcatttggaggtcgtagggtattctgatctgattttgcttgttgccaagatagtagaaggtctaaattaggctacattttttttcttagctggaggagctatgtcctagaaaagtgttaaacaaacacttaaagcttcttccactatggcagcagaattcgtagcatgttatgaggcattaaatcagggagtctggctaagaaactttgtcactaggctgcgtattttggagaatgtagaaagaccacgcaagatattttgtgacaataaatcagtagtattgtattcaaataacaatagaagctcatccaactgaaagcatattaacataaagttcctagttgtgaaagaaagagtgcagagtggacagatttccaaggtcttttatgggcacacttctcatatgggtgtagtattccttgaggatatcatgatttagaaggagtttgtattttctttgctttatgtttgtttaagacatttatgtatttggttatattttgatctgaaataaatttttctgtttattcactgtgtttgttatgttcaagtatgacctcactatggtttatggaagaccagttggaaataggcat

SEQ ID NO: 97317 - DNA, 629 bp, Cannabis sativa
tatattatttaatatacatattatattatataaaaaaaattactagattaaataagatcttattggtaacaaataattttgtaacataatattttatttaatcaactaaacattatattataaattaatataatgttttcccaattgattaaataacccaactctaatgaaaaaatcattgcattagtgcatagtgtaaaatgtctttcgacttgaattttatcttagtataattaccataaagtttgtcaaaattttagttgtcgtaacattgaaccactattccttgataacaaatttgtgataacacacatctttgctatgttcactcaagaaccttatgaattacttttgcaccgtttatggccatgtgaacaaatctaatttatggactttttagagaataactcctaattcttataagaggtggcaccacccctaatctatataggtgaagtttaagtgtctcacaattctttagacacttcttataagcttaagtgagttttcttaagcttaagctccattaaataaacttttggctttaaccctccaattttcaccatatatactcattcataaatgggacaatttgagtataccatatttactctattgacttgttatta

SEQ ID NO: 97318 - DNA, 505 bp, Cannabis sativa
tcatgatttagaattggccgcagttgtttttgcactgaaaattttgtttttttttaatgatacggcgaccaccgagatctacactctttccctacacgacgctcttccgatcttttgagaatttatcacctttcattattggtgccttaccaggtgaacaagtatgcatattgaatcttttcaaaatccgatcaatgtcagcttgctccagcatttcacgcgggtcccccacatcagcgccccaccaaccagagttcgccacctcactgcacatcagcctcaacctccaaccgcggtcacccatgtgtccgcctgcagaagaaaaattgagaaaaaaattgagttggttaattgacccacaaaaatccaatttacacacacaaaaatccaaaaattatattttctcccactctttacacttaaatatccattttatctttccaatttatttcacctaaataaatatttctaatttattttcaccctatcttttcactattttttc

SEQ ID NO: 97319 - DNA, 2336 bp, Cannabis sativa
tacaacaactattagcctcaatgctcaattcttaaatatggggcctaaacttgacttggatagacaattggggttgatcaaaccttttacaaaggaggatgttaagaaatctcttttcagcatccttgacaataagagtcctggttcgaatggctatagctcggccttttacaagaaaatgtggccaaaattgggtgattaaatagcttgttctattcttgaattttttaaaacattcctacaaagcttaacaaaacaacaattgctctagtgcctaagactgatcatccttctcgggctgtatactactgtcctattgcctgttgtaatacgttgtacaaatgcatttatgaaattctttgtagcatgttgtccgaaacgcttccttgttcaattagtcaaaactaaagtatttttatcaagaatagagttttggctcataacattctaattttccaggacttgaacaaaagttacaataggaagaatgcctcccctcattgtgctgtaaagattgatttaagtaaagcttacgttacggtggattagtgttttttggaaaagctcatgacagccttgtgctttgcctctcgattcattaaatgggtgatgatttgtctaaatggtacctctaatactcgaatacttaatgggagaattcaaggagactttaaaggtgcaaaaaggctgaggcaaggagatcatatctcacccatgctctttgttctagtcgtagagtatcttactagactttttcaacttggagcacaacaccaagactttcggttccacccttcgtgtaaaagattaaagattattagtttgtgttttgttaatgatctcataatcttttgtaaagggacgattaaggctgttaaaattgtgaatgacgcatttgttgagttatgtcaatgtttaggtttaacaacaaatagaagcaaatctcaaatgttttttaggggtatcactgctgctgttagaaatcaaataggaagttcaaattgaagaaggctcatttgccctcaagtatattggaatctcaatgcatccaactaaatggaagcatgaagattatgatgttattcttaggaagattaagatgaggcttcacacatgggttagccgacacttttcttttacaggtaaatctcaactcatttactctattcttttgggtatgagaaactagcatggtgaacattttctgatttccttatagcatcatcaaagagattgataaactctgttgttggttcctttgggggaataattgaacaagaagtaacttgcatatgttttcttgggaaaaaatttgtctttccaaaatttatgggggtcttgactttaaagaggaaactaagtggaacaaggctttacttgcaaagtttattggggaattagttataataaagaggttctttgggttaaatggttgaatcacacctatttaaaaggagaagatatctgagggtacgtaccagcttaaagctgatacaagctgatattggctcaagttatcccttgttagacatctttttacccaacaagacattactagtgtaggggtcggtgggaaatttaaaacaagcaatatgtacaaactccttgttgaagcaagaaaaggtggagtattatcaatgtgtggaacaaaatgagcattcccaggcatcgatttatactttggctagttgtcaataataatcttcttactagagacaatttgttcaagtgtcacatctcaatagattgtgacttatgtccagtttgtggtacttttgaagaaagtcattgtcacgtgtttttttattgcatttattcttaacaggtgattcatttgattagttcctggttgggcaactgtctatcatatttggcacaataggaacatttgtatatataacaatattatttttcaagtgcatcaaacacttagagaaattgaaaaatgagttactctatagagttcacatgttagattgggtcctccttgagaaaggacaaatctccttaagcaatctctttcaatttcattcagcataaaaacatttccacaaaagggtagtaagtcgtcactgacggacccacaaaaggttttagcagggacacatgaaaagttgggtgaatacgactatttgcagggagcttgagtgtataagaaataggtctcgcacgagcaatgatttcaaaaggcccgaaatatctacaacaaagcttcgagttgaggtgatgggccactgtggtttggcagtaaggctgaagtttgacaacaaccaagtcacctatcttcaactcaatatgtcgacgtttcttattggcttgttgctgcatacgctttt

SEQ ID NO: 97320 - DNA, 787 bp, Cannabis sativa
ataattccaatactggcctgaccaccccttgccggtcctattgccagcatcagctagccaacctccagtaaagggagggccgaccagcctctcttctggtaggcattttttatgcctctgtagcttttagcctagacaatatttctagttacaaaatgggcttcaacaatccacaaaattaagagattaacttcagttatttacctactcttggggactatttaacatgttctttacttattaatttaatgtgtatcaaataggtgatatctactcattttaagggatatcaacctatcatctcttgtatgctctcctacataaagagtactaaactaaacctaaactctctatgatctgaagtctaattcttacactctaagtgctacatgctaagtcttaagctcaaagcccttaagtcttgaaaccctaactcattttcagttctacaggcccctagcagtatagaagagactaagtctccctcatctcttctacttgagattttctacttcttctcactattgtaatcttaagagagccactctagaatccacaacacttgtagtatcaatataactaaaaaaggagtaggtcattacccgctaactaatggggcttaacctctataaaaaatattgtgtcctttttttttgtcagttctaattatgtacacgtggtgatttcagtcataaatacgactctactatcggttggcaaaatttgaggtcaacaatttggtgctttcattaagagagttgtggattgacttgatctatcaccatgg

SEQ ID NO: 97321 - DNA, 567 bp, Cannabis sativa
ttgactaactcagaatcttctaattgtacccctctaattctgtctaataagtctgactggagtgttaggttatgaagttttccaaacgcaaatttaataccagccctaaccatatctaaagctaactgaggagagatcattatggtactacaaacatgcccgagaccttttcttctcaaagcatctgccactacattggcttttctggggggatacaaaatcatccactcataatccttgactagttctaaccactacctctgtctcatatttaaatctttttgcgtaaagaagtacttgagactcttgtggtcaatatagatctcatatttttctccatacagataatgttgccaaatttttaaagcaaacataacagcagcaagttcaaaatcaagtgttaggtatcatactccttcaactggaaaaaatcatgagcaatgaaactatcaggttgcataagaatgcaccccaaattctgtctggatgcatcacaatataccacaaacttttcttaatctgatggcaaaataacactggtgtcgtaatcaatcgctgcttcaactc

SEQ ID NO: 97322 - DNA, 579 bp, Cannabis sativa
cctactggtgcacaacaagacttttaagacagcctcaatgccatttcttgaaggagagcccgcttctgtgaagcattgataacactgttggtcttggcattgtcaaggacatctgtaattatggttgttgcatgaccaagtggttcctccgcagccctcttcaacatgaaagcctattaaattaagacgcaaaattatttaatcaggactcaggagactagatatctactggtaataataataattatatatattaaaaaaaacagaattaccaaaactagctgagaaaccagtaataaccatttttctcgaagtgaaataggtcaacactcttgcaatagacaagcaataatggaataacaactagatcaagataaaagaaattatttaatgccagagagagagagaaagagaacctggccatgatgagatatagccaatgtacatgattgctgaaaccagggttccccatcaatttgaacaggaaatgaagcaaatagctgtatcttgattgactgaccttgtgcaagccttcgagcccgacaaagtcccacttgttatcataccaagataccagtt

SEQ ID NO: 97323 - DNA, 752 bp, Cannabis sativa
  modified_base (319)..(322): a, c, t, g, unknown or other
gtaaaaattccaataagttatcctcaaatttttttttctctttcggttagaagttatctctaaattttaattattaaactaaacatctataataaatatggttattgatttaacatctatattttataatatttgtagagagagggattattagggatgtaaacggggcggggcgggggcggatgcggggattgctcccccacccccatacccgcttcttaaattcacctcatacccgtcccaatactcgtttaaattaaagtaggggcagggcaggaattacccgacaggggaaggattctcatcgggtacccattannnntatatttttgaaaaaaaaatgatatctcaaagagaattaaaaaaaaataatcataaaaaattagtaaaacaataaacttaagtggaatagtatgtatagtaaaaatagagtataatcaataaaaatgttaaagcatgaaattattttaattgtagtaattatgattttaacacttaaacatatatatacaggggcggacgtacatgatgtaatataggggccatggcccccctaaaataaatatatgcttagatttatatatgtaaactgagttttttttagtaattattgtatagaatttttttaaaaaagttaaactaaaatttataaatattaagggctggggtagggtggttgttgagtctgacgctttagttgttgttcaagcaattaatagctcagtgcatatgccatcccagtttggtttgtt

SEQ ID NO: 97324 - DNA, 801 bp, Cannabis sativa
tttccgtatttcatacaaatcaaggttcccaaagtgtttgaggtcatacaataaactttcttgagcattaaaaaattgagtcaatgcttgttcttcattaacttgatccacgaccccatgggaagcattaggcaaaataaaagtagcctccacgtgcccaatgttagcttgagatggattaattggcccaatgctattatcattcactcccaaagaaaccggtcccattgacccttggctaagattagacacaacttgagtctccaccaaagtaggcccacatgaaataggattattattaatgagaggaggtccactaacattattacccatattcacatcaagtatctttggcctaataattttgtccacatgattggagatcagcccattatccttcacgcacagcccaataagcccaacatctcctcttttatctccaaaagaattaatagtcaacctttctttatgcaggttattaactccaattggttcaaaacccaccttcggcccacctgcagaaatgggctccacttgggcccgatccactaagtaattaccaccattttttgcacacaaattcaaatcaggcacaatcatcaaggaacggtcttctatagcttcagtgataggtggttctattccaggtaacaattcagactccttttccatttgagcaattccaacttctctttctctacccgatttggaaggaggaggtacaacaccagctggtttcgatttggagacccactccgatcgtttttatcaacattaaaagaaactaataatttcattaaa

SEQ ID NO: 97325 - DNA, 582 bp, Cannabis sativa
tatataacgaaactttacatctcacagcaccaattattataggtctgctacatttacaattgctcaaactatactaaatcctattttgccactttctttggtacaatatttttaattctactctttacatcgtattttattatttttacaattacatcaattatataaattttcatattccaaagagcttaattctaacaccaccatatgtaatatattgttgccacaagtgttgctgaaaaaacttggcacctaaacctattggatttagctttagaaagccattgcaatatactaggggcggtgaccatggcagtggtccaatgcagccattgtttaattccattcaacactttatttggacatatattgtatttaaacaatcttgacttgaatctcaaccaatctaatgccacaagtcacaagataaattaatgctttggtatagacaatctattccacactttttcttccagttggaaattcaggacaaataatagcatatcatttttggatcaagtatgtacatgttgctaaacattgggaaaaacattcatttccatcaattcgttctttactctt

SEQ ID NO: 97326 - DNA, 557 bp, Cannabis sativa
tcgagtcgtgttatcgtgtctgatccattttaccgaccctaacaattcacctctccttgttgacatatcagttgttattctagcctgaagggctgtcaactaaatactaatgttcaagttcctcactttggctgctaccgcgctgaaacgactcaggtaagcctttagagactctcctagctgctgcttgatgttagttagtgagtgtacctctagccttccgtctcttacaacctgaaactgtatcttgacatctttagatagttgttcccaggatgtaatgggatggttggtgaatttatcaaaccagctgcttgcatctcttctcagagatgttggaaatagaatgcaatgcaagttgttggaaacattgcttgctcccattatagtgttaaaattgttcaaatgtgcgacatgatcggttgtaatgtcatgttgtacaacatgtgggtttttgaatccttgagagaattgagaatttaatatattagaatgaaatgtttcagtttcttcatctgaatcataccctgataatttcccatattcactatcttggt

SEQ ID NO: 97327 - DNA, 524 bp, Cannabis sativa
ttctttttttattaaataattttaatttaaaatgaaggatgttgacgaaagagcatgatctcattcattatatctatctacgtatatcttctatgtgaatatttgagtatgtagtgttatatattatgaaagagatcgatcatcatctatttttaaaataaactcatagttaaaatttgataattttatatatttgtatatgaagtttcatttttaaaaaattattgtatatgagatatatattttttaaaaaaaattaatagaacttttatatagaaaaatataaggctaattagcagtggcggaactacatacatctatggagtggtcatggccccccttaactttttagaaaaagaaaaaaataaacataatgtaaattaaattaggataattagattttacttattagaaaaatgtgatatttctcttattattaagcctaataaaaaattgtgaagttgaaatagaaaaatagggacatgattgtgtcccgtgatgtaatttcacggaatgtattccgt

SEQ ID NO: 97328 - DNA, 628 bp, Cannabis sativa
tctaattagtaataagatatatattcagattactaacctagaataaacccacaaaagataatttttatttagggcaaaagaccattttgccctcacttaagccaaaaagtcagtaaaccacctagagttaattttgtcaattctaaaatctcgactaatcctgacattcccaatgtccaactataatgccccgctactactactaaaatgtgattctaatggccaaacgccgcgttccaatgttgccgagcacaaaacatgtaaaaacataaaatttcatgtatgacataactaatgcattctgaattaaaaaaaaaatctccataaaatgataaatcataaatatcatgcaagtttcataattaaatcctaattatctgctaatttctaaattaaagttaagcggtctttacagatatagatgtttctataacttcttatttgcagtagtacaaagaagctcaagataaagttatatcatcaccaaatagcactattcaagatatcaactctgatcagtggggcaccgaatctctgtctccttctttggggaagtataaattgagtgttgatgttgcggttaagaaccaggattgcaggcatggatatggagccataatccaagact

SEQ ID NO: 97329 - DNA, 840 bp, Cannabis sativa
  modified_base (182)..(182): a, c, t, g, unknown or other
agcagtattcgttatagttacagtatcatcctgtaaatttttgaaaaattccgaatagtttacagtaccaaaaacagagttcctgatattccagtttaccaaatgcattcaaaaaacttcaaacgtatttttggcactataaactattcgaaatttttcaaaaatttacagggatgatgttntaagcataacgaacacccccgtgaaaaaaaaaaatattccaacatgtattttcgggcactcctcttaataataaattgctaattgctcatatcattataattttagacaccttggtcatttttaattcattcatgagataagattatgatgttggatagtatagttatcttcggaaacattttaaaagttttgaacgattggatataattatccaaagctcttattttatcccaccaaaaaagtgtttaaatagtcacaaatggattttttttttaattcagtatattttaataattaaaattaaaaaaaaaataaaatatttattttaaaaatgataaattagcttaagttgaaaatttaatgaaataaatttttttgttattattttttttttaatttagagttattacattttcttgaaattatttatttttatctttttgattttttaaatatttatttaacattattctttattaatacaaaacttttaaaaaaatattaaaaaaattatactatatttagtcctgtcttacactataccaaatatgatgcagtaggaatataatttggggtaagttgaaaaatgtctcttttattcatcaattaatcaaatttacctctaattttatgtttatttgaaacatacctcttttt

SEQ ID NO: 97330 - DNA, 1396 bp, Cannabis sativa
cactttcacccctccacccataaaaatgaagtatctaagaagattttagcgatgttaaactatcctatttagcttgagtgaccaaagaagattctctagttggtctcatgtaacaacaaggattctaccttttaatgtgttgcattaaattaaagagggcatctaaggatgtcctccaatagtagcaagggtactcggtacttatgaaattatttttatcaatgaagtgttgaattttatcttttatatgacgttcaccattttatacccatccattcaacttgttttctttacttagaatttgaaattttcaaagtgaacgaaatggaggagcaataaaaagtgcaagtgctagccaacatgagcaactacccaccacaaaaaaaaaaaaatcttcaagaatgtaatgattagctacccttgtagtcaccaaatccacctcatgaaaataagcctagaacgacttgagtcggctagccaaaaaaggtcttgaagagacgcttgcaaaagtagtactatgcttaaaatgagaaggacgattctcgatcaaaaactataaaataataagaggatgattagcccacatggtcggtaagtccttagccataccaacaaataagaggatgactagcccacaggaccgatatgtccttaaccataccaacaaataagaggatgaatagcccatagggttgatacatccttagctgttaggcacacacaaatgctcaaaacaaaacaaaaaaggatcaccaatgcatgaagggttaataagtccttatatgctcaaaagggattttacaagtaaaacaactcgaaaaagaaactctctcactaaaagagaaatcatgaaagagttctcaagagaaataaagtttcgtaagggagcaaccacatgaaaaaaaaaggttgagcgtttcccaaggggcctaaagttcccatacatccaatgagtaactaagaagaggttgagactgctctaagagtcaatactccctctagaaaaggttacacaagagaagagtttgagaaagctaaagtgacgaaatattcactcaaataaaataataactcataaaaggggtcaagatggctcctagagccaacactcccccatagaggatcatagataaaagaccccaaggtacaaatggctaaagaggcaaccatgggaccaaacgatgggggcaaagctcactaaacttagtttacaaggatacatggaagaattctcgtagagtagggagcaagtgttgacccccaatatttgcaaagtgtaaattttggaattcttagtccaaatgacaattaatgccttaaaagtaatttgcaaccacaactttaacatttaagggatgcaataagtgtgggacatctaattataatacgggggtaa

SEQ ID NO: 97331 - DNA, 545 bp, Cannabis sativa
ggccaattaactaaaatatttaatgaatacattaataatggattaaaaaacaaataaaaaatatgatatttattatagtataaaatttgatacgtgccaaatttcacatccatttgacattaccattagagtcagagaaacacacttcgtaaatatatactaaagaatagtaatgcactacttagcatttcattagaaatgctctctaagacatcacctcacaacactaaaagaaagatatctttaatgataattttttaatcacaatataatttttttaactaaatattgcttttttattgataaattcaatgacaaatataatatttatccaattaccaaaatcttattatgaagttaaggtatggtagctatgtgtaatataaatcacacaataaatcactcttacttgagcaattttggactaaacagaaacacataagcctcttttttcattcttttttttatatatatatatatatatagatttaattacacatatatcatttatccaactaccaaaactctatcatcataaggttaag

SEQ ID NO: 97332 - DNA, 533 bp, Cannabis sativa
tccttagaattgacttagtgaacgaagtggagaattgacttagaagcttctgaatggcctcaagtggagctttagtgaatggagctgactcaattgcctcactttttccttcagctatgaaaccagaagtgttagcaacatcccccctacactcacgttcaccccaggactttggcttcgaatttggaggctttccatggattttcagcatctttctttgtagtgtccaggttttcgacagtgatcacaccagaggcgccccttagtttgatgagtatcaggggtagcttcatggaactgtgttccagcagcaagggtagatgattcctgatctgaaaaagaactttgagtacccatcataacctttttcttactttcttcaggacggacttctaaaaatgcttatttgaccttaggaagtggcttggtgctcattattttactccgcactgcgtcaagatttttgttaaggccatgaagaaatttgaaagttctctttctctccacaatagcacgatatagagtagtgtcat

SEQ ID NO: 97333 - DNA, 851 bp, Cannabis sativa
  modified_base (54)..(58): a, c, t, g, unknown or other
gtttgaagatacttatattacatttaagtttaaaattgaaaatatatatatatnnnnntatatatatatatatctaataagtacatatatattgtttaatttttttaagggtacttcaatggtgcacatgaagaatgctttagatcaagtgagtctgataaattgactaagtggaggactgctttaacatctgttgctgatctttctggctggccaacaccattaaggtaatttttattatttagtttattttaattattatgaagatctaaattataacaactcccccattcatatgtaaaacatagaaaattaatgcaatttccaaaaaataaaaaataaaaaataaaaataaatgaacaagaaaatactataccttatcaagcatcctataacaaaaaaatcatatctttaatcacaaaaattatcttttgatgtgattaattataaataattatttttatattgtgactaaaaagttcgtgattaaagacattagtcacaaaaattataatttgatgtgattaaatgtgtttttagtcacatgactgaaaacaaattattgacaacttgtatttaaatactatattttagtcgcaagtaactttttattgtgactaaaaaatcacatttaaatagaaaaaatttatgtattgggactaaaaaattatcactcaagatagttattttttttataatgatcaaacaatagaataatattattcatttaaataagtaaaaaaaaaaatacaatttaatgcaaatattttaattattatttataatataatcatataaaagtatgataaattacaatttaatttaatatgaatttggtacaccaaacaaat

SEQ ID NO: 97334 - DNA, 564 bp, Cannabis sativa
atacatttaaaattttaaaataaattttattttacaataggggattccccgccccgtccccgccccataagggattcctcgccccgtcccggatggagaataaacgggaatgagaattaaaattcttaacggagatggggacggggagagcactccccacccgtatgcatccctaattgggagaatatttgagtagttcattgcatcttaataaattattccatataaatatatcttgaaaatagaagagataagtcggtccacgattaatattatattttataacataggtttaataattaataaaaaaataatattgagaaatttctacttaaacaaacaaacaaacttttcctttcttattaattacaaaaaaaaaaaagaagtaaaaattattgggtttattgtgagatcgttttctttgtacgtatgggacggtcagtgggtcacgtatattagtacaaagccgaaaatgacagccttaacttttatgtgaaaactcaaaagccttcctcatgagggcattattgtcttgttacatcattattttttgagaaattttat

SEQ ID NO: 97335 - DNA, 558 bp, Cannabis sativa
tacttaaactcatatttttgtgccctagaatttttaagctcatatttttcgtgcactatcgtgtttaagttcatattttttgtctcttgttaatttgtagcaccctaacatactgtgtctaaatttatatttttttgtaccttgtcgtgctcgtaatttttttgcaccgtatcgaaaaactcaacccgtatttacagtaccataactaaacgagataagttgagaaatacctcttttttatatctattaattaaaaatactcttatattatatttcattaaaatctacccacttttatgagtgggttgcctaatatactattaaattctacttaagtatagcacatgtttcatattaacgtaaggagtataataaggacatcatctataaaagcaggtatatcttaaagaatatgagaatgaaagtaaaaattaatgggaaacttataaaatagtagaattaggttaatttgtatgaaaatactgtcacacgaattttttttcaaaaatattgtgtttttataaaacaataatggaacacaaaactaaacaactaaaa

SEQ ID NO: 97336 - DNA, 833 bp, Cannabis sativa
ggggtcgagtgtattaaaaatatagtataattttacacaatctattaatacaactcaataccaaatatagtattgtattaaataatactaatacaaaattaaaatagattcaacaaaatcgattacactcttgtaataaagacgtaattaacattcatgtaatattagaaaaaaaaaatgctgttcataattgattttaattaatttggtttacgaagacaaatatatcagtaattatgttctttctttttttaaaaatatatatatataataatcagcacggacataattcaatagagttgtttagaatttttgtatcacaatgaagaaaaaaaaaagattattaaaggagaagagaggggctcctattggattgagtgaccacattcaatggttgacggccaatcacatgggtataaggcaagcctacaacattacgcccaattaatactagctaaataatattttgaattctaaatggtttgaaagttatttattggactttttattttgttaaataataattatttaaattatataatttttaaaattatataaaatagattgtgaattttaatttttattaaattaaaatttaataataatttaatttaaaagtgttataagaataatgattatatatttttgtatctttgtaccagaaattagtttcaagttatttatattaagaaaaaaatttaataaaaatcgagaattcaaagacaattttgcactatttaaaaaaaaacacaaaatttaaattattatttaataaaacaaaaaatctaatttacaatttttacaaaacccaaaatttaaaatatttacccgac

SEQ ID NO: 97337 - DNA, 755 bp, Cannabis sativa
attttttgaaataggaatttttttatgtatattaaatgaaatttctcttttaaaattgtgttctcagaaaaaaaaaaaaaattgtagtttttaaaaaggtaaagtagtttgactaatgtttcttcaaaatagtttttcaaaaaaatggaaaaaaaaaaaacaaaaatcatatttgaatgatgtaaagtaatttgttttttgaaattattttctttttaattttaactctattaggctttgttttctagtttcttttttaaaaaatagcattctaagatatttatttattgttaagttttatataactaaaggaatatatatctccttacacaaaaaaaatgaacatttgtatagttttttttttttttaaaaaaaaagatatttaatctaaaattgtcattaagtacaatgtgtctaaaatgatacttttaattctaaaattattctcctatattaaaatatagtaaactaattcatgtttgtataagcaatccacatagtttgagcagtacgatccctacaacgtgccattactacagcagattaattagataaattcacttcagatcttgatacactggtgctaactccttctatgttgtcttctcctcaaattcttttctccccattctctaaacatacgatcatgatgtgtttgttaacgaataaaattatgaaaagcacaacaagcaataactatcatagtttgtcgagtcaatttgtaacgtggcatcatctttagtataggaaaacgt

SEQ ID NO: 97338 - DNA, 614 bp, Cannabis sativa
atgagtgatagggaactaggttccaggtcttgtttttaatcaatacattgttctcttcttgcattgaagaaaaccgcttaggattagcaagagcttgcttcagagattgtgattcattaggcaagagagattctggaagagtatatatgtagttgcattgtaagtttttggttttgatattccaaatttagatcttgtttgcactgaatgagagttaatggtgggtactgcgttgggtgtttgtagggtaaaattttgtggttgctgagtttaaaggtgtggctcttgacatgatgtaggataggatagtgtagatagttggtgatttgtgggatatgagggtagaacaaaaccagatgtagtagcaggggaaataggaggcatagacctggaacatgaactaaaaaaaaaatagcggtagctggaacagagagacatccattaaatgttggtggttctggagcaacaaccatagtgataattgtagttgctgatggatcttgacgtgcgattgctgccacatgagtggataaaatgtttcatattgtcaatacaatacaaagctctttcaagaaattattataacatacttagttttattaatatactaaatt

SEQ ID NO: 97339 - DNA, 875 bp, Cannabis sativa
ttttaacggctaaaaaagttcagggggcacgattaagtacatgtgaaagttcggggagaaaaattactaattatccttatataaactactgaaaagaagaaaaaaaaaaggtttgggcgactactcttcaaaatagtcgggtaaattattattgatagtttaaaagattgacacttaccaccaacacaaaacggaataaaataggtgtcggctcactgcaaaaaaattagattttttatcataacattttagctataacaaaaataatttgtgactaaatatgtatttttgttacaactcataacaaaaaaatattttagttacaatgaattttatgtgatagttttaaaattttaaatatcataattagtaaaaagttacaactaaatattgtgatcaaagagataacaagctggtgtggcatttttgattggccttccgacatcggagagtgattatcgaggtcttccaacagcctgtaagagaaagtgctcaatacagtagttttggcaacattgtacactgtttggattaatagaaattgttgtatctttgagatgaaatgtgtaagacaaaactagagctctattgagtaaagagatcaaatcttgtgtaaaattcaggttcttaagcggctataatgggggaaagagaaagcttgatagctttatttttaatgtaatttcaggttggctttgagagctggggtttcggccagctgctttgttttgcttttgttctttgtattattcttgtctgtttgaataaagattcttcttcttgttcaaaaaaaaaaaatatatatatagatttttatcccttgaaagttgaccaatacaaaaaaaaattcctctttaattcaaaaaaaaaaaaat

SEQ ID NO: 97340 - DNA, 536 bp, Cannabis sativa
caattctataaacttataatatttaattagttggcgaaaaactcggtcaacagatagcaacagaaattagtgactccttctattcaattactctaacctttgattctgtttctgtagcagggcattgccaagtgatgaatctggatagctttcttaaacctgataagcgacaaaagctacatgatcttccataaagatctgagtatcaccttgaatagtatgggttgacactcaactcactattggaatggtttgagaagagaaataaactaggctatttcgaaaataatagaaagaaatagagagagctttttcttatcaagtttaggctagtatcacatagaatgagttgtcttccaaaagtgtctcatctctttccttatataacattacactggggttaactataaatgatatgggctaaaataaagacaattgggttcaaataaataccatgactgaaactttagaggaatgaaccatgactttaatttttttttttccatttttttccaatttagcttaaatgaaacaaa

SEQ ID NO: 97341 - DNA, 552 bp, Cannabis sativa
  modified_base (61)..(62): a, c, t, g, unknown or other
cctatttaattaaaaattattagaacatataattaatataaaatttaaattttaataatannatattttattcacttatataatcttctcgagaaacttcgttaacaaattgtaataactaaaaaataatttttgttttcacatataaaaatttaaaaagaattttatttgtaccctaaaaatttataagtatactttattttagtaatttttttacataaaatatatattttaattatattaatttttttaattttttcttctaattgatattcttagattatatacgtacataacaaaattagattatattttaaatattattaaaaaaaattatataaaattttattaaaaaatattttttaaaagaaatttaataaaaaaaaggggctttttcatttttacacttcaaaatatttttgtttttttgcattttacgaaattatacatagaaacccctattgcaactagcgctgcaacctaaattgaaacaaaaaatcgtatagaaacccgtattgcaattagcgtagcaaccactttagaaatccaaac

SEQ ID NO: 97342 - DNA, 507 bp, Cannabis sativa
gatgctctcatccaaggaatgctcattctgccaaaaaaaaaaatgaatgacctcatccacccttattccaccatagaaaaatggatgctctcatccatagaatactcttattccataaaatttaaatttatggaatgctctcattccattaaatttatagatgccctcatccaagaaatgtctttgataaaaaatagatgctctcatacaagcttaaaagagaaagaagaagcagagatgaatttcctctgttttgtattgatactaaaatgaatctcacaatattacactggtgcaatggcacccatatatacacaaggaattaaatcacgaggcctaatactattggccaaaggataacagagaaaatattctatatgggaccactgtcaaaatcaaatcattccttgtaatcatttgcaacgtaggaatattccctttgcctaatcatcagtatattccatattttgtatttgggcagcttttagacctttcatttcaacatgc

SEQ ID NO: 97343 - DNA, 520 bp, Cannabis sativa
ttttttatatacataaaatttgtgtttatttgtaattttataaaataatataataaaaaaattatattgattgaaatagaataatatacacaaagttttggtattgtgattgaaatataaaaaaaattatgttagaattctatcattttttatattgatttaaaactaattttaatatttattattgtattatttatatatatatatttttttggaacaaagatcagttaattccttttctctttataatacactgccaagtggcatgttatagtcaacgactactcattcaaggagacaaagtacacaaaaattgtgattcatgattgattttatatattagaaaaaagatttggaaatgctaaaaagagtattagtgcaattaactacttataatttaatgtaataattttatttaatatttctaactaccacaaagtactatcagtttacatgatatttttttattattaaaaataaacatgatattatcttgaattaataataaaaataattatga

SEQ ID NO: 97344 - DNA, 794 bp, Cannabis sativa
atttttaagtgattgtttgctagtgtatattaaaaaaaaattgctaaaaaatttagcataaattcaattatagatgattttcgtgatatgtaagagagacatcctatattttaattttaataatatattttaaattatttgtcgcttaatatataatatagtttggccctctctaaatttttaccctgactccgcccctggaggtggagtccagtgctctgtcaagatcggggtcggggccggctgaaaagaagtatgtaactttacaaaagaagtacaaataaggttgttcttcgtaggacaagtccgactgtagtttaagggcttcgtaactcaagacatagtcgggtctgaaacatatttccttaacattgaaatataaaatacattatgggcaatcgataatgctggtggtaagactagccaatacgctacctgcccgaccttctcgagtatctgaaatgacccaatgaacctagggcttaactttcctcgttcccgaagcgtctaatacactttattggagaaactcgtaggaaaacatgttcgcctgcttgaaatgtaatatctctgcgcttcaaatcagcataatgtttctgcctgctttgcgaagcaagcatccgagccttgatcttgtttatggcttcattggtcttttgaactaattctgatcctaagtacttcctttctctagtttcatccaaatgaattggggagcgacatttccaaccatacaacatctcataaggaaccatccctatcgtactttggtagctgttgttgtaggagaattc

SEQ ID NO: 97345 - DNA, 688 bp, Cannabis sativa
aaccgttagtttattattataaatcaaaggacagtagcatacattttttttattgaattttataatgaaaaataatatgtttttctagtatactaaataattaaagaaaaataaaaaattcatattctagtataagtattttatttttataattaaaattttcaagactttttgaatctttaaatttaataccataaaaataattataattaaaaactttaacactcttcttttgaattgtaaatctaataccaaaataataattaaaaaaaattaaaaaaaaaaattaaccccaactgaattttaaataaaataccaaaataatattataatagattaatgatattatatttatatagctggcataacttttgtttagttattaaataaattactttatataaataaatattaatataaggtaagttcaaattagtttataattataaaatgtatagtaagaattaaaatttttaaattatttattaaaatataattaccatatatataatttgtatataaaaatgagaatatgtttctcatgaaaatgtataatttttcataaataaattctttttacactaatataataaaatttttaggaagaattattccatacattatctttttccaaatttatgttttaggttgatatggtgattattccggtagttgttacggtggttta

SEQ ID NO: 97346 - DNA, 700 bp, Cannabis sativa
  modified_base (81)..(85): a, c, t, g, unknown or other
atttgccaacccccttttgccaacacatcacaagtaaattctattttaccaaccaacttttgctagcacaaaaatgtgctnnnnnaagtgacatttcttgtagtgatatgagagagaaacactatagtttagcactcttttatgtgtcaatattgctattaaccaaattaagtatcgaatctcatatagttcaatgtaataacttttaaaaagtatcattagccaatcgcaagacgacatatttagaagtaatagacaccattggtatccaataacaatgctcatatgtatacatattctttttaccttgaaagtttgccctaatttatattcattagagcattgtaataattaggcacactaatacaaatactatcactataagaaaaaaaactacatttaatgtcaactttttagtcacaacataatttttttaactaaaacatagtatttagatacagtggcggcggacctaagatttaattttaggatggacttaattatacatttaatataatttaatacaattaatgacaagctaaatttaagtggaatgatagtttagcaacatcctcctattctagtggtataatgagttaaaatttggtttgaactttataattcctatatatgaaagcaacaattatttattaatatattttcaaatttcaaggtgggctttagtcctccctcaacaccc

SEQ ID NO: 97347 - DNA, 905 bp, Cannabis sativa
tatccactaaaatccctacagcctgtaatcttgaatatatcaaaggactcgattggttctaaatcctagctcgcgtctatatgactcgccgtatctgtcgtggtgccatattgctcggctataccataatatgactaatgaaagttgatctggatgtggaatctagggtaccaactgtcgaacctatgaacaacttggtctacgagaagggaatcccaaatataaaaattaaggcgcgtgtctcggaaggtgactaatgtgttacgttcaatcctaagtactgagggagaccaaccgcattgattaccttgggacgctcctttgccggcttccctaggagcagtgttttgaagatactgtgctcgagccatgtgatcccaagccttatcctcctttggaatgggaacctgatgctaagcagaatacttggaaaaattataatcacaagtatactccttgtcagtaagagggcccaccgatctcagattggcctcgttcaagaggaagtcgcatgacctaaggccatgggtaagagtcaacatgtgcttgtgccgactgaccatctcaagagtagggacgagtctttttgagagggctgtaaaaaaacaaacaacacattggtcagaaaactaaaaaacaaaaagcattaattcaactggtcatgatgaaaacaatcacttacaaattttgcgaaagatggttgtgccgattgcggaaaggccagttgtccaaaagaagttatctttgaaagacactttgtttggcaggtccacaataattttaggcttgctagaatgagcaccaaataatagaagcccactgcggcattcttcctcgcaggaacagccttaaccgagtagagatactcaatttctactggtgtagggcactcccacttcagaatt

SEQ ID NO: 97348 - DNA, 815 bp, Cannabis sativa
atccacataattattaatatttataacaagtattaaattatagactatttaaaaaaaaattccctccaaactataacatatgtattattgtatctctcattatctcagccaattaaaaatagtgctcggaccattcaaagtaacataaagttgtctttctgttaaaatatgtcacatgtgattaacaaaatgttgatgtctgctagtccattgccacttcaccaccacaagtataattttaataaaaataattttaaattttaattataatattttcttattaaaaataataaatcaaactaaaattaatattaatcaatttttttattatgtacttttcttatcttggacaagatctagtggtgagatcagcaaggaagggctccaagtcaaggtagatcaaagggattgcagcgagatcagaaagattgtgcttagcttaggatgaagggagatcgaggggctacattggggcttttgcaaggtcaacatccattgatgaaagcctcgattgatgatgcatcaatgagagggaaggcaattgcgtaggagacaatgctacacaaaataaagaatttctatctagatctaagagcaatatatatttatatatctatatatattttcttagtaaatgttcttcattttcgttcattgaaaaaatgaatttagctttttgttatttcaattttcacacagggtgatatatgatatttaataggagtgacacgtggaaagcatttctaaagtctggacgagtagtttgccttcaacaatctgtctagagagtttcaggtgaacctgattaagtgtaa

SEQ ID NO: 97349 - DNA, 508 bp, Cannabis sativa
atccaccggcactgcctccacctccgtagaattcgggggcttatgcagggttggcaatgctaatactcctgctgactggcagaagatgtttcaagaaatgcaaagtgtcatactttgtcaggaagaagagtcgcatcgtttaaggcaaccggctgcccctgtagaacaagtgataccactagcacctgtgccagtggtgggtaaccaagggtttgttatgccgcatcgagattctgtatttgagtggtttgtgaagctgcaacctccaacctttctaggaggtattgacataataaaggctaagcagtggatgagcactattacccgtatccttgataatatgggagtgacatgaatagagagagtgaactgtgcagccttcatgttgcaaggtcatgcctgcctttggtgggatatcgttggccaaactcgggatgttagtgtaatgacctgggaggaattcaaaaatttgtttgaagaaaagtttacaatatagctgtgagaactt

SEQ ID NO: 97350 - DNA, 622 bp, Cannabis sativa
ctattgtaccggtagacttttagagctcttcagtctcaaagcaaagaggataatgtgatccttggacgacttgtctctagcacggaaggtggtccttcctgacaatgtcttctagatatgatatacttaataagtctacgaaaataaaattatttagtttcttttgtgcattaaattaatttagttctctaacatttttagaatactttagtaactttttattagttttgaattactaataattttagtattttttaaattaattttcttaattttgaattaatttttttattactatccataattaattaattaatcttgatattgtattttttgtggaggtctaaatgtaacttttgttaatgcttttaaagctaattgtaattgaaaaatactttaaatgaaataaataattgaattgaattaatatatatagagatagaatattcaactttacttaattaacattgaagtaaatatcaagaaatttcaaagttcatccagtgcagtctcattctcatgtagttgtagagaattgtgattgaaatattgaacattaagagttttcagtaaaataaagttacgaaatctttagattaattaccactaccacccactagta

SEQ ID NO: 97351 - DNA, 509 bp, Cannabis sativa
taatatatttttttaaaaaaatgaagaatattatggttgaacttaaattataataaacaaaaaaaaatttgaatattattatatttttttatacatatatcacttaaattatacattttttttttttgaaaaaacaataatattattcattaaataacattaataaaaatcaattatacaactaaaaatataaataatctctagcgaccaacaaatttttgattttatttctaacatataagtaagtttgtcttttgttatttttatggatgttgatttgtgtagcatttgctctgatttgattgataaatttttctcttttagtaaaatatagatacataatccaaataaaaactaagaatctaactaaatatacgtgcattgcacgtaatattaacctgacattaatttaatgtgtgtttaatattttatatattttttaaagtaataatatagtctgcaattcaatcgggacatgattaaaattagaaaaacaaatcaaataatca

SEQ ID NO: 97352 - DNA, 544 bp, Cannabis sativa
agttaccaaattgagggccattttacatctcaaccctaagtttttacattatgagtatatatagggcaagaaagataacagcccaataaacaaagtgggccgaaaatatagtgggccagtatcattaatgggggccagctaatttttaataccctcctctcaagatgaactatatatgttttttaagttcatcttagtaacaatagtgtaaaaatagcttgaaaaaagaggcttggtaaggatgtcaacaatgttgtttttggtggtgacatgaattagctttagtgagccttcttggatcttctctcagacaacatggcagtcaatctcgatgtgctttgtgcgttcatggaatacgagattttcggagatgtgaatggcgaaagtgttgtcacaataaacgatgaagggatctttgtgttggatgccaaagtcacgaaggggtgccaacaaccaagtgatctcccaagtggcatgagccatagcccggtattctgcttcagcggaagaacgagaaacagtggactgcttttttgatttccaa

SEQ ID NO: 97353 - DNA, 527 bp, Cannabis sativa
attcttcaatttttttttaaatttgttttgttatactttaaattttttttcttaattcttttattttttctatttttttattctactttatttaattaaagatgattgataattaaaaattaaaaaaaaaaaagagagataactatacctttgtatatattatctaataaataaatatatatatatataataagaaaattaatctatatacaatcttttttcaaagagagatatagttaatattaactaatataatttacgaaaaaaaaaattaaataccatactaaaaatatcaaaattataaacttgattatgtttatcacccctttctcctcacataataaaagtaagtacttactgatcattgtttaatttattttatgtacagagcacacttattagaaaagatattaatgatgtttacaagtgaaatacggtgatgacattaactttaaatatagtgatgattacatataagatacggtaatgatggttgttttgatattatatgatgatgagttttctat

SEQ ID NO: 97354 - DNA, 540 bp, Cannabis sativa
acactttgagagaacgaacatgttcttgctcaatcaataaagaggatttggtgttattctagacatggagtacagccatatatcacatcgatctatcgaacttgaaccaatatatatcttggtgtcaattttattattttaccgctttaattatttctggttgctcatactttgttcatctctatttttctctgattactgcttgtgtttgttaatcttgtcatagtaccatcactttgagggaactaatatcaccacttataaagaacaaacatacaaatcactttactcgaacccaataacacctcatttgcaaagaaaatgtgctcaaattaccaaatcatcaagtgatgtgtccaaaaatgttaagggtacactttaaggcgctaaacatcaaaatatataacatgctattattaataatagtgtaatttactagtttcaaatattttaattaaataaataatataaattatatattaatatttacaatgcatcacataaatatcttagtgccaaatacatacatttataaataga

SEQ ID NO: 97355 - DNA, 817 bp, Cannabis sativa
tattttatgaggaataaatatagtttttattttttctcttttggatagaatcagcaagtatggatattgcatagaggaagtatgctattggttattaggtcccattttaattttaagatataataggaagtttcaagtttatcagttacttagagatagaaattaggtggttattgtacgaggaatgtaatcattgctatcaatttatgtctccatccttgttccatctctgtctaataactattggattcggtgtaggagaatattcatcggttatggagaacctattaggtgtccattaaggcaagatgaaaaaaaaaaggtaataatttaaaataattgatataaatcttacaaattaaaaagtaaataaagatgaaattaagaatttagaaaaaaatatattcacactcgtgatccacaatgatcatcaattattaccgtcattagattttcataatttaggcatatggtatataatttttattatagatgataatcgaaataattttgattatcaatgatatgtatactatacacgttaaaaatagaaaagaaattatatatatctatatcgagatcagatatgatatgaatagtatcattcccgtcttcgccccattttcgctttgggtattgaaattattccccgctagtactaccgtcccattaactgctaagacgagaaatctccaccccattaggagtggattcctgccgttaactattcccgtagtataaatttttatcttttgtaaagaccgcttagtttaatttggaatttagcagttaatcatgattaattatgaaattattt

SEQ ID NO: 97356 - DNA, 561 bp, Cannabis sativa
acgcctatgttagttaaggtgttatagatttggtatatgtcaaagttcagggagaaaaattactaattagccttttttaaattatgatgagttttgtatagatttatgagtaatattttttaaattttatttttttcatatatattatataaaaaaatatcaaaatttgaaatttaatataattttataaattaattatcgctaaaaataaatacaaccgcacgcgaagcccgatttgtttactagctgtaacatatttatcagaaaattacatctcatatactttttctttagtagaaaattacctccttaaactatttaaaatattacaaaaattatggtcaaatgtacttatagtatttaagaatgtattttcaaaaatagtatttagaatattaaaatactctatatccaaggtagactaaaaattatgggaaacacagctcaaaataagtgtttttttttttttttttgatactaatgaagaaattgttgaacatttgtggttcaattgtaaatttgggagctacgtactgttttcagcagcttcaaatctagctc

SEQ ID NO: 97357 - DNA, 537 bp, Cannabis sativa
ttcaaaatataaatacttaaacaataaaagttcatacataaacatcctaaataaaataaacaccttaaaagcttacttctaacaaaaagccctaatcatctgctaaatctcaaaataaagctaagcggtcattacacagttagagtattaaaacagatatacgaaaaaaattagccattcagtgagtaatgatgtattttaaagacaatatagattatggaattctatacaattataatgaagagatcaagtttattgattattgtgatgcaatttttttctgaaaatcatgatacttgacgatcaattactgaatatatgttcaagattgaaactggtttcgtttcttggtatagcaaatgacaaccaattatatgttattatcattcacaggtgtagagtatagagcaacaactatgaaaacacaagaaagcacgtggttgatacaattataaaaagatttacctatcaaccactcaactactcagtaccattgtactatgacaatcaattagcaatttgcttaacaaaaaatct

SEQ ID NO: 97358 - DNA, 545 bp, Cannabis sativa
gggcatggagtcaaactcatctgaagtccgaagctatgcttcccctctaggattatttcattaacttcctcatttttttgggctttcagcctactaattgattctgcaagcctattgcctattgtcaggcttattcattttttatgtagccagaaactgggctccgcctagtcctgcaaatattttgtatttttatgaacttctttcactccccaagcatggggacaaatttaaagacagtttttataaatttcagccccattcggccaatgagaccccaatagcctttaacttccaaaagaatgtaaaggagtatcgccacagttttttcttctcatccgagttcaagagttttgagcgcccagatctattgactgactaggtcaggattcccccatgcaccgtaccgctcccacccaactcttcctaaaccatgcgcaagtgttcgctggatacaggaaagaaaatttgaacattggtgacctagttacgatggtcaactgtaagaggcccaagttgatcctagagagtcaatctattgatga

SEQ ID NO: 97359 - DNA, 558 bp, Cannabis sativa
  modified_base (268)..(271): a, c, t, g, unknown or other
  modified_base (358)..(376): a, c, t, g, unknown or other
  modified_base (425)..(437): a, c, t, g, unknown or other
gtgttggctgagtgactctagggaccatgctttggccaaacccttcataatcggcattggccgagggactgtggggttactctctagctaagacatcttcttaactggcgttggccaagcgactccggggtcactctctggccaagccatcttcgaaaccggtgttggccgagtgaccctggggtcactctctggccaagccatcttcgtaaccggcgttggccgtgttgggttttgtaccctaaattaaacccatttcaatataatnnnntttactaattaataaagattagaattcattttatgttgcatggttcacatgatttattttactattataaattctattaggtccagnnnnnnnnnnnnnnnnnnngattatagtgttgttagcacagtctaataatatgttcaaaagtttaatnnnnnnnnnnnnnagttcactggatttagactgtcattaaaatcagtgatagggtatacttacaccttggataagtgttatgtcctttccatggcattcgcaaagtttagcagtatcggatgtatggagtacac

SEQ ID NO: 97360 - DNA, 601 bp, Cannabis sativa
ttttgtgtcgtggtcggatccgtggcatgttttactcgtgttggcctgtatttcttaaacaggtcaaaccattttcaaatcccattttaaatttggctttattttttcatctttttgtttacaattactaaattatatgtatattttaaagttttagttatatttatataacttttgaataatattttacaaataatcatataaaaaattactaacatttatattacatcatatatcaacttttataaattatttatttaatatattttaaaaattaaataaatataataaattacaagaaccgctaaaattatattaccaactaggtttcgagcttcataagacctgttaatccactcatcaaatttcgagggctaataaacttgccccaatttaactggtaatttcaagaagtactttaattgcagtcaaaaaataagtaaaagtgagattcattaacttcacaagagaccaaacaaagagaaagctcaatcgaaaaaaaattcactaaagtcttaagtgagaaggttctcattcaaagtttgccacaagatcaaacgatcttttaggatctaaagcaaactaataaaatagatatata

SEQ ID NO: 97361 - DNA, 588 bp, Cannabis sativa
  modified_base (187)..(194): a, c, t, g, unknown or other
gtcttaaaatgtttgttgtacctgtactcgtccttaaaagcccaaatctggctagtcaactctcagcggggatgaccggccgctggcatcctcaggctcaagttccccgccgtccactaaggcatgactacacacgcatcgtggggtgcaagaggcgctggggccaggcgaagaagctaagacccgnnnnnnnnacgatgactaactcatgaagggtcttcaggtataacgactctatccatcttgagactccagtacaggtttgacgcgaggaacaaatccattgccaacggctatttcctttgccttttcactgagccgtgaagttgatcaaaaactgatcctgtaatgacagcagctaagaggagaccatcagtaccgtcgatgcctgctagtcttctagtcaggcctaattatggtactgttggttaaggaaggccgtttttggcaaagttcactgtaatatcctagaaaatataatgatatttaattgggcatattttattaaatgtggttaagtaggtattagagtaggattataatcatacttaagctaattacgagtaaatgaataaataaagcgtaatt

SEQ ID NO: 97362 - DNA, 556 bp, Cannabis sativa
agaaacacatgtttgaaagtatctccctcctcttcaccacataaagcacatgaactagggggattaacaaacacaacagagagtcttgaaccaattggaagagcattcttgacaagcttccaaacgaaaaattttaaacagttatggagcacacttggagacacgtggtaaaagaaaaacatctcggagttgagtagtctcgagtcatggcagtcaacttggaagggttccctagacttgcgcccaggttgactccaaacactccaaaatgggtgtttggatcccactaagtaatttccaactcagtgtcttttcatattctgtaccatgaagacatgaagaatccaaatcaaacgtctggaagctgaaaatacacgaaacaacaaccaagaagtcaacccgggtgtccagcgttgagaaccctactagggttttggtttttgggtccgtcttagtgtaaatgagtcataatttttattgggatatgaattagacttatcacgaacatatttgaggcaatagaaccagaatcggagcactttcaattttgagcact

SEQ ID NO: 97363 - DNA, 3992 bp, Cannabis sativa
ggaaaaattattttgtcacctaacttgccaaaaaaggactttacaacttataatattcaatcctttgcacatcggatggtacctataagcagagttattggctgccaacaacagtcttcttgtgagatattccatgattaacacagataacaaaggggataaagggtcaccttgcctgaggcctttttctcctttaaagcttccttggagtctaccattcatcatgatagagtaggtagtagctctaacacaagtcatcaaccaagcaatgaatctagctggcaagttgtaagttgtgaggagaatttcaagaaattctcagtttactgtgtcatacactttgcttatgtcaactttgatggtacatatagaggaaacattccttttattataattcttctgtagaacttgaagaatcataacattatgagcaattgatctccccttgataaaagctccttgattttgatggactaagttagtaagcacctgagcaagcctcaaacaaagaaatttggagatgcatttatacatagagagcagcatgctataaggttatagtccacaactttagcaaggatatctattttccgcactaaggatactattgtcgcatgaaactccttcggcatatatcatgtgttaaagaattttttaattgccttagagacttcttatcccaattcaagccacatctgcttaaaaaaacctgctccatatccatcaggacctggagattttgagtcagggatgctaaagagagcctctttgacctccttgctcgagaaaggctttaacaagcttagttgctgatcaagattaattcgagtacccagagccatgctatcatagtttatacttttcgaaggcatgctctgagttcccatgtagcctttgaaatgagcaacaaaatgatctactactttgggaaaatgatcaatactttctccttggtcattagtgtaaaagacaatcctgttctccactcttctcttcttcaaacacgcatgaaaatacacattattatcgtctcccttattaagccaagtaaccttgcttcgttgactcaagaagctatgatacatgttttcaatcatgcaatatttatctactgcctccttttcctgttgttgtaacactagatttctcggatcagcttgcgaattcatctttgctgcaatgagcatatcctttgctgcctcatattctttcccaacatcacctataacatgattattgaatctcttgaaacaatgtttaagtcgaacaagtttgaagtaaagagtcttcatccctgtacatctcaaaggtttgttccaacttttcataaccacattcttgaattcaggatgataagcccagaaattgaagtacctaaatggtttaactctaattttttcactcaccttaactgaaaccacacaagcattgtggtctgatatagtttcccagctatagtgagctttagtatttggaaagctgtcattccaatcctcattagcaaatatatggtcaatcttggaataaattcttttatgcccctcttgattatttgcccaagtgaaattggagccagtgagcaaaagttcaagatgtctctgagcaagccataaactagcatcctgaatatcactaagagtcactgcaatatctccttctctatcctccaaatcaaaaagagcattaaaatctcctgcaataagccatagtttaactagaaattttaactttaagagattactccaaagttgtttcctctcctcatttgtgttgtaaccatacacaaatgtgatgcagcaagcattattttggccatccattttgatgtagcattgagtatgttgagcattctcctctataacaatgacccgaacaaagctctttctccacacaataagtaagcgaccttctactgtagaactagtataataatcccaatcaacaaatttcttttccatgaattccctgactttaatccctctcaatttagtttccaaccaagtaccaactcctatcttatttttagaacaaaactcataaacagtttcctgcttatctttattattaatacccctcatacattccaacaagctatattacaactatccatgtttgtaagatcttgaggcaaagccttgcgagttgcagagaaaagaaccaagaataaagatgaacaaagtagcagaaaagcttattttctttattgattaaaggggtatatatacaaagtcattagaaggaaaacagacaaaactaactaacagaaaaaggcagttaaacctacaaactaactgcaacttgtacacgtattaaacagaaataacagtattgacaatgtttaagtagagaattacccgatacctccgcttctttcttcttttgatcaacctccagcccctcttcgtgttccggtaagattttatttacagaaaatacagtctttgatattttcatattatttttatgttttatttttatcattttgttgttaatttttggttatttgtatattatttttatgtggttttcttattactttcatgtgatttttctgtgttgtttttataaagcatcgtaaaaatataataaaaacatatatttgaacgtaaaaatataaaattttaattaaaaaataatattttgtgtaaatttctcgaaagataatgcattgaatatattttgctcttatttttaagagatagtaaaataaggagggttgagttttcgaaacataattaattagaatgtggtagtaattggaaagtatgtttagtgcagtatcaagtatcgacaaaataagataatttgtgaatcaaatagtttacaatagatggaagaatggtggagttacaaagcccgagtaacaaataattggtattgaaagaaagtagtggaagtcaatgagagatttaaaggtcttaaatatttcaaaattcaactctaaaatatatcagatcaaataattattcattcacatatatatatttaaacttttttatgcaaaaataccgtggtttaataaaaatcaactgataccataatacaatttgttaatattataaatatcatattacatatcaattcagacacttgtttctaaagcaaaaattatttggtgatgaactcataaatattattagaaattatgattatcatttaactaattagttatttatgatcatctaatattatcgttattctatcattacttatacaattttacaatagagcaaattatatagatattaatgaaaataatttaaaattttatactgacttttgtgtatttttgggatagactttggtgtattaagaattcgtatcatgataattaggcatataattcgatagtggatttaacatttatactcttacaagtagtaggtgccactattttgagtaagtaaaaaacttacaaccaaattaatctttatatgatgaacactttaatagttagtcataataggcattccattagttttttagaaaattatgaaaaaatttcactccataaaagtacaccctcctataagaaaataatataataagtagaccaaattaaggaaaaaaaatataaggttgcattggagaaaagtaaaagaagaaacaaatgatgcaactgagtttaatgtgacataatatagaatgatgcaaccgctttcaaagtggcataatagagaacttgcagaatactttaaaaataataaaatattgacttcaaagttatataaaaatagagaattatatgatacagacaatgcaaattcattcattattatttttttgaaaaaaaaattacttaaacaatatggatctttgatttggtcagcattaacagtgaatttgggctgctaatatagttgttatatgagatgggttactgacatggttgttgcaagagttgtaatatggttaatgtaagagtttccaacatggttattgttgtaaagattctaatagggaaatttgattttctatacttagaaaatcaa

SEQ ID NO: 97364 - DNA, 696 bp, Cannabis sativa
attatattaaattatatgggacctcatatttagttggaccaatagcgatattgacacataagagagtgctagacaccactcgtaccctttaatatttgtcttatatataatataaatagtcaaatcaaaagagctcatctacacatgtacatattggtaatgggagactacttacttctataatatatagaattctgttggttttttttttttttttttcaaaaaagactatataagatctttttttccagaactatagcttgtattttgttgtgacccctagtttatttgaaaagaaaaacaaaatgcctcaaactattaacagtgttgtataattcaacttctatccatttcttatcatataatgatgatgttaagatttacatggccatcatttaacttgcggacactgtgtgtacgtagttggcactatcatgtgtataatctaaattaaaaaataccacaaaaacatattttaaataatttaatcaataaaattaatttaaattattgacaatcctaaatagcctattaatgaattaatttgaaacttttaaaattaaaattgtacttgaaatttagccacaaaaattgtacttaaaattcaattacaaatatttatatatgttaataaagggcattttacaaaaatactggatttagggtaatacttttcaattttactgccacacggca

SEQ ID NO: 97365 - DNA, 697 bp, Cannabis sativa
  modified_base (27)..(34): a, c, t, g, unknown or other
aataatttaaagaatcaatttaagaannnnnnnncataaattgatcatatttataagataaatatggactcatcaataccacactagaagcatgttttccagttgcactcaacgagggcactcagggtaagaataaccctgacgtcctcctctaccttggttctctcggaatcttttgttttgtcccgaaccaccagatgtatggaaattctttctcttatgatcaatggtggagtcaccaccatccctaccatattcagaagtaggaagagtggtggtcccactaacacttggagtctctcggggctcctaaagaaatttcactacaccttcagctcgaagcgccttctttacaatcccagcataagtcgttgtatcgcttgtggtaatcaccagatcatgtttaatcttggcatttaaacccaccaagtatttctttttcttaccgaagtccatgggtactatacccgcagctaacttggctaaacaatcaaactttgttgtgtattctgttactgacatgccttctccctgaaccaaatcagtgaattctttccacttagaactgggaattatcttgttatagtacttggcattaaacaattcccaaaattctttccaggtcatagtggtgacgtcttgggtgagggacactaactcccaccacatgagtgcgtcttcttggtgttgggtttta

SEQ ID NO: 97366 - DNA, 637 bp, Cannabis sativa
gactgttaaaaattcccacacaaccaccacagtattcttcaacggtaccaaataatctattggaaaataaataaactttgggccatcgaattttgttcaaaaccaaataatattttttaattcatggatttcaagaataaattttaaaacttgaatatcaatattggaaaataaaaaaaaaatcaaaatctctaaccttgtaatttgggcagccatagaattttctgtttggattatccacagttcttcacgtgcggattacagattcaaacccacaaccacagatgggtctactccattgaatctcttccttatacctcctaccactgttgactgagttgctagattgcgacattatgaacgacaatgaagaaatctagataaaacatattattttagttatatataaacattctcaaaatgataaaacatttctccatcaattctttattattccacaagcaaattacttaatcatcaccattatctcgagatagagtgaaaagaataaacatatatatacatatagaggctgtctcattttaattaccttttccttaactatctcaatctggtctttgaaaacttgattctgaaatatataagataaatacaaaaatgagtttttcatttaaaa

SEQ ID NO: 97367 - DNA, 510 bp, Cannabis sativa
ggggtccactattatgaatattgttaaagcagaatcctctccaaatcagtgcaacggtattagaggatatactctgcttagtcagcagcaggggtatcaaatgcttgttgggcctcttcatcatattgggctgcttctgatcctttcatttcaacaaattttaagtactttataatactaaaaataaaatataaatattttattattttttttctttatatgtatgtgtaataagtaagtgtttaaattttatctacaaatggtcctaaataactgcaacatagacgatcataaaaaataaattgaactaaaaattctaaatgccgaaacgaatagttggtctactaaaattcccttcaaagagtctaatgcgtaaaacttcaaataccatatgtacaaaaataattttatccaatttttcaaaattcaaaaaatttcaaatgtagatttggactctagtattcaatctcatgaatcaaacatgacataattaatatagaggcgtaaata

SEQ ID NO: 97368 - DNA, 1233 bp, Cannabis sativa
tgtcttgtcggtggtcttcctcttctggtggtgttctatcctcctatgtaatcgcaagagagttcaaaacaaatattaggggagaggtttaacaactaaagcatacaatgaagatggaaatttaattttagaataagataaaaaaaaaagaaaaagaaaatataaagctgaaaataaaaaatatatcccgtaaaagtggaaaacaaatttaataaaatagtagaatattgagcaattctctaataaaaaattatgtgaacttttattaaaaaataaaatatatatatatatgtacataatttaaaatatattatgaaaataaaatttaaataaatattaaaattaatacaaaataatatgataaaaaaaattgaaaaaatattaagactgatttttaaaaattattttaagcttaatttttttaaaattttagaatgcattaatcagtttgtaggatggaaataaaatttttcatttatatatatagatggataattattaaaaatagtcattatcccaccaacagttttctcattctatatgtaggaccatcctcattactttcatttttttaaggtttatatgagtttgtacatgttgatagttctataatctattaactcaaagctagctagcttttattttgttattattatttatttatttggtgatgagatgacatagcaaaacttataatctattgtcattgttaaaaatgtgaatattatcaatttaactaaatttataattgagtataattacctggtttttgaaattaaatgcaaacactcccctaattatatctttcaatttataagcaaaaaatgtaaccctacaccattagttagtcaaaactaaatttaataaaatataagagcaaaaatactataagtacccttctacctaattataaatttaaaatagtgtcaattttgtagatttattgatatttaactactacaaaaaaaaacttagtttttagtaaattttttatataaattgttactaaaagtgaaaaatgtcgtaactaaaatttttagtcacaaatttttttaagctaaaaatttaaattccaataaataaaaattattaataattacaagtaatttttgtgactataatagatattaagatgtcactcttcattggccactaaaaataatcacaacttaagttaattatattagaatattttatttatggaaattattttctaattaaggaaatgatttt

SEQ ID NO: 97369 - DNA, 532 bp, Cannabis sativa
tgaggactctgtaaataaaacaagaaatttggaaccataaaattaaaaaattatctctctcaccatagaactttttttcagttaaaatcaaggaaattatgtaatgcttaagaggtactaatatttagttacttgttagtggaatttagtatatggttaaattatgtggaatccataatttcatcaattaatatcaaaatagttttaggacaagctataatagcaaattggaatatgaagtcaaacagagtcatggacatttattcaaacacaaagaaagtaggaaattgatacataaatatacacacatacacaaacagattaaagctctccatcccagagttcttcaattgatttgtacggaccatgttcaggtgaaacaaagccctcacaacgattgaatctgttctgttgaatcaaattaatcttgttgagatcatcctctgttagttcccaatcaaatatgtcaagattctccttcaatctctccttgttgtaactcttcactacaacacttgccccttgctcatat

SEQ ID NO: 97370 - DNA, 1058 bp, Cannabis sativa
aaatatgtttattattttttaagagataaatacttatgtttatgaatgcagtaatttactttttcttgttagtcacgattcttctagtttggtgcgctttgaatcaatgtgctctaagtttcgcacttcaaatgaaaaaacttgttacgtcatatggtcccatgtaatggttctaatggcgatctttatcaattttatttttcagatttctttgctagaagaatctggttccatcgagagagctcttgatgagttgcgcaaaaaagagccaaaaatagtaagtttcaactgctatatttcttgagctttatgtcttgagcgtgcatatctcaagtgcttaccatttattattatgtctttcaaggttgataaattgggtgttaaagaacaagaggcttctcttttagtaaagcttggtcgctttgaggaaggtgctactttgttcagggttctactttctatgaatccagacaactacgggtatttatgatgctttattttattttatttttatcaattccttgcggaaatttgcttcatgttttgttattgattttttgagttcattttcagatactatgaaggtcttcataagtgtgttggactctattctgaaaatggtcagtattcacctgatcaaattgaacagctggattcattgtacaattcccttaggcagcaatacaattggtcttctgctgtcaaggtaaaaagttgtttgattttattttaactttgctctgctttccatgcaatggtcacctttttgtctttgctatgaagccttttgcacaaacttgtaagaacactgggctttattctattcaatagtgtgtactgctgtgatggagttgtttgtaatctctttaagtttgaggttctttggttgctgtaattttgtaaagtagattctttgtgttctgcactagttaatttttaaatttgtacactagattatttttggtaaatgattattaataaactgctgttaaattagtttcaaggggctggccttttgatttactattaatttctaaatttcttcatggtatagatac

SEQ ID NO: 97371 - DNA, 528 bp, Cannabis sativa
tgattcaaaaactaaagcattggaatcactgcttaactatttttggattgttcttattgctggttgaatctgttgtgaaagataatccgaggaagtggaaacattttttctattcttctcaactgagcctgaagtagtaggattgtcggaggaattattctcaatatcttcaacttttcttttgcccttatctgcattactggagaaggatctccatgcaagtgacaatgtccgttcataagcacacaattcagcattcagcatgtctatgtcggacgagttccaattgttaatcacaaattggttaaaacaattcccagtatatatagttgcttttggaatttcatgttcatcatgagaaagtgtgaggtgatagtctgaccaggagtcatctttacactttgaagttcatccctaaacacatactctagatgaggattggggtgtgggttgtacatttttgacactacaaatatcaataaatagaaataacaagtaaagcatatatgtttgtaaaaataccaaaaa

SEQ ID NO: 97372 - DNA, 708 bp, Cannabis sativa
aattctcggtagggatgatgacgtggaacgttaataaaaagctattaaattaattaacggtaatattaataatagattgtattttaggtatataaatgaaaatttccctaaatgttttgtggccggaaaaaatttcgaaggacctaacctcaataaatgttttcttttcctatgtatatttattattagacattaaagcattttaataactttacatgcacctatatatatatatacgtaggtggttgtaatgatgaaacctagtatttgtgtatgcattttgggattatatacttaagcaattaattatttattatttctataagtagtattaattattgacatatcttttagtgcctcacacacacacacaccttaataaaaaaagttaattagcaaagataaccaaaccaaagtcaaaataatatattttattactccatgcatgctttatattttaatttttaatttgtaatttagtaaataaaaatgtaattttacagtgataaataattgttagtatagattttaggtttatatattttttttaaataaatatatatattttgactctctctcatatcaaatgaaatcaaagcttcacaatgtgaacatatatacactctcagaaatttatgaaagtagttaggaggaagatcgggaaaacgacaagaaacctagtatatatatagtttagaggagagagga

SEQ ID NO: 97373 - DNA, 757 bp, Cannabis sativa
ccacaaggcctcccccctttaaggatatttgtaatggtaacagaatcaagcaaggtcccgagcctagaaaggtcccagtccccatcattcgtgagaagatccgccaccttatccaccctctcttgacaagaattaatgggcttcgggtaaaacccatctccatgaacaacccacagatcattccaaacatttgtatcttcaccatttgagataaacttgcaagcgccctttctgaggataggaatagtcttgaccacatttttccagaaccaagaatctgaatctttataggtagcctaaaaaaaaggcttacttttcaggtatttagctctcagcaccctgcagcaaagtgtttgattctcagtaaggagtgcccatctccacttagccaggagagcctgattcaattccatggatttacggaagccaagacctcctctagatttgggtagacaaatacggtcccaggctttacaatccctaatttccttgttcacatccccaccaaaagtctctaatcatttcgtcaattctcgaagcaagattcttggagagcttggtagtttgcatagtgtacacagggagggccagacccacagatttgataagcgtggcacgacccactttagacagtaattttaatttccaaccatgcaactttgacacaagattttccaggatgaaattgaaatccgcatccttgcgcttagatcgaaaaagagggagccccaaataattaatgttcgtagtcgccaag

SEQ ID NO: 97374 - DNA, 1830 bp, Cannabis sativa
tctgaactatccaaagaacaatgaaagaaaagtgatagagggaacttactcgagaaatttccttcaaaactcctcccaagaccatctccaagggcaattcgctgtccgccccggtgagttgttcactcacttccgagagtgattgagccacgtagtggtgaagcttgtctttgtctctcttggcctccatgcacaacgctagagttgggggagggggcctaacttgttcagatccgcccttgacttgctcggattcgtctgaactccccccaagaacttttggacttagcgaccttcaggattgaacggtccacagcaggttgctcctcagagagatcaatgacctcgtcaaccgacatcttctccttggacgaagtctcaccacctatagacttttggccggaggagacaaacccgagctacccccactctcttcttcagagcctcaatatttttttgagacatgtctgcatggacaaaacaatacagtcaaaagaagacataaaatatgtgaagacataaaaatcagggaaaataaatgcaagttgaagtactttgcacgctggcgggagaattctcctgaacaagtacggatggagcatcatcatccgaagagtcttcctgctcctccaggacagcttttccctttccttcgataggaatcgatgaccgagtaggtatgccgggttccctaatccaaatacactactacaacaaccccattataagtccatcaaagttggactagataagttttactagtctattttgtgttggacattatatccagtgacataaaaaggtatttttctagtccaatattgttcgactagaaaaacttttctagtctagcattgatggacttgatattgagaccacaagaaaaataaaaattcacgtccaaatttattggactcgaatctctattttttaaaaaaaataaaaaaaaagctaaattatttataaattattataattattatatattttcaattttaattaataataataaatcaataattttttaatttaaaaattaaataaaattaattaattttagtaaaaattcaaatacaataataaactgtaacattttattaaactcaaattaaaaataatattaaacaaataaatattttataacactaaaattaaatttttaaataaacaattacatttttgttacaaaataccctaactctattaaaaaaagaaaaaaagaaaactttcccaatctcatgttaaaccgatgtcgctgctatttgctcgaagttcggccatcgaccattaaaaatgctaagtgaaaaatataaagaattcattgcaaataatgggtactgtccgagctccatctcgtacggtgtaagcaaatattacttacgggatttgaaagatctctgcgagtagatcttgttcctgagaatcatttggctaaacaagagtcgacatgaccccaacagatccgtcaagcttcgactccggagagtgattcacaactgaagacaatgatgcatggacttaggctcatgagttaaggggttcgaccacgatggggttgttgacggcatcctttagacctctcgacagatggaggtggtccactgtggctatactgagagggacaagaaaattagagagggaagtttgagagtgagagagcctatgtgggtcgtgacaaagatgatcagtcgagggagatcatgtgggttaattcttttaattgaatcatacagctaagagtgagagagagagagagtgtgatattgtgattgtgatagaatttatttacgtatacaaatttttatattatttgattgagaccaattaata

SEQ ID NO: 97375 - DNA, 746 bp, Cannabis sativa
ccgtaacagccaatactacaacttccttgacttcaacatgtttctggttccataccagatcattcctacacttccatagagcccaacagagcatagcaatctgttgtcgacgcattccactccatttttcaaaaactgagttcaaccagttgggaaaagtgtcttcaacatcagttgagattgctggttcgagttctgtccagcatgccgtggagaaagaacatgttacaagcacatgactgattgtttcattttcaaggttacaaaacggacacaaggcattaacagccacacgttttgtttgaagttgggacttggtgggaaggcagtcagtcgatgcttgccataagaaattctttgcctttggtggaatttttaaattccaacattttctccaaaaaccagaggtatcaactagtgcaggctgctgtttgttttcttgaataattgcataggcactcttcacggtataatggccaaaattctcatgcttccaataccagatgtccggttcagtagcttgaatggggatgctgagaattagattaatgtccctctcattgaaaatgtcatatagaatatccatatcccactgatttttctctatagacatcagctgggagacatttttatcaataagagaatcactaaccgtatgcacatatggatcagcagtatcaggaagccaaggatcgttgaggatgctcactgttgcaccagagcctacacgaattgcagcaccttgt

SEQ ID NO: 97376 - DNA, 664 bp, Cannabis sativa
taaatataatttaatttaaatttgccatattaaactacttgaactaagggggacttaggatttcagtacgttgaggaaaggtgtactcgtccttattttattttttatatgatataacatgttaaaaatcgatacaaacaaatatttttatagtattaaataaaatttaaaataaaaaaaaataacaataaaaataaaaatgaaaatactacctaaaatttttttgggtagagattcaaaaaaataagcttaaaatattaataaataaaaatactattattgaaatttgaattcttgaccttcaatatatataaatgtaaaataacttaacaattagacaaaagctaatactatattagtatataaatacctttaattacacatatatattgtaactaacaaaatagttgtcccctctcggctctatatgagttcgccagtctatacgatttatgatacttaacctcacaaactaattttttgatggtaaataaaatcctccaaaacccatttcagttatgctatttattatttcgtctaacagagtgccaagttggatatactatagtgtactcaggtatacatgtagcaaattttaagtgatccacataatattaattatttaaatattataaaaataataaaaatcatttaattttttttt

SEQ ID NO: 97377 - DNA, 2516 bp, Cannabis sativa
tgagtattaccctagagatttttctacttttgagcttaccatgctcgataatcaacttgaaacttacattcttgatgtaagttccactgagaatttcttgggtttgaaaagtattggcgatctcgctgaaaaaatggttgagacaaagaagcatattgtttatcctctagtgtatcgactaattacattagcattgattctacctgttgttactgctacagtggagagagtattttcttctatgaatattttgaaaagtagattgcgcaatcgaatgggagatcaatttatgaatgattgtttacttgtgtacattgagaaagacatcttcaatagtcttgacaatgaagtcatcatgcagcgatttcaaaacatgaaaagtcgtcgaggcagattgtaatttttattttatttttttatgacaatattttattttattttggtgaagatgaaaatttgaaaagatacatttatcagttatttttattagttttgacttaatatttattcaagccctcactgagccaaatttctggcttcgtcactgatctcatccatgtaattttggtaaaaatcaattgtaaactaccaagaaagcatgaagaattggaaattacttcaaagaattacttgaatttccaaggagccttgaagaaaatttgaaaaatcccttctctcttcacctaactagtgccacagccacaccaaggaaaattaggattttgtgagtttctaatttaataaaagagaggaaaagagaagatgaatggggatgagagataatgaaaagaaaaaaaaaataccttgattagtacttgagaatccctagccgaccccttgagagatgagtggtgaaatggtgttcttgaatattggtgagtgaaaatttaaaaaagtgatgaaatattttgggaaataagagggaagagtggcatttataaataaaaggccttatggtagtgtcatatttttggccaagggtttcgaaaaatgcccttggtctaaatggcacttgtttttatctttaagtattattgacacttctctccttgtgacacttgttatgtgttggtaaaatttgtgatttaaacctttgattatgtgaaaaaaaaaaatagaaatttatcgtctttagacaaattaaatttcttttcacctagtaaagtttgaattccacaagtttcagagaaattggcaagaagacacaatcgactcgctacgacgacaactcaatcagtactccaagagacaacaaaaagcaaaagacaaaacgcttattattttcaagtcaagaagggtataataacaaaagtctttcctgaagttctcgacaaacacttttggggtcaaatgttatacccaatttctaaaaatcgaaaaagtcaaccttgcaactttgaccaagactcataaatgtcaaataaatcaatctttttcagggccaatggcacttctagagggctcgaaagcgtcaaccaaccatttggcactggaactcacacacgtaagtgtacccaaactagggttcatgggcccgtgcgagagttttcaccctagagacctcaatccgccaaggaaacaaataaggacttgacttctttaggcatgaaaatgacttggatttatgtataaagttaaaataacactaaaaccacaggaaaagagaaataagtgactactgccacaaggaaatgacagtgctctccagttttggagacctgtgccatagtagaatggcataggtcactcctcgcaaatcatggaagaaaatttgttcgaacgggttccctcaacatcaaagagcaagcgacaagtgagaaaagtcatttccgacctaagagtcacctttggtgacctgtgccatagtagaatgacgcatgtcactcctcgcgaaccatggagggaaatgtgttcgaacgggttccctcgacatcaaggagcacagaacaagtgagaaaattcatttccggtctaggagtcaccttaggtgacctgtgccataagagaatgcacaggtcactcttcgcaaactatgggaggaaaattgtccgaacaggttccctcgacatcaaggagtaagacacaagtgagaaaaatcattttcggtctaagagtcgccataggtgacctgtgccataagaggatggttgtgccctccgaaattggagaccactgccataataaagtggcacaggtcggttactacacaaggaagaggaatttatggaccaaattatattttcaacatccatgtatcaaatacaagtgagagacaccacccatggcttcccacaagccatgggtgacctgtgccattatccgaccccaactagtggcagtggtcaccttttagggtttcgtacgtcgaaatgaggtttttgggtctcgagacctccaaaatatgacccaccatcaaaaaacaagtgaaaacacatcccaagagatccgagaacatgcatagccaacctctgccacttgggcatggcagtgctcgcaactggtacaagacaacataa

SEQ ID NO: 97378 - DNA, 1202 bp, Cannabis sativa
  modified_base (1126)..(1150): a, c, t, g, unknown or other
cctacttctctatggatgaatatttaagatattcaaactcctctaacaatttatgaacaattttaattttttaatacactaaccttgaaatgcaaaatatggcagcaaaagaaacttagtaaaagtgagtgtgagcgtcgagccttcgagcaaaccggactaattcactgtcatgtcacacatattatacattatacatattaaaacacagttactcaagtgatcaggcttgaaccaatgaaggataaagcttgaaccaaccatagggcatcccctttgtggcaagcattattatgatttctttgatgtgggatcgttaaatcaatgataatgtatgccttgccaagaggagttgccctataattgttttggcttattatacccatctaattaattgaaatgtcattacaagtttcggcatgtgatgatggtgcttaagtaagaaagctatattactggttcatatatatatattatctacttaattatatgtgtgcatacaagcattattatccagtgaacacaacttttactataacatattaattcattatatgaacagctagtataattaacgcttactaattttgggactttctagtggaggatgtgtttcatctctggtcagcaatgatatctctttattcaacatacttctattctaaacttaattaggggatcggatctcaaggagtaaaatgagcaaatttagatgacaaattcagaaaacacacttattgcaattttaatggctgctaccatttatcacattgggagagagttaaaacaatcacagtttattaaacaaaaagctccaaaaactaatttcatgtgtgtaactcaaatatctttatataacaaaacccttatacaagcacaaaaaaatgattatctgcacacacacaaccccctcactcagcacatacgacaagtaaatgattttcctaaactttaaacatacaacaacaacaataattcatgacaccaaaatggccaagaaataaaaaacaatcaaaataaaactgttgaactgagagagtttgaggagttaccgtggtgattgctggtgcggtgggactcgagcgcgagcgaacggagtcgtggaggagccgaggaggaggagtcnnnnnnnnnnnnnnnnnnnnnnnnnggagccgaggtcttcgtcgtcgatccctcccctgcgtctttgactcgtcgtc

SEQ ID NO: 97379 - DNA, 1375 bp, Cannabis sativa
ctagactctacacggagccattctattatagatgcttagtttaataattaaaatttagagataacttctaaccggaagagaaaaagaaaattcaaggataacttattggaatttttacacatagtacttaaaatcacactttttcttttgcagatttttttacaggttctacttgtagttttttcagttgtcctcaggttacctttttgcaaatcctatttttgtattttctttatcatttttggatattcagaaaaatatctttgatttattttatctgaatttctaaactgaaaattgttaggaattgactaaataaaatgaaaaaaatgatggaaaactaatttgctcttttaagacaggtgagtaaatactcaaacatgttttagtgagaataatataatttagcactcctaaagaatcttataaatatggaatccatcataaattttcatagggtggagtttattttataggattttgatcatatacatctttgaacataagcataggttaaaatctaaccctacaatttttcttttttgaatagtattgtatcagtcagcaaggtaatagttttcaagtactatagaataaaaataaatatatagattaagggattgaaaatgcatgacagaaagattttgttgaataaatttatgacttaacattcatatattttcagtatttccatagaggaagcagagtcttgtatgcattggttaagtcagtcccaaaatgcaacaaacaataggtgtcctttgctataggaaaataaataaacaagcaaaggacagaaacaattactttgttaaaactaaaatagtagtacagataaaaagaggtcatatgcgggtgctaggaaccggaagatccttgatcagcatttgcttgcacatccagtgccaattctcaggggtcacctcacccccgagtgatcgaatcacagacccaccactgcaggaacccactttgcaacattcctctagtgttaaacccttcacaaggccgtacaagaacccacttgcaaacaggtcacctgctccagtagcatcaactgctttcgtttcacctatggccggaacttggacaacctgttgttataataaaatgaattacgaaggttttgttgttactactcatgataatttcttcttgttaactaactagttaggattcactcacctcttttccatgctttgcaatgcagccattagcagctaatgtcaccacagcccacttgcagtggttggcgagaaattctagagcaacctctggactaactgtttctttacccctgcaatcaatcacaccaggtaagattatgaactgagtacaactctccataaaactatttagtgcatgtttggcatca

SEQ ID NO: 97380 - DNA, 1371 bp, Cannabis sativa
agagatcaaggctctctacatgtagccggtctttctcaaactatgtgtaggtggtctttttctgagctacgtgcagacggtctttcttgagttcatcggcttcccctctcatccttagtttaggagaatgacttaatggtttgcccctggtggcatttttgtgaagacaagtttgtaaccagtcttaggtttttcttatcttaaatgccttgtactgcttttattcaaacttaatacaattgtatttgcttgcgttattattcacaatgtaaacaactatattttgatcaaatatacagtactttaaacaaaaatgccattatattttcaaattctgtaacaataatagattaaatattttaacattcaaaaattgttgacaaacactgaaccaatcacattttcagtttctattctaaatgattgtacttcaaagttatttttctgacatataataaataaaaaaaatgtcattattatattttaaatatatttacacttatttttttaaaaaaaatctaaaataataaatttcatttgctcacattgttttataaatatgtatcacgcatatttgtaaaaaaaatgtgcaaatttttatttttccaagatgataagacattaattaattaaattaatagttaggtggtcaaattttgatttcgaaggttacaaaagtgttatacttttcaaaaaaaaaaaagaactattattttatattcataagtaatgataatgtgcagttccattattaatatttaatgcaactgatgtgaaaattttgacatttctcaagatcactaatttcaatatgtattctctttgaagattattttttttattcgtataaaattttataatcaccggaaaaatttaaaaaaaaatgcgaattatttataatagtttaaaacatatagaaaaaaattatttataatggttaatattagtgtatatatttgtgtgtggtctctttacatccacactctctatccttgagtagaactgttatagagaagatgagtacaagtactcgagtgttgtaggtgatccgtcattccagatcgaatcagttgatactattaacaacatcaacatagatagtatgggccattcttttttttataattcacctatttgctaaattttcacgtattcccgaaaatcaatcaaacgaagaatttggagaatcattgctggaccacgacattgatggtggagtttgttacgatcacattatttctattccacatgagaagttgatgaagagtgacaatacagatgaaaaagaaaccattaaccaaatgctcagtgatacacatctccatacctctgtgtatcatgttacttataagattgttgagtacgcactac

SEQ ID NO: 97381 - DNA, 1479 bp, Cannabis sativa
  modified_base (476)..(480): a, c, t, g, unknown or other
atccgatccgatccgatcggttccaaccattggttacattgtctggttttctattggattagattgaatccatcaaatctatttttgctactatttaagttgatttcattaaaaagaaatatatatatataaaaaaaaatataatttaaaacttaataatcaaacatacataataaacattagtttagtccaacctagttctcatgatctcataataaaaccactaaatacgcattgataattttattagtgtttaggaatatgagaattaatattttagatctaagatttaatcttttttaatcccatgtgttaaatgtatattaaatcaattaatatatattttaaaataaaatatattaaatatatataattatacatgtattttaaaaatatataaatataactggatgaccatgggataataattggatcggtttggtcagttatacattggatcggatatcccattcaannnnngatccaatccgattagatttttaaaatttacatccgattcgatccaattatgattggatatccaattctattgaatcgattgggattagatcggtcagttgaaattggattggatagctttctgcacacccctaattatattaatatttttgagatctgcatttaatgtaccaaaaaatgaatatagaatgagaatgaataggtaaagaatggaaagagaatgaaaaaataattaggaatgaatttttattagtttaatttttaattttttaaataaatattaaataaaagttcatgtcagcagattactactagattacaattctaaaagtttaaaaagttaaaaaagtgaattaagcctagtcagccattatcaaccattatattaacatctaagggttaaaaataaggattccatcatatatattttatgggttctattttaaccaaacttatatatatgggtatgatttaaaattaataattttaaatcaaaaaaatttaatttaaagttagaagataaaattaaaatgtattgagaaaattaataaaattcttaaatccattaaataaatctcattaagtaaatatgactcaattaaatggattaactaaagagtataaaataagtgtgattatttatttatttttttttttggagaaaaacaaagacttgttgaacattttagttggattatgctattctaaaatatgtttgaattctagttgacatttattatgtaaaaaaataaaattttcttgttgaaacaattattattctttataataaatagaattcaaaaactaataaataagataaaaagattgtacgttataaaagattgatccaatttttaaaattagtgttacttactacttaacttagtatatggaaaatcaaatctgggataaaaaaaaattaatgaaaaagtttacatgcattttcagattttgaactaagagtaaaaatataattatttaataaatattagttaataa

SEQ ID NO: 97382 - DNA, 1726 bp, Cannabis sativa
aacccaagatccaataggcagtgatgtaatttatcaaaccaagcacgggtgcttgttttaatccatataaggccttgtgcaacttacataccaagtgaggagctgagggtatctcaaacccagggggctgcaccatgtaaacttcctcatttaatgtgccatttagaaaggcattattaacatcaagttgtttgattggccagttgtgagataaagcaagacttaaaacaagtcgaattgtgacaggtttaacaacggggctaaatgtttcagtgaaatcaaaccccggttgttgatgaaaaccttttgcaacgaggcgagctttgtaactatgatgtgtgccatcagaattttctttctctcgaaaaacccatttgcagcctatgggagttctgccatcaggtaaaggcactaaagtataagtgccatttcttgtcaaagccagcatttcatctgtcatggcctggttccacttctcttgctgtaatgcttctttgacagtctttggaatttttgctgcaatatatgccttcggtttatgtattccagacttagctcgagttttcatggcatgagtgtttgtgacagtgcttggttgaacaacatctgatgactgagttgctgtaggtgcagcagctgtaacagtaggtatagattgattgtgatcatgcatttctggacttggaacagcagctggtgtgtctgaattagtaacagcaggttgttgaatatcatggggaaaacagtctggaggccctctttgtgttgatggctggtgctgggttacataatcctgcatattaatagtggaacttgccacagtaggcacaataggattagtaataacagtggtagtaatattatgttgggaagtggacactggagctataggaatctgtgctggtgtgagaaaatcagagtaagaatgtgaatcaatggccactgtgggaattgaagtataaggaaatgaggtttcatcaaaaatgacatctcttgaaatgtataatctgccagaaacatctagacacttgtaccctttatgatttagactataccctaggaaagtgcaaggagaagacctaaattggagcttatgtttgttataaggtctaatattaggaaaacatttgcaaccaaaagttttgagagtagtataatcagggatgatgtcaaagagtttttgaatgggagatatgttttgcaaaacaggtgtgggtagtctattggataggtacacagatgttctaaatgcttcatcccaatatttcaatggcatagaagcttgagcaaggagagtaagaccattttcaacaacatgtctatgttttcgttcaactatgccattttgctcatgtgttgtaggacaaggatgcctatgagtgattccaaactgttttaggtgatcagtgaatgatctaaactcccctccccaatcagtttgaagacatttgatctttttgcctaattgtaattcagattcagttttgaattgcaaaaaggttttaatggcatcaaacttatttttcaacatgtaaatccatgtgaacctagagtaggcatctataaattggatgtaatatctgtagccattgagtgaggttgttttagctgggccccataaatcagcaacaatgagttgtaaaggttcattgtacacagtttgagaagattttggaaatggtaacttgtgtatcttgcctaaacaacatgcagaacaaacatttaa

SEQ ID NO: 97383 - DNA, 1092 bp, Cannabis sativa
gaaattatgcactagagttagacttcaacccaaatctctattttaagcccaatctcatctaatgtcgcttcttcctatactcttgtttttttgaattcaccataaaaactctctctcaaatttgttccaaaggtgatttgagtatcagcccacactattattcaaggtgatactcagacttttgtggaagactgtgatgaacaaaatcaaaggacgggaagatccaggttcagatattgagaatactctgcttcagacaggaatcaaggactagagattctaaatagaaggagtcatattattctgctgccatcactataaggattttttaatctcttatgtatttatttatcgttttaggaatttcatatttaggatgcaagattatagaattataatctacatacatgttagtaaatctagatcctagtaaaattaattttcaacacatatgtgcatggcaaagggcatcacaatactaggcagaatgtaaagtccctatccagacaaacgttcaaacatggacttggggggtaattattatcccaattttttctcacatgacacgacaactacacgtggccaaaagtagaagacatgtgttaggtaagttagcactgaccaactagggtagtgtcgtacaacatgtgtaaggcaagccagtactaactggccagggtagtgtcgtgcaaccccctaaccttcaaatatcttagagatagactcaagataagaagaacatggagactaagaagatgctcatcttcaaggttctgaaacaaattcatcctgatatcaaaatctctaacgaagacaaagatacataagcattagcaagaccctggtcgtacctctaacttgtcggcaagggtgacaactcatataccggacagcctaaatatagctgaccgaccaatacacatatcatgctctaacagctgtgttttttccataagccttctagaagtttccaaatcgtccagaacacatctacaacttcaaaacgacttgaactgcccacaaaagtaggaaagcttcgccagaatgtaactgtcctattttctagggatattttccatctgttatgtattt

SEQ ID NO: 97384 - DNA, 1540 bp, Cannabis sativa
tattgagtcttatataatttaagaaaataacttttataaataccgctaactaattatagagtgcgcaataacaatactctttgtaatttcaacaacaattaatatttgtgattttttatgtgtaaatttttagggtgtaaaaaaatttataaaacactcccatttaataattttttattttatataaaaaattatatctttactttatattagattttttttttgttccttccttactaagtacacatataaaattaaaataaaattattttaaatattaagtcaaaaaaattaaaattaaattatatgaaatttattaataaaaataaaaataattatatataattttttttaaaaaaatatgtaataaaactaaaataattattgattttgatacaaaataatgtaaaaaatattaagaatgatttttagaaattaatttaaattaattttttaaaaaatattaaagtagacttataattttatggatgcaaatataatactccatatttttttttacgcaaacaacaattaataatagtcaaccatatgaataacgtttcaaaaagttgtttgactaatgtatatataaatttggcatatgtttattcttagtaattttaattaattaattatctttatttaaaataagttatacttattaaaataatttgtcacataattatgtctgcacattgtaatgatctacttgaattacattacattgcatgataagtgctataattaatctgtttgatatttaatcacattagaggttgagtagcataaattggaagtgatttttcaatgaacaaggatcataatgtttaagaattgactaacttcaacattattgatcagtttctaaaagttaacctagtcaaagcccactatttatttaaacatgtatagcatgtataattatatatgagtattgttaggcactactacttttagacatgttgcgttgcgattggttagtaatagtgctaaaaattattacattaaactatatagaagtcgatatttaattagaccaaaaacaatattaagaaaatactaaatagcactggtatcttctaacatttctcaattatatatacattattttgattcttgaatatgtaaaacatacatttttttttattattcttgaatatgtaaaacatgagcattaataaccccactacttataactttcctaaaatataaaaattagtaattactttttcatcataggagtggaaactgagggaaaaaaaaaagggacaatttttttatgccaagacgctaacaaaattgtacaaaaactatgtcatagtaaacaaactaattaataaatattataaaagatttttttttttattaatattgttttttgtattttcagagatgatgtgtataattccaaagcctaatattagtcaaatataggcctaaacttgggcccaattaggttagggaaacttacaaaaatactggaattttggttaacttttacaaaaatactgtcacacgaaatttttttcaaaaatactgt

SEQ ID NO: 97385 - DNA, 695 bp, Cannabis sativa
  modified_base (169)..(172): a, c, t, g, unknown or other
tcatacgagatcttacgatgttaagtactttcaatgaataaccatccataaggggacgaagtctagcatctcgagattatattgaaaacaattaaatattgtaagaccgacaatggacatcgaatatctctttaattaaagctcattatttaaaataatatatttttannnnatcatttattttaatctatatattttaataataaaaattacttaatttaggttggtccaaaattaattaaaaattaatattgaacattaatttaattttcaaacataaattttgaaaatctatatatatataaaatatactatttttaaatttttattaaaatataataaaataaattcctaaaaatatctaatttaaattgttctaaaataactaaattttcaatttaaataatttttcaaaatttaattaaataacaaattaagtatcttgaactaatcaccttaattttaaaaaaacatatccatatttaagtttatctaaaattaacaaattttcaatttaaaaatatttttaaagaatatcttaatgactaatttcttagaaaatcctactttattattaatttcactatattctaatttaagctgatccaaaattagtttaaaaaactaatttttaacttaaatatattttctacgaaaattcaaataattaagtatctagaagaatctaattagtt

SEQ ID NO: 97386 - DNA, 798 bp, Cannabis sativa
gcattgaattcatttcatatataacacatatttaaataatttcagattattcacacataaataaaatgccaataatttatcccaaaattatatttcggccttgaacccggtttggcccgaaatacccgattgtgactataccgcgccaacttgtcagaacacacctgaaaagggacacaccagatataatatataataatatagttcataagcacataaataaattaaattcacagttttacccttctcgggtcaaaattactaaaatgcccctgactcaccaacggggtcttaacatgtcatttctcatattaattcgcatgtaataaattataatataatataattctacaataatactcaattaactagttagggctttgctaatctatttccttaattccagggtattacagtctttcttggttattctcgtcttcagaaagggtataggtgttattgtcccgatctcaacaaatatcttatttctattgatgttacttttgtagaaaatacaccttatttttcatcttctaatactcctactagtcaggggaaggatgatgatttgttggtatattctgtcacatcctctatgcctgctacatgttctgacgagtctcatgctccttcacctccctcggtcataacccccacaatgtctacacctccaccccttccaccacctctcccactcccgtggcctcctatagtgtacacaaggcgccccctcctccacctcctgtttcatgtcctacacctgcatcttcgtcatcagattcggaaatcaaagatgat

SEQ ID NO: 97387 - DNA, 731 bp, Cannabis sativa
gcttgtggatgcaacagccaggcacggaatattgagcttcatggatgcctattcggggtaaaaccaaatcaaaatgcatccaccaaaccaagaacatacaagtttacgtacaaatatggctctatattactataaaatcatgccatttggtctcaaaaacactggaccaacataccaaagattggtaaacaagatgttgaaagaccagatcggacgaaacatggaactatatgtggatgacatgctcgtcaaatccaggaaggatgggggcacatagatgacctggacaaatgcttcaaagtcctcaggagatacaacatgaaactcagtcccttaaattgctgctttggagtcagctcgggtaagtttctgggctttattgtcaatgcccgaggaattgaagccaatccagagaagattcaagccctccttgatatgaaatcgccaacaagaaccaaggaagtgcaaagcttaactagtcggatcattgcactcaacaaattcgtttcaaaatcaacagacaagtctgttccgttcttaaacatcctgcaaggaaacaagcaatttgagtggacggaggaatgtgaaaaagcttttcaagagctaaaactcaactcgcaagaactcctgtactatcgaagcctctggatggagaagaacttgggatatacttggctatcacgaagcatgctgtaagtgtcgtactgatcaaagaggaaaacaacatacaa

SEQ ID NO: 97388 - DNA, 828 bp, Cannabis sativa
gaaaacatttcatagcattagcttggaagcgactgagccacaacttttatcaacacttctttcccagcacgcgaaataaactttgttccccacccttgcagccttttccgaaccttctctttcaaatatcccaatgttgcattcttgttacggcccatagaacttggcagtcctaagtagaaactacaatccggagcagttctcatagatagactatgacatagccgctgtttcatcccttcctccgtgttggcactaaaaaatatggatgattttgtaaaattgactttttggcccgaagcattttcaaacttgtgtagcacttccttgattcgagaggcttcatcttcagttgctttacagtacaaatagctatcatccccgaacaacatatgtgaaattcttggcgctccatttgcaaccttgcaaccatggatccaacctctctgctcatacttctttagaatggccgataatccctccgcacaaagaataaaaagataaggagaaagtgggtctccttgtcttattcctcttttcggtataattgggccaacttcatgattgccatacacaaccttgtatcttgctgaagtgacacaacacaacacaagttgaacccatttttcttgaaaacccatcttacggagcatagctttaagaaaagaccactcaactctgtcataagccttgctcatgtcaagcttaagtgccatgtatccttctttacctttcctttttcgcttaaggtaatgcaagatttcaaaagaaaccataacattatcagagattaagcgtcccggtataaaagcactctgattttctgct

SEQ ID NO: 97389 - DNA, 1119 bp, Cannabis sativa
tatgtatgtatacatatctttccaggattgtgacataaatgaatgaagattctaacatttgttgtttgtctattgtaaattagttcttttttattcgtagatttatttttattttttaaaaaagaaaaggaattaatcaactaggtaaaagacgaaatctattctcaaaggaagaaagaaaaaaaaaacaaaacaaaacaaaatcgcttccactaaataacttaattaaatttggaaaaataacttagaattaccatgattttttttttaaaaaaaaaacaataagaaagaaaaaagaaaagaccgcaattttattaatggactactttctttctttctttttcttttttgatttttttaaattaataactatcttattaggaacgttgttcatataattcataatttgtaattcagaactctaataatctgaactaatccggtaaaaatagttaagtcaatttgtgtagaatgtaaaaactttgaatgaattaagagcagaaaacagagaaacagagtaaagagaataagagaaagtttggctaaaagcctcaacaattagagagctaagatactttacttatagagaattaaaggaatacatcagagaagttagttagcaaagataacaactaaacagcttttaactaactccctatttaagtaatagcttcactaattattagtttgttaacaatttgaattgtttatgattctctactttggttacaattttagaattcccgacatcggttgaaaggatacaatattattttatttatttttttttttttgagaaaatagcctcagagaacaccactaaagagcatagaacatctgagaggccgagagctaagagtttattgatggatggcctcagccaagataaggttcctaatacaatttggatacccaggccaccagaccatatttgcagtagctgttaaaacaaatttagcaagagtgtcagctagtgcattagcaacaaaacttacaacattaaatgtatatataaaactctattgccatcaagaattaaacctaaagacaaatctaaaacaatgaacatattaaatttatggattaaactttagcaatcagatttaatttgaatgttgt

SEQ ID NO: 97390 - DNA, 505 bp, Cannabis sativa
tccctaccctttgtaggtttggcttgccatggaggagcactgggtggccagaccctgcctaatgaaggtttggccggcgaagcacagcaacaaggtgttaacctgcaaactagggctaactcccatacctgggaatggccggccaaggtctgcacggcatggctgatcttcacaatacacccttcagggtatggccagccaacccctatcttttcagaatctacaacctccccaaggagggccaatcaatcatgtccccacagaaacagatccttctgtgcaagcactattagaccaactcgtggacatgatccaaggcatagctggaccaaagccttcagacctcgaacttgatcggtcaaggggatcaccattctcggcatatataaataccatacctctactagacgagaggacctgcttgctcacatcaagtacttcgagatgcagctcgacctccagaaggtcactggtgatgcgcgttggaagctcggttatataggcc

SEQ ID NO: 97391 - DNA, 1280 bp, Cannabis sativa
ctggtaaaatatttctaacacagtgaacggttgttggtgcttgtagaaattgacttagcttatttactgcataagctatgtctggtctattgaaaaggtattacaaagcacctatgacactatgatatgtagagggtgtaaacctaaaaaattccatggttatgtagacatcaatgtttgacatgtggcaagaaagataacatctcagagttcaatagtctcgagtcatagcagtcaatttgggaggggtccctagccctgcacccaggttgactcttggaactctgaaatggttgtttggatcctaacaagttatttccacctcactatctttcactattttgtaccatgaagacatgaagcatccaagtccaggcctcgtgagctaaaaatacacgaaacatcacctcaaatatcaaccagggtgcttaggatttcacctaatgcccaggttgacaacccagctagggtttcagtttctaggaccgtcctagtagaaatgggttgaaatttacattgggacatgaactagacatactacaaaaatatttaaggcatcataatcagattcgaagaactttcatttttgagcacccggagcaccgagtgcgcgagcacccaccgcctaagttgacaatttgccaacttgggccacttccaaacatcaaactaaaaattcaaatcgtgcatcttctttgtcttcatcgaaaatggaaaaaaaatgtaattttgggaaagaaagaagccaacttgggggccaaaacaatggaccagcgcctaagttgacacctagtgctagcccagcgcccaggttgacattttatcaacctgggccaattctgaagagtttttcctaaaggtcttctgggcatatgttctgtttttgtcaaagattaagaataaactatttttgaggagcaaatagagttgtccaagggctgtaaactagacccaacacctaggttggcatattgttaacttgggctgtttccaataagttttctgaaaaagtgttccaggcatttttttctgtcatcagaaataacgaagatacaagtaaactcagggagaaattgacaaatctaggggcttcaaaatggagcctgttggaacatgttttactagaatctagatttaccaacaagtatgttgataataaaactttaatctaacatcctacatatggatttcttaaaataatgaaataaacacataaaagtttatagaaaaccttacattgatggcagtaaaataatatgactactttcgttcagatctct

SEQ ID NO: 97392 - DNA, 1013 bp, Cannabis sativa
atcagattcaaggaataatccaatgtagtttccagcctgtagaacaactttctctgttttgaacccatgttgtaagtcgtgtatctggacccacaaatcaagatgttgatcggtttagttcttgggttatctcctggctttaatctctcaataagcaattgtttacgatcgtaagtccaagggctaccagtgataactctgtcaatgtcaatttcatggtagaattggaataaaaatcgattttgttcaagtatttttacatacatccctttccctagtttccacaaatcaacaatgatattttggaaaacttgataatatgaaatctttccagaaagaagcctcccaataaggcaccaccgatcatcatactctacctcattcagttcctcttcttccaattctgtaacaaactattccttttcatctaagcaatttgaccattttttctccacatccttcataattccactgcttaaagccatggtgatcaataagcaacaacaatccaacatgttaatcacgaacactcagaaataaaaggccaacaaaatcagatcctcacaaacatatggaaactctcaatcacagagagaccgcacacatgtcaaaagacatgactaaagattgtatttttaaccttaaaaaggaaaaaagattgaaactttttgtacataatttttttagtaagtatatcaaacgtcacttagaaaagaaatgaataaaaaatatataaaagaaaaaaataataaagaataaagaatcctagattaataggatactgtattttaaaataataaataataagatgatgccttacattttttagcttataaatatatagatatattagataaatatataaattaatataagagtactttgttcaaatcatttatatattttttgcatatatcttttcggacaaaagttagtataagaaaactttgtttatagtttagaaatatattaatcatgtagttcttaatccatgtgagatttttacaaataat

SEQ ID NO: 97393 - DNA, 512 bp, Cannabis sativa
gcataaaacacactcacttaaatatattttacaattttgaaaatttcctttcaaattctaaagtgtttgtgcattgctcaatgtctcgagcaacctatatgtggcacatggttaactataaaaaaaaaaatgcttacgcatagtgtggtacatgccagacaagttaacacatagtagcatatattaatagagccacatagctccaaagtaaaaaaacatgtaagttgtctcggggtacccaccccgacccctcttagaggtatattggggtaccaccctgaccttcaaggggtaattaggaggaaacaccccaatctcgaggtataagggtgtcttggggtaccccccccccccttcgactcacaaaggggtggctcgggtatatgtgtgttaaaaaaataaaaaaatgatgaggaagaggtttactggggtgtaccccgatcctctagccacatgatgaaccataacgcttatatatttgaagtaaacacatacgtccatgacaactagta

SEQ ID NO: 97394 - DNA, 616 bp, Cannabis sativa
aaaataatattttatattaattttggtttgaaattggaaaaattcaaaaaaaataaaaaaatctcaaaaaaatcgggttagggtgttgctgcccaggaggtgcacacagagactgcgtgcagcctcatccgcgtgcgcaaaggctgcattgcagccttcgtgtgcgagcgagaagggcgttgtgtttctgaagcctggggctgatgaggcttcggacaggaattgtcccctacacacgcgcgcagatgcaccttgtccgaaggtctggtgtgcctgcgattgagcaccatgtgcacctagtttcaaactttcataactttttcaatttataccggaatcgagttccgtaaaaaccaaaattgcttattctttcacaaggaatccaagtaaattattttcataatgaaaataaaattatttttatagaaaaatttcgtaaattcatacatccatcaaataatcacataatttacattgtaatatccactaactcagaagggtatttttataatttttttcagctgagagtattttttttattttacatattttatgggtttaaatatgtatgagatttttgtgatgatataatatttgatttttattggcatgtgca

SEQ ID NO: 97395 - DNA, 1036 bp, Cannabis sativa
cctaggttgatatttcgtgaacttgagccatttttgatggtactttcaaagatttcttttgagcatcttctccaaaaataaaaaatattgagattcaactatttctagggaccaaatagaattttcagaggggcataactaggacccagctggcaggttgacatattgtcaacctggactatttccgatcaagtttgccaaaaaatgttctaggaatttctctatcatcaaaaataatgaagattcaagcaaacttggggagaaaaccacaaacccaagccccaagaaattgggcccagcacccaagtgcacaatcaactagggatgctatcttcaattgctcaaatgtcaaaactgatacgaccattgaatctagaatggttagaaatggggtaggagacctcgtcctcaaatttaaaagccttagaataatcaaaaacaagatccagggagctcgggagtaagtaccgagtgcctaggctgaccaaaggcttggtgcgctgggttctgcttattcgattttgatgtcgtttcgaccatctatctagtttttcataataacaaagatccataaagttagagaagtcaaattcacagctttgcatttctcatttccaactctttcaaaaataagagtttcgagtctctcatttctacagaacaacaacatctctgagaactagtgactagctttgctaaaacacaaaaatatgctaagtgatgtcaaaataatacttagaaaccttaaagtacatcccttggacgtttatacacttacccaacatcaaggttcacatcatatgtcaacctcggtgctaggatgtcaacttgggcgctggatgtcaacctaggcgctaggtcatgaactgccttcagtaaaacaacaataactcactcaatttttattagattgacgcgattcaaattgtattttgaagctaattcattgctctatcatgtaatttttgaaacttcaatcgtaattctcattttatcgtcatcaaatcttacgcccaagagagttacaaaaataagc

SEQ ID NO: 97396 - DNA, 549 bp, Cannabis sativa
ctctcagccgcaagcaatccactgtgcactctcactcactcaaatttctttctctctccctcctcgatacataacacaatatattaaatttagtaatactatcaaatttttaatttttattttacagtatataccatatttttatttttattttacagtatttaaaatttgggttaaagaaaataattgggtgaacttgttgctaacctgtaacacctgaacggacgagtaaggatttatttattttttcgaaatccagtcaactcgtccgatattgaactctaattttaataagtaaataaattttcccaaaaaaaattgtctttatttattagcaaactcactagagagagtattaattcagaagaaggagagtagtttgagaaaaaaaatagatttttatttaattattctgtaaatcaattaatgctcaaacaaacggagcaaatatgatgacgtggagtaatttaagtggcggtaaacaaaaagggaaacgctaagtagatttcttctcattaaacttgatggtcacgaattcaaaatccaacc

SEQ ID NO: 97397 - DNA, 837 bp, Cannabis sativa
tgtacaagtgtgtacacgtgtacacgtggacaatctaccgtggcacttaactgtgatttttggacgaaagtatgcagagcataacgaaaccagggtttaggtagtttagtcgacaaaatttttatttttgtggttaagtgttacaaaccgtaaatttcgggtggttaagtcgccaatatctcttttcattattaccgtttgaactattttgttctcaattttataagcgaaagagttgacccaaatcagacagcaacatgaaagagtagtaaacagaaaattaatctcgattccaactagagatagtacttcacttaaaatttataaacatcatatatttttgtgatggaaatatactattttcattgtttttttaaatggactactttcatagcttataaacataacactttcataaaaaatatataaataaacatgacatgttatagtgtacacatttatagcatagtagctaaaatataaggtaggtgtacacatttatagtatagtagctaaaatataagcaaataggcggaaactgagataattaatattctgttcattatttgttattattaccttttactaaagggaaaaagggagaggtcatgttcgaaacttggaccttgaagctattaagctattaattgatcataaaaatacaattacgctacactcaaaaaaaaaaaaggaaaaagactcacatcagcgtttttttttttctctatatatcactttagtattatattttttttaactatatatacagtacacataataaaatatgaataaaatattaattaaaaataggctaattaagttcgttaaaaatacttc

SEQ ID NO: 97398 - DNA, 879 bp, Cannabis sativa
gaaatatatgagcattctagagttttattctgggatgacagatctttgggatcaattagcactcaccgaatcaaaagagctacatgcttttgcactgtatattgctcataaagaggaacaacgattgattcaatttttaatggcttttcctagtaattttgagggacttcgtggttctatattgcatcattctctgcttccttcggttgattcaatagtcagtggattgttagcaaataaaatttgtctcaagtctcggtcatggaaaggtattctctcaacacccaattattctattttggcagtccttcatattacactgtttccttcacaagagaacaagcgtcacacaaaggttggtattgatgaatgtaggttttgcaaacagaaaggtcattggaaagctcaatgtcttaagcttgccaatcgtgctcttcagcaatatagatatcagcccaaacctcttcatatgggcaaccaaccacagttaaataactaaattcgacctccacaatttagtattgctgcaactgtttcaccatgtggcttttacaactttgctgctctgttagaagagtttcacaagttccttgttactcaacctaatgctatgtcaatctcttctttggtaggttaaccacccattgacacttcaagtatgtcatcttctacatgggttttggactctgatatttcacaccacacgtctctgcattctgccaagggttgttgttgttcacattctactgtatctttggggtatcatctttcagagcctactactaccttccacttcttctctagagctgcgagcttgatgctgatcatggcctgatttcacataccgaaaatatgtcactggttttttttttttttttt

SEQ ID NO: 97399 - DNA, 590 bp, Cannabis sativa
actcaactcaatctctctctttgtagattttgtttgggcgtgacaatctacggtaactatatatttagcggtcgatttctagctctagtggcgcttcccttcgttcgcaaaggaggtgtatatatatattggatataacttatgagattcgtgtattgaaatcttgatatgtttatttgtataaaatgaccggtacttcattttatgtacagatttgagatttgtgagatctttttgtattattgttttggtttgaatagatttgggttggtgttttttagattgggtcactacatagcctatgcaaaatgcgattcatcacaacttagcatatagtctgcgtcgattctcaaaacacgtttatgtttctatttataactgacacaaagaagttattatatgtttagggttattacgtcagatttttcaactggcgcacatctctcatatgtcacttaaaaaaacaacaaaaataatcttttttctagtagtaaattaagccaaaaaagacaccatagtacacatatgagaattacattaacatgtctactaccattagacaaaagaaactcattagaaaaaacagacac

SEQ ID NO: 97400 - DNA, 521 bp, Cannabis sativa
tgaagcacaccaggtgggttctaacattcatctttgtcagtccaagtatgctatggatattttaaaaagaaccaatatgctttgcttgacaccaaaccctgcactacacctatttgtcctggtcacaaactctatacctctaatagtgagccattcgatgatcccaccctctacaaaagcaccattggttctctgcaatatctcactctcacaaggctagatccatcctttgctgtcaataaattaactcaattcatgcaatcactaactgttgctcactggtgtgcgtgcaaaagggtattaagatacataaagggaacacccaatagaggccttatgtttaaaccagcatctcgttttattcttgagagcttttcaaatgctgactgggcatgtgatattcaagatagaaagtatgtgactcgtttctgtgttcagcttggtggcaatctcatctcttggaattctagaaaacaaagagttgtgtcatgttccaacactgaaagcgagtatagagctct

SEQ ID NO: 97401 - DNA, 877 bp, Cannabis sativa
aatattatgtagggcaagtaaagcttgaaatatttaggtccatctactatagcagataggtataacagaattccacattttcatgtggagaaggtaggtatccaatcccacacacaaccttatgtatgaggatttttaactacaataggacaagagttatatgacacgctagtatgcgtgataaaaagggataagagtaaacccctagatatggtcctatagagtgacaattctaatagaggaatgtgagagttgggaaaggacatgaagaaatgattccccaactatatgtgggtagaagtaaatttcgaggacgaaattcctttaaggagggtaaattgtaataaccaaaaatattttgatattatttttcttttactacattttatgtatatatttatttaatcatcattagtaaactcgatgtggaaatagttgattgcttagaaaatgttattttgttaaattaagagaattatgatatttttataaattaaactttcatagttattatgggcttcggactaggtgtacttcagattggggttagaaaattaagaaatattttgagtattatgttattaagtaaaagtaatgaatatagtgttatattattgagtggtaattattcttatatatgtatttttttttccttaagccatgcatggaatataggagatcttgtaactaagtggacgtgtgtaatgtggtttcaaatttaaaatcaatcttagattaggtggaggtagaggctctcaaagatatcttatctaccttggaataaggcttgaacatgtgtagagttagttagagtcagttgaattaatagaatagataaaagataaatgtgtagattttagtggagttaccttaatag

SEQ ID NO: 97402 - DNA, 3428 bp, Cannabis sativa
ttaccctgaaaatgacagatgaagcaaggaaaatgaataatcaatcaatggcattgacaagatctcaaccatggttattataagaatcatgtgtcaacacccctacctaacttctagaaaccaaattattgttgctaaaagataatatctaaatataatatgaaacatttccatcacttctataaacaattttgttgattgtctttgtcattccaagggattcaaccacttgaaataatttttcctatgttttaatggaagataacgctgtgttcgtcattcatgtcaagtcattggggaatgtgcacgagagttcaaatatggctgataatttttcactcaagaaaactataattgaagttgtacggtattaagatgcagccaacactcgtataactcactaagttcttattgtacacacatgtgcatggatgtatttggcatgtcatgaaaataacaaaaatataatgacttgcctggttcccgagagaaggtatcgtttgatgaacaatccactgtgaatcaaccacgccaattttttcgtatgcaggctggcaaggaagagaaaaggaaaatcagaatagggaagaacctaaatatagttttgcttcaacttcaaggataaaccaaagcattcacatcaatagttggtagtccaagagctgattagtcaaaacaaacaaacaaatttagccagtaacaagcttatttgccctctttctttttgtcaaaagcttttaaaacattgtataaatgttgtgattcttgaacttttgtgaagaaaataaacattgtatatattcttttgaaagaaaattactgggagtgcaaaagttggtgacagttgtgaacctgaattatctgggtaagctaaagctattacaaaagaccaacatcttgctaaaatttcaagagcatctgaagtcgtcagttgccctcatgacaagccaccgagaatattaattaaagtaaaattgaaaggagaagacgaagaaaacttctaacctctacacatcttctgagagcaaaatccaacccccatccatgcaccaaatcattctgcaatcaaatttaatgtgtgacaacgataggaaaggtttgtaaacactcaaatgaatactgtgtatcaagaaaatccaatcatagtaataagagaagggcactcgttttttttcccttcctctttccaatttaaatttcacgagaactcgaagatttcttgttgcatggatttttaagtttgttagccataaaaaatacaccatacctgaatcatgtgccatacacaccgccaagctttccgagaaaagacaggagccataatttccacaaacctgaagaatgttcagaaggtactgttaaactttacatcatacaaatccataaaacagaaacattttcatacgagctttaattcatttcacaagtgaaaatcaaatattaaaaataatgtacagaccaatatctcatctgacacgattataaatttcctctgactctgttaaaaagctgataaacattaatccctttatcagttcagaaaatctcatgattttacttaactgatattcctcacaatttcattgctagtgctgtgagaaatcacaacaaatggatagtattgaaatcatgtacacatgtgcaagcctaaactgcgaaagataaaggagaagaaaagaggaaggaaaattacgctgcacaaggaggctgacgaggattatcacaccagcctggtctctctactgcatccctgacatgaaaaatcaagaatcacttttaaatacaaggcactgaagagaagtaccagatgatatgtaaaattttgagtgtgacttcatgaaaactgatgtgggaggaaaggggaagactactcacttgtgaacttcttgttctcctctcctctttgtcatctcccatgtcaatccattgttgggctcaagaccaggttgagaaatctctaaaccatgtttcttaaccagctcaatgtaccttggaatttatgaagaattatttaataaagggaaccaatgaagaaaaatgaatggtcaaacagaaacttattatttaataaagggaaccaatgaagaaaattgaatggtcaaacagaaacttacttgtctccattaaagttctctactcccagatcttcatcccatataaaaatatattcataagctgctacaatatcaggatgcaaaaaccttttcgcataccacctgcaacacgtgtagaaagtgtcacatttaaaagggaaaaataacagcagactgtaagaactaattcaggtgagaaaatgaagaggagaaaataacaatataatcttaccattttgtttgttttctgacactaacatgaattgcatcctttgaccattcaaattcatcccattcagtaacccggtcatcatagtgaaaaagcataatctgaaaatcctcagagagctatgacaagaataagaagcaatatcaatatgttggtctcaacgcatcattaaaattagagaagcccagttttagctggataatataaataatacaaggactggatgacccaagttaaaacctttttagctgccgcatcaatattgtttttctggtcaaggccgaccgtgaacgtcatcaaatactttggctttttcttaagatcctgcatatttcaatttgctcccgtcaggctcacattatagtacagagagctaactataatgcatattctataaatgcctcaattgtggagtgtcttcctatttgttacattatctattccgggaattttttttaagagaggtactctattctcatcactctggctttgctccttcaactttcaaattgacctgatatatgagctcaaatgggtttgttgcaggaaaattaagtaaagaccaatttgatataatactatttagataatcactgcgtcttgtatgagacaaactagataaagttgcttctaaacttgtcaatcaagctggatttttccccaagcaaataatttcaagtcaacaccaccaaaaaacaaattttatagtttatacaagtatttaacatattaaagtcattcagctgtctttagccaaaaagttacccgagttcagactaataagttactgacatagtaaaaaagggaagctttgagcaattcaatgaatgaactttcgtttcggaataaggatagaaaggcttcaggccaacctaattgacacatcagtaataaaaagaaataccactactacttgctacaaatagcttacaccgtacctcactaggttcgccccacagtcttcgaagataaaaatctgattctgagacaataattcctggaggaagtaattcagcaccacgaggattcgttggaacatatatctgggagcaaacaaacaatatcacatactgagaagcatagagcaaacagcatgatccaatcgt

SEQ ID NO: 97403 - DNA, 558 bp, Cannabis sativa
  modified_base (374)..(379): a, c, t, g, unknown or other
tttgaaaaataccatattttttttctaaataagggctcaaaataatttttttttctatggcccactaaaagtcagggccggccctgataattactagacaatataattacacagtttagtaattatactatattttaacatacaatatgtatttggatatgaggtggtaattacatatgaatttctaatattttgtttgacaaaacagatagtaattacacagtaaataatatttttttagtcgttaatatttgaaatagaaagtttttagtaattacacccaattttcatgggcccatgagaattaaaaagtgtatgtaacaccctaacaaatataagcgtattagcatgatttttaacgtactgtgcagctnnnnnntaatcaacgaggttattgaaaatcataattaattaaaactttattatttaattaaaaacttaaggtatcacatatataaaatctcgggattccgtttacaaaatacatttataaaagtttgctatacacatacaaaagttttgtcgcctagcgactgtcagcaaaagccttgatgtccc

SEQ ID NO: 97404 - DNA, 814 bp, Cannabis sativa
acgttagaatatattattttgtaatttcaactttcggttttgtcattttatgagtgcaataatttcgttatattaaaatgaatattttattaaaaaaaaaaaaagaataaaataaattaggagattttttttttcttgaaatcaataaattaggagaattcatattacatgtttatatatattattaggttgatattacatataatataatgcaagtaaaattattatttttttcaataaaatttaattaagtgatgttaagtacaatacatgtatatttatttatttttaattaggtaatatattgttttttttctaatttttgaaataaggtttgagattttaatctttaagatttttttttaactattgttagtttgtggtttaaatgtaaacatatatacgtattttaattttttttttaattaaataacgtatctgataatacatatattgtaattttatatattcttaatcaaaactcatataactaaatttgagtgtatctatatatatgttggattcgtaaatttgatataaatattttttattctcaaactttacgaaaaatatagtgtgtgaatattcggtttaccataactaaagcagaaagcaatcgattcctttattacaaccatttcaatttaaaatataaaataaataataataaaattaaaaatatggttaaaaatatatatttaatattttaaatttaaatttctttatataaattaaatatctacataatttttaaatactattttagaccttgtgttttacaaaagttaccgtttggaccatctgttttgttaaa

SEQ ID NO: 97405 - DNA, 1079 bp, Cannabis sativa
aaaaaaaaaaaacataaaaaaatataaagatgtaattttttattttttttttataaaaaataataccttatataattatcccaatatttattagtgctaatgacgagtaattattatcattaggatttctcttgccactgaaagcagctaatgccttcctcactgtggtgttggctgaagaggtcatccacctgaaagtaaaaatatgcagtaaccttcagttaaaaaaaccagacatgtgatacttccattggaataaaaaacaactaaagaagaaaccacatcccaacctctttagctgctgctttcttctttccgtttgatgtagcatcttcaaggccactccaagattttgagtggggcaaaatttgaaaatgggacttttctaatttttttctttaatatacactaacttgcatagaatagaatggggtttgaacccttcacctccaacaatacataaaatttttccaaccacctaagctaacttattacaaattagggtggcaaaacgggtttcgccacgacatatgacacattttataggtaaaggtcagaaaaattagatgcaggtcaaaatggatcgacactacttaacacaaaatacaaacgggtcaaacatgacacgactcgtttaacaagaatttgatacgtttcatactttttttttaagtaaaataaaataaaaattattaataataatataactatctaaaagtatatacttagtgatttaatattatgttaaatttttttaaatttaactttaaaatttgaaatatctgaaagcttttaatttttataattattattattattatcattattataaaactatatataaaagtttttaatggaacttatatctatataaaatattggcggtaaaattacctgaactttatattttttaatacttaactacataaattaattttttgacggcaaaacctaccaaactcacattctgtttagctctttacacttccataaaaaaaactttagttaagtgtcacggtggactgcccacgtgtacactattgtacacgtccatcaaaaaacctcagttaagtgtcacg

SEQ ID NO: 97406 - DNA, 1048 bp, Cannabis sativa
acttgggtcccaacattgacattatcttcaatttttttttttttttttttcaattgatcaaccactttcatcattatgcaaacatctttagtatgcatgcccaatacttttacaaatctcatatatagaaataattaataataaaaacaaacaaattaatcctttgatcgtcgatcgtacttagataatttcattacgcaaacatgcatgcataataaacacgtacattatataaagaaataagcaaaataaaaaacaaattaataagaaatattagtcatttcttattaatattttatttattaattaaaaaaagacagtactagtgtagaaagttgaaatgcaagaaatgcatttcaatttcgattccaaaccaaatgattttaataagttgcagttgaaatatgacgatcatcatcgctaatttcaactgcaacattattattatcgatactattaggtgcgagacatgtcccttctccataacccgatgtatcaacactgcacttattggggtaacaacatggagttggttgaaaagaacctgaaaagcatttcccaccaacattaggttgacaattcggagcagcttcgcatacagaactctcaccgattaggggacctccacaaaacagtccttcacaacaatacttcccttgtgtccaatgacaaaattcaccgggcgtcctacaacgaagtccatcaccgtaggagcaccccacaagtacagccataattaccattattaatatcatcttcttcatcatcgtcatcatcttcaagtatcttcaagtaatgtgtataatcttaagtttctttgctttagttattttgtatgaatttgtttcaaacattttatatatttatagtagagaaaagaagatgaagttatacagctattactttaattaatgataataaaaaaagtaataattactttccaactgtctgatggtgtcgaaattaattaatctacaactacaattttttttctttatttaattaattttttagtcatatacctaacaaattttttagtatttttttt

SEQ ID NO: 97407 - DNA, 684 bp, Cannabis sativa
ttaattcactacgttatacaatacctcatatttatctatttgttaattactcatactaatggtcatacacatgatgtatggtttttgacaggtttgggttggctgctctgcccaaaacttggcccatcattcataactcatgcaactatgaaaaacgatataattgtaaaattaaaatactcatccttcctcaatacaaaaaacacaacatatcacttgtctacatttttcttttcttttaaacaacaaaagcttttaaataaaaaaggatcataatcattagtcatatacatctcaatcaaagtatacccaattactttctcaaagtctttctcactattattgacctacaattaatttaagtggcaaacacaaaattactctaaacacatatatatatatatatacatatatattatatgtgcattttaattattataaaaaattattaattatttataatattttaaccatttggcagatactataccttagtatagccattaagattaacaaggatctgtattttatcctcattgatcatccgagcaatcatatcagatgacatggatgagacttctatgaaatgctccacttcagactggatacgcaccctccattcagatccatcatttgcacttaaagcatagcagaagacctgccaacaggcgtgtttaatctcac

SEQ ID NO: 97408 - DNA, 1047 bp, Cannabis sativa
aactgttctctactttactcatatgactatacaaaggcttagaaaacttctttctctgagaaagttttgttctttttacactaactatagagatgttgtaattttcagatgtgggtgaagaactaatacttgaatctaaggtactatcaactgaatcagagtttttctcctgaaaagcaatagtctttaattttccaaacgttgcaggagaatcaatacttggtcctaaagctattacctttgtatataatgataaactagctaaaggggtttgagatttggaaaaaccaaaatctacaaatcctaaattttgtgtcttcttcacaattctactttgtttcatattattattattattattattacctatgaactcagatatggaatgggatgaaaccccatttctctgaatacttaaagaaggtaaaattcttaagctctggaatactaaaatcagagcacagatcaaccacataacccgaatcaatctcctggttcttacatgaaaacttacaaatttcagaaccatttggaaaaccaccaccaccagcccagctgtgattttttagaaatgactctctctctctttctctctcccaattcttcctgcaaatcacattgtaataatataagttaaagttagcagccacaaaagattgtcatatttcctaactaaatcacagaaaatgaaagtggggtttgtgtaaatgcaagtaataagcatcatatcatctaaaagcagagatttttatcattatgagttgaaaccatgcaaagtgggtttgagattaagtagtaaagtatggttctttacactaagctaacaagaaaagagatgcggcatgttgtaggttggcatggctgattctggttctgcgttaaatatgaataaaatcgtttgaatctgtgtactaactaatcaatggtttctcttttgttgtttttattattattatttatttaatattattagcaatataatcggtattaatttacaagatagtatatattgttaagctcttctgttcaacaatggtggacgtgccg

SEQ ID NO: 97409 - DNA, 594 bp, Cannabis sativa
  modified_base (56)..(56): a, c, t, g, unknown or other
aattttccaaaatcccccttagtgccattttatgacttttagtgtgggaggggcanaatggtcattttgccccatttgtcttttgtcttttgtgagtttggattttagtttataattagattttattattattatctgattttaattcaagtttattttatttcattcattttacaaaattagaaagaaggaaaaaagggaaaggctttctctcttgcaactctctctttctctctctcgaaaaatcctagggcagctagggttctttgttttcttcttcaaattgctgtaatttctagcaagttcttagtgattccaagacaaggtaagctctagcactttcctctctagttttcttgaatttaaagaaatggaatttttgcatgaattgatagttttgctgttgtagttgttgtagttatttgttattgttttcagaggtttagttatggtttattatgttgatttaagtaggttttggtagttgttggaaggttaaaccaagttttgagtttaagaactcaaacttggagctttaatggtgaaattcaaatctgagctttgattgttgttttgttgcttggaatatgttta

SEQ ID NO: 97410 - DNA, 531 bp, Cannabis sativa
atttaaaatatagtttaattactaaggtgtgtaattatcactctagtaattacacagttacttccaaattgttaaagtaaaaatatttgaagttattagagttagtctcaattcgatgaccacattatatgtatttataagtattggatgtctctattagtggtcatgtttaattgtagagtaatttatagtattgttaaaaaattaataaaaatatatccaaatatatattattagtaatatgatgtttgcttaagttgtattaaaattactattacttaattattaatttaaataataataataataaacttaaatttaatacaatttaattatatttttaaatatataaaatttaagggtctttttatttttatatttctaaatagttttttttttttttttttgtatttgtacaaaaatttacatagcaatccatatagtaaataataaagcaagctaaatctgcatagcaactcacataaaaactactggagcaactcaaatcgtaaaaaaaaaaataaaaaaaaa

SEQ ID NO: 97411 - DNA, 3579 bp, Cannabis sativa
atacaaagcaatataacgttcattgatgaacgttgctttttaactgatagaaaaaggtggatcttgatcctaattaataggaacacaataaactccactatattgccaagtcaaaaattaagtggcacacatgcatatactaccaagtccataaggccacgtctccttgttgaaatatatatatttattatataatatataatatataataatttacaacaatcattgctgatcatactaagattaaagataatcttctctttttttatggttcaatcggaattttaccatttatacatgtaatttattttgttaaaaaccataacaagctatatttcgctaattcttacgagcaaaatatttccgaacttctctgttttggaacatgaataaataatgaagcaacaatttccttatccatggctaataaaataatatctaaattacacagtgattaatggcgtgaaaataagtttttaactaattacatttattaaaggtattatttcacaaatatataaaaataaaaaataaattataaaaatatggttttataaaatttaaaatatttttgtatttttatgattttatttacagaaaatacggtttttttttttatgttgtagttaatttgttattatttgtatattattatttttatttttttttgttttaatgttgttttgatgttatttttctgttattttttttttatgtagttttcttattattttcatgttgtttttatagaatattaaaaaaatataaagaacaaatctttaaaggtaaaaatataatttttcaaaaaaaaaattactaatttatgtaattattaaaattgagaaccactatcatgacaaatttttttaattaagtatatttatttaaattacagccaactattttaaaaagtatatcagtgtgtaatgtttttgttcatatatcattaccatcgaaagtgatagagatagtttagctgtcatggcctcacaactttacaattatcactaaagagcaggctccattatcattgcgataatcatttcaactttttcccttattatcttttgtccttgtggtgacaaacagataactccagcgagattctacaagaaaactccaatggtttggtcatttttaatcattgaacataacgattggcaaaatagaatttaacgtaataagatggcaattaaagacaattgcacaagcgttaaaaagggtatttcgatcagaggaaaatatagattctactagtcataaactagatatttaagcactcccatcctgggcaagttgcatgtaaatttatatgtgcttacttggacaaagtagtgtaagttcgaacaatggattcagaggttgaacttgaaaatggaggaattaaagttgatggagaattgggttggggaaagtctttaccagtaccaagtgtccaggagatggtgaggaatgactccgagtttgttccggaaagatacatacaggagagcaaagacaggccactcgattccaccttctgccccaagtttaatgaaattccagtcatagatttaactctgctgatcaatggagatgaagatgaactagacaaactagactttgcctgcaaagaatggggtttctttcaggtacactatccaatttcagtaacaaattctttttttgtattacagtttctttgcttatattccatatgggaacatgtttatctgtctagataataaaccacggggttccagaggaggttttaggtgaaatgaaggctgttgtcgcagattttttcaatctcccattggaagagaaaaagaagtatgcaatggcagagaatgaccttcaaggatatggtcaggcatacgtagtttcagaagaccaaaaactggattggggtgacttgatatacttaatgacatccccacttgaagctcggaacatgaagtactggccaacaaccttatcaggtttcaagtacgtacaactagtaaagtctacagaaaattgcaactgtatatgcctacataaatagttgtgttttttagtctattccaactatttaaaggttataagatttcccatgtacttgttgtgtttaaactatgaacagggaagcagttgaagaatactcaagagaaatagagagagtaagtgaggaaatcatggccagcgtgtctttgttgatgggaatggataagaatgggttgaaaaggcttcatgtagtgaggaaacaatcaatgagaatgaactactatccaccctgctccaagcctgaccttgttctcggtgttagtccacattccgacggtggatccataaccctacttctccaggacgacgacatcaccggtcttcaaatcagatataagggaacatggcttcctgtaaagccaatcccaaacgcactggtggtcaacatcggtgatgttgttgaggtaatccttagagataggttaaatactaaatgggaatagctactaatattgagatacactagttgaacgtatatgctatatgataatacataacagacagtaaaataaggtttacgaatattgactgattaatgtcttttctgtacagtctaacctggacattttgtcttatctttcctaattgggatcaacatttagggataaaaaaaaactgaaacagttgattttcaggcttggagcaatgggatgtacaaaagcattgagcacagagccgtaactaatgagaacaaagcaagaatgtcaatagcaacatttgtaattccacacgaaggaattgaacttggtcctgtggaatcaatgatgcaagatcaaccaagaatgtacaagaccatgaagtacttggattatattatacactctttagggagaaaaatggatggaaaagctcatacaaactttctcaagttagaaaacaagtcatgaatcaaatgaaaggcttctcatgttagaacgcaaaagcatcattacaaatgtttttcttttttcttctctttttcaagttatggcttcgtaaatgactagaatattcacatatatcaatcctaataacaaaaaagtaaacaagaggagatcattattgcatgttactcagcagctcatgcatataccacagataataaatgaaagggaaaaagtttcttaaattaaggggaaaaaaattgaatcccatacataagaaaaattcaggactctcccataaaacaagcatattctagacctgagaacattttgtacagtcacgatcacataatttactacctcctccctttttacacccttgaaacttgtacactaaatttatctcctctgcaaagggcatcaggtgtgtgtgttcacaatctgagcctcatcatcaactagcctgactctagctatatatcctcaaactaaaaaaatgtacaggtttaggtacaaccaacaatatttatttttcaattagctaccgtccattccatagaatataatagtcggagcttttactagacattaagaaaaagaagaaaaaagagagagggcactcgtactatcctcagttagctgtacaacaacttcatttcctatgccattgtctgagcagcagcagcggcgg

SEQ ID NO: 97412 - DNA, 1052 bp, Cannabis sativa
cgccaaaacaaaaaacaagaaaagatacaaacacagttcatgatattcctttcgccaaaacaaaactcatggccatcacagttcatgatattttttcaaaaaattagtttcgttagatatgatcgaatttcaagaaatcaaattaatcataactttcatcgacaaacacttccactcaacggttacgtttaccaaaaaagagtacatacatttctaataaaaaccgtaaccaataaatccatcaaaacaaaatttaaaaacaacaaaatagactaaaaaaattacaataaaataaaaattatatatacaaactgtaaaccctaaaataaccgaaaacataataatcactaaaaataaattaatatttgaaatgtatatactaaaatttattgaacaataaaaaaacaataaaaaaaccatagaaaaccctaaacacaactaaaaaacatcaaaaggaaaaaaataacacacatgcaataacttaaattgaaaaccgaaaaaaaagaacaaaaatccaaaaacaaatccgtaaaccataaaatccatcaaaaccagaatattaaatcagacaataaaccaaaaaaattacaacaaaatataaaatatatataccttaatactatctggaactccaatctccaaatcgtcactatcatattcaacatcctcttcttcaatcacttgcttcatctttttcaacggacgatctgcatgtttccccttcttagacccgacattgttcctcttcctcttcgaagaaagctcagactctccactatcactaccctcggacattgtttctttcgatttgttcttcggattcatagccttggaggacgcggatggagatgtagacgaacgtgttttcaccattactaaacgtttagagaaaagaaatgaagttgggaaaaaatggaaataacacttatattgataggcatataggcggtttgggtttacaacccaccttttgggtaaaaatttaaaaaaattcaaaaagtgaaacgtgcccacgcgcccacgctgataagacgcctatcacatttcaactg

SEQ ID NO: 97413 - DNA, 580 bp, Cannabis sativa
  modified_base (38)..(38): a, c, t, g, unknown or other
tttattagtaaatctaattatattaaaatgggttttanttagggcacaaaactcaacataaagaacatttggtggttgttattcatcgatgataaccaaaagggccaatcattttgacacaatctcaaaagactcattcttctctttatcgttgataccattcactgtgagaagttctaggtcataaaacttaaaaattcttctcaaaacattagtgctctcctagatgtacttgcattaaattattaaatattagtattttataataattttattagaatttgatatataagagtaattggattaaagaggagaacacaccattctgaacaacattacctggctgccgatgaagtcacacaatgccacctgttgcaaatcctctccaaataacatgatttgggtatgaggtactatgaatcctcggggtatccaattgtgattatatcacgtttatctttgacttttaaaaattcatcaactatctattttagtgagttagggattaaagccatgatctctagtgtgaagattaatcctctcgatcaacaccacctttttgagaaggcatgggatcttt

SEQ ID NO: 97414 - DNA, 1084 bp, Cannabis sativa
attttgtattaaataaagtggtacaatattacaatataggcactagggtgccaaaaaagaatcaccataaaagtgacatttccatggtgagtcagtcaattcaggtgcattggttccaaccttttgtcttagggataaaacaatcaaaattaatagataaataaatatatatgttatatgttgtatagtatggtaacaaataattgttgtaagtataggttaatttaataaatgtatataagttctcaaaccaaacaaacaaacaaaggaataagaaaatgagtagtcactttcatttgcatgtgccaaccctatcaccactcattaatttcctctattggaaaatgatcaaaatatttgtggcccaatcaaagatttagtttggttaagtgatactatcacatcactaaacataaattcaattattattatcattaaaaatatgtatataatataattaaaaaaatgttattttgttagttgtatacaatgttaccattaagatttgacctcattttgccctaaattgcgcctaaattatgaaagtgactttgttttggggttattttcttggtattatgatttacatttgtatttagttttgactttgttgtatttcaatttttaaatttgttcataagttttgatatgcattgaattgtatttttggactttttaagttgttaacaaatttttttgaattattgagattgttggattcaagaattttcgtctaattttattaataaacgtgtgacatggataaaagttcaagtctaacaaatttgtcaaagtttgagaattacgatttagtacatatcaaagtttagagattacaatttgatacatgaacaattaatcaccatgttagtaaaattaaatgaaattgaacagaaatcattgaatctaatactctcaatactttggtgagaatttttatcggtttaaaaaattcgaggagcacattaatacatatcaaaatttagggaacaaaaatcataattagcttttctaaattatattgactcattttaatatcataaggattggattttagaagatggatttcattaatctcacaata

SEQ ID NO: 97415 - DNA, 643 bp, Cannabis sativa
tttttaactattttagttaaaaaattgagaatatattagtatgttatctacttagctaggtatgtattggataagatatgcactatagagatattttcatgtttttttttcttctgaaattcatatatattattcatgttaaattattgaatatatatttatttttccatgcatgtcgattaataatgcaaaaccctacatatacatataggatatagctatattatcaccctattctatatatatagaataataatgatatcactacattgaagagtattccaatgccacatcatgatttaatgttcttctcttattaattatttctaaacttacaataattattttataatgtaaatcatcacaaacaataattctaataattaattacaaaattaaaattaatatatgaaattcaaaattaaattacataaaatattaagtttgaatagatattttgtctctagtttttggccaaaaaaatatgcttccttcaactattaaattcaatgttcttctcttattaattatttctaaacttttacaataattattttataatgtaaattatcacaaaaataattctaataattattaaattaaaattaatatgtgaaactcaaaattaaattacataaaatat

SEQ ID NO: 97416 - DNA, 737 bp, Cannabis sativa
ttcatagtatagatgaaaggaatgaagtattgaatgggggatatactttcttcaataaaagggctgtgattatgaaaccttgggaccccaatataaacttcaagaaggaggatataagatcggttccagtctgggttcacctcacagatttggaattgaagtactggggtcaaaaatctttattcaagataattgggcaagttggaaatccattaatggttgatgatgttacaagggaaagagacaagttgagctatcctagagttcttattgaggttttaatccatcaggattttccaaatatcatagagtttgaggatgagtttggatctaatgtctcggtatccattgattatgaatggaagccaactgtttataagcattgtaaagggatgggacatgaaacaactgaatgcaggaaaagagaaggaaagcaacccgaatggattgttaagaaggacaatagaaagccgactgataggaagaatcaaactgatagtgcagaggacgatttccagccagttgtgaaggggattaaaactaaagagaaagctcaatcaagcacaactgctgtggctaatcaataccaggttttgacaacacaagaaccacatggagatgaacctattcaagcagaagaaaggcagagtaacacaggagggggggaggacctccttctcctaatggataggatcttaagttggaatgtccgagggattaactcccaacaaaaacaa

SEQ ID NO: 97417 - DNA, 806 bp, Cannabis sativa
aaaaaataaaaaaataaaaaatgtcatgtaggctttgagtgacaacgcaaaaaagggccctcggtctcagcttaacaaactccgtttctttgttattcagcaaaaaaaaccgtttctccgtttcccgcccaataaataccgcgatgctctctcaatttcatattacacttactctgaaatctgatacgctctttacgcccatttcaaatttccaaatatttcttacacgaaaaagaagatgatctcctctctcaagtaagactcctctgttttcttcaaaaacctttcagtttcgatcttatggcgacgatctataattctctaacgtaattatttttactgatgacgatcagatccgaagaacagagccagctacagctcgtggaacgagaagatattgatgatgaagaagacctcttcgaagcgattgacaagcgtaagcttctgagcacttaattaagctatctcgagactctagttctatttcttttactacatctttgttcgaagtaagtgttatctgtaggtgatcaattatgtctgcttaaattagtaggaattcgatttttggtttgagctaatgagcaatttcttatttctccaacgatgaccaagcttacgcttctgtagttctacggagagtgattgagtcggatccaaatcagtctaactctgttgtcattaattttaaattatgtcgtatttgtgtgtgtgtattaattttaagttttttgagcgtgcaatatttacttattcagcaatgtcgtttttataacttaatgggcaagaaatgttgctttcaattc

SEQ ID NO: 97418 - DNA, 815 bp, Cannabis sativa
tcgtcttcaggtaagttcttcaatcgcttctgatcctcttccttatctttagaacctgaaaatcaatgctaattaaaatcgaaaacgaaaaactgaaaaaacaaaccaaattatacacataaccaaaactagaataacaattgtcaataatacacattacaggtacataagcattactgatatataaacattacacgaaattttaatgaacacgtataaaaaaaaaaaaaactggttaaaacaatatagaaaatcaatgtcaaccgtatgaaatacatacataacatgcaaaataaatatataccagattcaaaataaccagttaaaaacagttaaaaaataataaaagtcacatataacaaaacataacaggaaaaaaaaccggttaaaaaatcaatcaaaacgtgaaaaatagttaaaaacatataacaaaacatacaatcaaaaaataataataaaaaaaaaccagttaaaaacctaaaaccaaaacaataacaccaataattttttaaaaaataaccggttccaaacaaaacattacaataatattttgatattacaggtatataagcattactggtatataaaacattacacgacattttaatgaacacatataaaaaaaaataaccggttaaaataatatacaaaatcaaggtcaaccataataaacacatacataacaagcaaaacaaatatataccagaaccaaaataatcggttaaaaacaatttacttaaaaccaaaacaccaaaaaaccagtaaacaaaaaccagaaaacaaaaaaaaaaaaaaactagttaaaaacctaaaac

SEQ ID NO: 97419 - DNA, 673 bp, Cannabis sativa
taaagactaattattccattaatagatctcatgaaattaaagaaaaggcttctaagggcattttagtcctaaaggtaatattccgaccaataaccgatactttcgagcctaacaatgatactccgaaaataaaaagatactaacacacaaaatatgactctctaaaggcccaacgtcactttccacagcttctgaacaccaacacagaaattaagtaatttagtaatttacataaaatagcataataaacacatatgaacttaattttattaccacaacatgcattttataaatattaattaaatctcatgtataaaccctacttaaataataatccaatttgttaatcttaagcggtctttacaagggcattgtccttgaacttgtaatatgggggcttacaccttaactaagtatactttattggctagtgttagcaagatttgatagcccggctacccttcttgtattcaatctcttattttgcatgaagcaatgtttttgtgacccctttcttctgttagagtgggttggggctgtttcaaaaaaaaaaaaatactattttttttttttaaaagaataacaaagttaccaattactaattttcttattttgcaatgccacctttgcataaaaaaatatatagtgagaatacatacacattctcgaaaat

SEQ ID NO: 97420 - DNA, 608 bp, Cannabis sativa
  modified_base (561)..(562): a, c, t, g, unknown or other
ccaacatataagctttttttttttatgaagtaccaacgtataagcttaattctcatgctaaatataaaaaagtttttaagtaaagaaaagagacactcacatgtctttaactacggtttttttataaaggatttattgtacctaaataaacgttgtaggaagtaaaattttgtgacatttattatgtaagtataactatgagcgattatttctaaaactaaaagtcaagtgatgatgaaaaatttatctttctgggcaattgtgaaagaactaatctataaggatatatccaaacttatggttaaagactatttatttatttatttatttgggaaagactcatacaatatcataacctaaatgatttttaggtggtgtttgattggagttattgaaatgaaaatgaaacaatttttattctattcttttgtttggttgcattttaaaatattggaatatcattccattggaatgtcctttcgacgattttggtggaatataatgactatttcattttgaaatagaaagaaagatctatgtaacatgagaaaaaatttaatnntttttttatcaatttttttatatattataaatattattccatttta

SEQ ID NO: 97421 - DNA, 535 bp, Cannabis sativa
aaatttaaaaatctctgataataaaaataaataaataaattaattaattaaaaaaattggcaattaaatatacttgggtacactcttcctatattttctccgtagtcccacttctcagtagtacataattagcgattataattattttattaataaaaaaatgtttattaattagttggttactaattaattttgctctttccttgcaaggcgcgcattccttttatttccttttcccttatatttccttttttaattccgaccgtttaattagtccaaccaaaccctaaacaaaaaatatgaccgttgtactgagattatgatcttttcactgcaccagcttagcagtcgaagggtttttatgatcattttcgtggacaataaataaatatatatacgctaatattgtgcgattacgtataaccttcactctcatcatcattcaaaaaaaaaaattactaaatttctctgtacctgaactaagtgtttttgaaggttgagttttcttggcaaatcatgaagaagaagatgggga

SEQ ID NO: 97422 - DNA, 533 bp, Cannabis sativa
ttctaacttacacaacttccaacacagtgaacacaaaacctgtgcagctttttctagtgtctatatttacagcaaagtctgagtcaatatagccagcgacctcttctttgtatttgtattcacaattgaacacaatactagtgtttagtgtgcccttcacatacctcataatccattttaatgcttcccaatgttctgtacccggatcagagatatacctgctaacaacaatcatggcatgtgctagatctggtttggtgcataccattgagtatattacgctcccaacatagctggcatatgggattctgatcatcttgattctcccagtttcactgtttggagactgagatgctgatagtttaaaatgttgagcaaaaggggtaggaactggcttgcatttatccataccaaacatgtgcaggaccttttgcaggtagttgctttgtgacagagtgatacaattttgagtaggcctgtgtatatcaattcccagaattcttttggcatttccaaggtctttcatttcaaac

SEQ ID NO: 97423 - DNA, 515 bp, Cannabis sativa
gaattagttgaaataagtgaaacacatttttttcttacttgataatataataaaactatagcttatgtcaaatagtaatatagtttttttaattttggatttaaaggttttatgtattacaacagtatataatttgagactcgaactcatgacctttaatacaaatgcaccctcctataaatatacaattaatgttctataaatataaaaatgttgttagtttgtacataataaattgtgatttgaatatatacttaataaaaaggaattacatgaaaaatataaattgacactttatttataaaaatatgttcataaggtgtggacaatatttatattttttatgtgattttaattactaaaatacctcttacactaacacttacacaatcagatgatagttgcagggtggttactgcgtggtttcacgatagttgcgtcaaacaaaggtttcaatcagacgatagttgtaggatggttactgagttgttggccgaaggtttcaatcagacgaa

SEQ ID NO: 97424 - DNA, 830 bp, Cannabis sativa
  modified_base (50)..(60): a, c, t, g, unknown or other
ccttcgaactttgatatgcactaaattatgccccctgaactttcatccannnnnnnnnnntttactaaaattagaaaaaagtccgtaaatccaacaatttcaaagttcaggaggcattttcaataaccttaaaagttcaggggacatgattttggtataatgtcaaaaggacaaaaatcataattagccttttataattgtttaaaatatgttaatacttgaatacattttattttatgtatgtttatgtataataatcatattttatgtatataattttgattaattaataacatattatatgtatatacatatttacattagaacttttattgtcatactttatcaattatcattttttttttaaagaagccataaaatggtaaatgataggatcattatatgtaaagaaaattgtagaaagcaagttgttttaatttttaccaatctaatttatttttatttttcagtttagtttttcatactcagtttagtgtgattttttttttttttatacttcatgaaattttttaagtatcctatatcaatttttaattcattaatcatgttttatttaatgtagtaaaaggggagctaatcattttttttttattatttatatttatatctatataaatgaatgtgttaattattatttgtaaaaataatttttctaccaacttttatgtatattacttttttttttttacttttatttgtactcatgatctactgtaaactatttttttaattttaaaatcattgtacttatcttatttgcttagttactttaatacctaatattattctttaagtaagaaaaatatttc

SEQ ID NO: 97425 - DNA, 517 bp, Cannabis sativa
atagcagaattagttgttaacatcccccctcaaactaaacttggatgtggccatgtgaagtttggacttaaggtagtgaaatctctcagttgacaaggatttggtaagaaggtcagcaacctgatctactgaaggcacaaatcggacagcaagcttttgtgcaacaatttgatcacgaacgaagtgtaagtcgatttcgatatgcttcgatcgggcatggaacacaggattggcagctaaagcagtggcactttgattatctacccagataataggacaatgatgaggcgggatgtaaagttcagacaataaggattgaatccatttgagttcagcagcggtgtttgcaagcgctctgaattcactttcagtactggatcgggcaacaacttgttgcttctttgctgaccatgatatcagattgcctcctaggaaaataacatagccccctgttgatcgacggtcatctacacaactagcccaatcagcatccgaatagctttggagtgtcatgtct

SEQ ID NO: 97426 - DNA, 606 bp, Cannabis sativa
gtttatagcatcttcaaccacacttttgactttttaactaaattaaaatagataaaaataaaataaaataaatagtcatttttttatttttactttaatcatgctttctattttagttagtatattgtgattttttgacggaggtgtacagagcaaaacggaaccagagtttaggtagttatgccgccaaaattttggtttttgtggttaactgttacaaaccgtaaagttcaggtagtttagccgccaatataatttaatttaacaaaaaagtaataatacttttgattaaaatactattaaaaaaatttaacaaacaagtagataactccctatccattctctattatcggaaaccatattttacatgggtggagctcatttaattaaatccttactcttatttttagctaaaaagtgtatttagagaacatgatttggagatgcttttatgaattattttacagtgcacttctaaaaatgggtgtatctgtgcaatccttacgagtgactctattatgttctatgatttttttttaatcttatcttttatattataaattgttttaaattttcaaaatattgcagaatgtattaaataactat

SEQ ID NO: 97427 - DNA, 520 bp, Cannabis sativa
ataaactttgtttaaatgatgtaatagattaatctaactaagtagagagtcatgtaccatatcatacactgatacaattgtactaagtgaatatgtaccttgaggaggaggaggaaggagtaagtgtttattattattatgggaacgagcagcggcttgctccaacaatttgcgtcgttttcttttgtccctggccttgtgattttgaaaccaatagaagacatttttgccttcgattttgccaaagcggcggagcataatagtgatctcttggatctgttgggccgttggggttctctttccgtgctggtacaattcttctagcacaagcaactgctccggcgtcggtgtccatcgtgaactttgcatcggtacccctactaccacttcactactacttctactattctgatgatgatgatgatgatgatgaagaggaccaagcatcttgtacttattactataatctgattatgtcatatcatcatcaaatattaattatattttaaaacaaataata

SEQ ID NO: 97428 - DNA, 617 bp, Cannabis sativa
atttcaagttcttaaatttatgttggtattactttcattggataacatatatatatataggaatattagaaagcgaaaactcaacttcaatacgtgtaattgtagtgttatatcgttaagcaaataagtaacaaccactgaaatggtttattaatttaataatttggatttggcattattcatatcatggaaaggtcgaatagcataatgtacggaattgataaagtttccgacgatttagaactaaccaccttcagaagagcagaaaaaatgtataagctactccgattcaactcttaaacacaaaatcgtactttaatctacaatttcttttaggcaaaaaatataattgaagggaaagacaataaaatggtgcagtgtaagagtctcgatttctgattcttctatagtcggttccaatgatttggagaatatgggtttggcacaagaagtatggcttcaaaagttatttggtcaagttacaggttaaagtatattaagtattagttgaaaaagagaggttttgtgatcatatgtggtttcatgttgtattctaaaaatgaatgataattttatcacgatctacgaaagttagatgtttgtattatataataaat

SEQ ID NO: 97429 - DNA, 3710 bp, Cannabis sativa
aaacttggtttagagtttagaatagtgagattgaacatatcgaagaaaacagtgtcgtctgactattttaaatgtcatttcaaagttcaaaactttaaataatttatctgttgcccttcaaaaacaatgccaactctatcatttaaatatttgcggggctcttttggtatgcagagatttatcttttcaaaaaaaacaaaaaaagctgtaaaattagattcaaaacaaagacaatatcaattaatttcaatacaagagcaggaaaacagttggtgagtattgggccacagatgtaaataatttttctataaatccgaagtaaaagaatttctaatgtttttctgtatagtttctctctccctattgctgttccttcatgcatagttatgttcttaattgtgaatctttcattgtagggacttacagctacaggtttgaaaagggaccaaattttcatcggtgatctaaacaccttgtacaagagcggaaacactactgtggatgtgaagatcgatacctactctaatgtaagaacacaaaatctttggacaactctggaattactactgtggatgtgaaaattgatatcttctttaatgtaagaataaaaaatttatctttggacaactcttgccttttcaaatgtcctttaactatataacattgtgttctcatactccatattatttgtagttttcatttacaaagcaaaaatcttcaccttatgcttggtacctttgatgttgatatatagttggttattgtattcattttcccaagttgactcttttttgtaggtgatcacaaaagtgacagtgagtgatgtcttgccgaataccaaaacagcaatcagctttaaaataccagacaacaaatccggcaaggttagttgttgaaacttactgatctacttaaggttacttttaaaatcatgtattaattttgcaataagaattcatacacccattttgtccgaacactttaagacacttcaaatcaaataatatttactgtgttagtcactttaagtgaaacatctattgttgaaggggatgtgtggatcacagaattgttgcaccaaagttcacacatcaatcgtatgtcaccaaacatctacctcatgtttgtattaagcattgtagtagtactttcctttgagatgagtgtatatgatattatgtatttacatatattgactttcattctgtgtacaactgtagctagatgttcactacctacatcctcatgctgccattgattccagtattggtcttaatccaaatcctctcttggagatatcaactgctattggatcgaaagagctgagtttgggtggtgaagttggatttgacaccgcttctgcttcattcaccaagtacaatgctgggatcagtttgaaccagcctgattttactgctgctattttattgtaagtattgatgatactgcatttcttattttgaagaaactaatcactatagaccacaaaacaaagccaagatttagcaatgacatgcaaataattatctatgaaaaccagtataacaagtaaattaaccaggaaagttgtaacaacttgtcattgttagtttttcaagtttgaaaacaacaatttttgtattttggttactaagttctagagtgtgagttcaaacccttctcaatgttgaaattagtattgaaagaccattgtggaagtatatccttgaatcctattccatagaaatcataagatgtttttccagggatggtgaagttcattcaattctttatgcctattttatagtctaatcctatgtacttgaaataaaatcgataatgagcatatttcatagctttatttgtttttgttagaactcgaatggtttttagtgtatgattgagtttacccggatgcaggacggacaaaggacaggcactgaaagcatcatacattcattatgtcaattccaccagcggaacaacaattgctgctgagttgatccataggttttccagctatcagaacaatttcaccataggaagctctcacgcacttgatcctttcaccgtggtaaaagcgcgattctcggacaatgggaaagctgccatggtatgtcaacatgaatggagaccacgatcgataattactgtctcagctgagtttgattcgaaggctaataactcatccccgaagctaggtcttgctcttgctttaaagccttgatttgggaaaaactttttttttggtcacattttgcaacatagccattattttttttttcatccataattttaagcttcactttgattgataaaatgggaagctgagaagttggttattgattaaatgttgtatttggtggggtaattggacccatttttgaaaaaattcattgaaaatgaaaataggacattttttttgttgccaaacattgatgattatcatttggtattttatattattatttaatagacagtttttaactgaggttgattagtttcttttaagtctcaaatataaagagaataaaagtcatacaaggaaatatagacattattatgatacgttttacatgacaatttatttttattttacttaaaagaaagaaagaaaaaagttctaaacaagttaaagtaaaaaataaggtattcattgtatttttttgcaaaagttattaattgaattttttgttctattaaatgacatgatagattttatatttttttaaaataggaaaaatatgttcttgagctcaattttcaataatattttttttaatataacaaactggaaaataattcttaacatagacaaatgcagaaaatataatcagatttgtcataacacttataaatcgaattattattaaattttattttgacaaaaaattcaactcagagtctaaattaacattgacactgacacatctgtatgaattattagtgcaataacatgtataactgatggtaccagaatactagatagttatattttcacatttaaatatatatatatatataaataaattatgtaggtaggtatgaatctgattttgaatattggttatattgtatttgagaattgagttttatggttttttttttctattttttaatgtgagaatatgagattgtttattttttatttagtttgtttattgttttgaatatgataataatgaatctgattattattttaagttttgtttgatcattaattttttctgatacaaaatggcattgggcatttttgaatttgataatccatatgcagatgagatttatcaatggttgttgtcttcaatcttcatcaataaattgtcttcattgtttgattatatgaatgttatctatccaactcctgaatctctaaccctaaaccttaaaatatcaggaccaggaaaaaatacctcttcatttcactctttgagctccggcaatggcggagaaactccaagtctttgttaccacgctagggggaaagggatcgtctctgtcctcatcatctgtctatgccattgccaatggccttgcacaagtacgaatcgattcctcggcatttagcaggcttgccaccttcgataaccgtactccgaccatcaaggactaccaattcaacttctccaatcacttaaccacggaagagtccagggcctttgtcgcagtactcctcaacaagcttctcatcatctccggctcggcttgcatccgtacagttctcccagttc

SEQ ID NO: 97430 - DNA, 1801 bp, Cannabis sativa
  modified_base (802)..(821): a, c, t, g, unknown or other
  modified_base (1052)..(1055): a, c, t, g, unknown or other
aaatatctaaccttataattaaataaaagaaattaacaaaattttaaaatctaaccataaataaagtaataaaataatcaattttttaaatttaaacctcaaaatatcaaaaaattaataataatctattaaataattaaatattattaatttaaaaattgacatttaagtttgaatgataaaaattatattttattttgatttttagggtttgaaattggaaaaattcaaaatttgtagaaaaaaatcgacaaaaattagattttgggtgctgttgcccacgaggaggctgcatgcagcctcttacgcatgcggaatggggcttttgcagagtgacacaccgagaattctctgtaggtccagcctctcactcggcgtaatgcagggttcctaggaagggctcgtgtctgagcgtggggctaacgagcgttcggataggatttttcctagcacatgcacgtgcggatcaccttgtccgagtgctatgcgcacatggtgctcgacattgatgcactcaatggacccgaaacttcaaaccaccataactctctcattttttatcagaattaagttccgtaaaaatgaaagttgcttaatttttcacaaagaatcaaaataaattattttcatggaaaaatttcgtaaatcacatacattcatcaaataacacataaaccaacacgaacacatccaaatcaatacaataaataaatttattgttttaaatccatatttcatgaaagtaaatcattgccatggctctgaggccaattgttgggaatatattaccaggatctagatnnnnnnnnnnnnnnnnnnnntaacatcctaaatatgaatgtctctaaaacaatgaaattaaacacataagggtttagagaatcttacattggttgcaacagaatattatgactccttccgctcagatctctaacccttgttcctttagtattatcaagatttgagattatcaagatttgagccatcaagatttgagcctggatctctttctctccttcaggttagttaccaccgtcttccgcactatgatnnnntacttgacttgttatgtgtgggcatggcactctatcactaatggcgaattggatgaagaacaattaaggaggttttgaaaactgtatagaaggtgtctctcttctactagttgtctgacagagttagaaactagatttggcaggttgaaaaagttggatgagatgagagcatcatgaactccacgattgtcctggagtttgaggttactcccccttctcttggtgtgagaaacaagaaacatgatgagtatccccaggggttcaagcacattcaaacagatgcttcagtttctggatttgaggcaggtcttgctgctgtgatagttgatgataatgagggacaagattcatatgttgcagtcgagtttgcgagggtggatagtgtgttagaagctgaactggctgcgatatcgatggctttgtctcttgcaagaaataggggttatgatcatgttattttggaatttgactgtgcagtggcaatggtcggtctgaatgagagaaagctccctgttcaatggggctcttatcctatgtttactgaatgtttaattaaaacttttgatttccagtcagttgttttttctgctattaaccgttcggttaattgtgttgcggattgcctggccatgtgggctcgtgtttctaagatccaaacacagggttgtttaagggatgtggcccccttttgtggtcactagtttgtgttgtgtgttcaataaagaatccagatattaaaaaaaaaa

SEQ ID NO: 97431 - DNA, 551 bp, Cannabis sativa
tagggaaggccaaaacatctaatatacaatatattagcactaattcattaccaaataccaaaatctttcatatttagctcataatttatctcactaaagtttttggttagtaatacttacaacatagaaatttagagtccaactcgtaagatctcatttgagtgtgatgttctcaattggattaagagcatattatctgtaaaataaacaatgaaattaaaaatctaacaataaaatatttaatttgaaacttcaattaaaacaaatcaactatatatattaaatagtatatgttgtactatactctttacttaagaacctgaaaccaacaactctattccaataatagagaaatggattggtaaatgaatccatttgatttgaaactttcattaaacctaaacctatatctctctctatatatatttgaatgtcatccttttcaccaactaattttaaaataagaaaatgaatattgaaggaccacgtccacgtgtcccacttgaattgctacactacatattagagagtgttaagttctgttttattag

SEQ ID NO: 97432 - DNA, 710 bp, Cannabis sativa
gcttattaatttggttgatgctttatatactacattgcagcaagacattggcctatattcggccacagcattaggacatttaactttaggtacaagagttaataccgtagagttaatttccttaagcatttgcccaaaattcaagaatgacatgatggctgcagttgtatcttctccaactattttccaattatcttggaagaaaaaacttccaaatccgtccagtcccggggccttgatgcctggtatgtcaaaaataatttgtttgacctcttctctagtgtagggagcaattagcaagtcaacttgttgtttagatacgagaggaccctacaacatgatctctatttgcacctgtttcctattttgcaagttaaagccaagcagagattgataataatcaaggaatgtagcaataacctcagtaggattatcaattctttctccaggtgcatcaacaatagaataaattctattttgacttctcctttgtttaatgctggcatgctacaaggcagtattttcatcacctgcttttgcccaagtgagtttagtcttctgatgaagaaaggagctgaaggctttatggacttctgcataatcttccctgtaagtttttttcctcctgctgcagtagctgatttagtggatctgccctcagtttgttctgaatctcttctaatcttcctctggctctctcatcagctgcc

SEQ ID NO: 97433 - DNA, 762 bp, Cannabis sativa
tatataagcaaatataaatatagcaacaatgcaattaatcaaaatatcccacaatcaacaaagatttaatgaacaaagatccattgaattccaaatattcgttgacctcctaggatatcctccacccaaaattaaaacctcaaattctcaatcacccagcaaatttttgaaatgcagttcaataggaatcagaatcaaaccaataaatcaatcaaaatatatatgtaaaaattctagattgaaaaaaattataacctcattgatatttgagacatttacgaagacagagaaatttgagaggagaactatgaggaaatagcccaattgtttccacaactaaaaaatcaaaaacaaaactccccaaattcaaatgatctgccaatgtcacaacatgtattgtaaaagaatgacatacctgatagagtgagtaaatgttttttttaatggagtgagcaaagatttatacctctttaagttcttatccttcttctccgtgttcatcctctttaacttcttcttcctctttcaaataagccatttatttccatctgatttaaaaatcgtttctagatttttcttttcttttcgacttcatatatgcgtacattaatcaaaatagagagcaaaacattaattagaattaattcatttttcttaacacaactaatcccaaatatatgcctaaaattgacaagttgagacaaacaaagccacttttcattaatcagaatgaaaaactttttttttggcagagaattaaaa

SEQ ID NO: 97434 - DNA, 747 bp, Cannabis sativa
gaataaagtgtgtaattaaatttaaataatagaatataaacgtgttatatatgaaactttctctctctctatatatataaccccataaaaagcaaacggaagagaagagatcagagagcatccaatttctccattttttttttgcttcaagataaaaactaattaaaaaggtttagttcttcttcttttttctttcaatttctccaattttagtttgattgttttttgttttgagttaatacatttatttcaaatcaatagcctagccctaataacctacgttgttttgatccgataattgaaaaatatattttgtaatactttaatttgtgggaataatcaatatatatagctttaataagtattagtttaggtttacttaatttgtttgtctaatctgataatctaatggcagagatggcagatgtggttgaagaaattagtgatggtaaatctttgttagcagcagacacagaaaaaaaagaaacagatatatcatacgatgaagaagaagatgatcatggttatgactctcaagatgaagatgaagatgacaacgattttattcttgttgaagatgaaaggataaccaaatcaaggtattattattattattataattattatgattaattgcttttctctttttgtctttttatgattagtgttatacttattattattagggaaaataaagctaaattaccaccaaacacaaaattttcatacttatccgatgaagatgat

SEQ ID NO: 97435 - DNA, 886 bp, Cannabis sativa
agtaggaatattggagttaatagtagggttacagacatatgtttgcttgggatgatgaagaatgggtcttcaatccaaagagaaggtcccctctcctcttgtgctttttctggggtgtttagccaacttctttgcatgggccatcttggatggatcatcgtagggatgaaatcctatcattggattggtaggtggcatatttctcatatggcatttatgagtgtcagatcgtacgagctgggcttcaaacgcgtgtcatatcagggcttctcccttttaaatttcccttatgcctagtcattggatcattggtttggtacgcaaggacaagcatactctgtatgatggcgtgtcgtgggagaaaacctctgacgttgtacttgaaaaggcatggtccctaggttcgtagcctgacacgtatgggtgaagcttccacaggttaagagcataacctagttccccgtgttttagaatgccttagcccctctgggcaatccatgctcctcgcggaggctgactgccataactcttagaaaggaaggggattttggttcatcgatccacttcatgtggctagcagttggggaactccacaacatggaggctcattctgcgaggttgatgcctttattttcctagagcaccaattgagggattagagcagctaatgactcttcggccttccttgattagaatccatgtgtcatgcttacgaaaatgtgaataacatttaccccaagcttccggggcgtaacatggtctgggatcttgcattatcttcccctgagtggttttgggcacatacgatgaacatttcattacattacgtcatcagccgccaaactgaagtgtcattatttagaaggcatgattactactttttttt

SEQ ID NO: 97436 - DNA, 612 bp, Cannabis sativa
gtcccgtctcactccactcctgctgcaagcctagcaggaccttctcacggctcccggagcaagaggtccttgaaaggtagcaactggacggaggacaagcgataggaaaggggggatactagccaatacacccagtacacggagctgtgggactcccaagaacgtgtgtatttcgccactaggcaaaatacgcactaccggacaccgcctcctctgcatagagatagctcccgaagggatcccaacaaaagatgcgagtaccacaacgacattagacacaacaccaatgaatgcaaaaaccataaagatgagatcgagtggatcaagaactggctgccccatctgaacccggttctggcagtaggacctttgccccaaggaacgccagggggtgcgcccggagcgttagcaccggtcgctcccccggggaatctcagtagactcctggcctgccaccgagacccaatggaagagtggctatgatctttggagggccccatatgggagggaccattcgaaaggaattaaagcgctacgccggggccgttaaacacagcgaggtttcggaagttactcagctcccagctcagaggccccgactcatggatcaac

SEQ ID NO: 97437 - DNA, 1801 bp, Cannabis sativa
  modified_base (547)..(554): a, c, t, g, unknown or other
ttatatatgaactgtttttagtatgagctacacttattgaaatgaataaacttacatttttcttcaatgaagaatgacaaattatatcagtaaatttttaattagtatcacaatttacatataaaataaattaatataccaaaataaaaaaaagaaaaaaaaaataagaaagaaagtgatgagactttggattagtggccttttgattcattcttaggtttgagaagaggatgaggctcgatcagagtttctaacttttccaagtcctccttcaattcatccacctaacattattcagataaataattaactagattattatttccataaaaaaaatataattattatttaaaagctagaattctatttaggaaacttacaaaaatattggaatttatgttactttttacaaaaatactgtgacacggaaaagttttcaaaaatactgtatttttataaaacactagtagaactcagaacagaacaattcaaaacaacagtagaacaactaaaaaataccagcagaacaccagtgaaaacttaacannnnnnnntgcagtatgaaacttataaaaatatacagtaaaaaagtaaaaaaataccgcctaatagtatttttgtaaaaaaataataaaagttagtataccatgtaaattttccttctattttaaccatctaggagaaagactccaactttgggcacagacggaccgggccagtgcccgtaccaccatacaaatagggcccaaaatgtggaaaaatactatatatttacacaaatttccccaaatgttttgaaaattatcacttttcatatattttttttttcttttattgtataggactcactctcgtaacttaggtgataagcagactcttcaataacaatattttggctgaggtcttaacttatttagggatatgttagaaatttctttttttattttttatcaattaattaaaaacatcttcatattatatttcatttaaatgattctatacttttatcttttatttaaatctagcacataatttagtaaagaatataatgagaacaggtacatcttaaagaatataaatataaaaataaaaataaaaattataataactaaaataaaataggtatacaatataatttcatcacttcttttattgtatatacagcagaaaaataaaacttattatatgtataaattgaataatgcacagttttaacagtttaacacaaacactatcatgtatatatgagtaccttgtgaatgaattgtttggtgagatgagcttcttgagcagctttatgagatagtcgttctacaagcatagcagttttcttgagtgtcccattttctggaagctcatcttccacctcagacgacatcttctcagccaccaaagccaccttttctactatctctgccacattttcaacctcttccacaaccatctctgcccttcctatacatacatatcattatttcatttcaatatatatgtatatatgtatctcaacttttatcactaactatatatttatttaccttctaaggctcgtagttttacccatttatcgtatgagaaaggaagaaatgttaccaaagaccccaaaaaccatctccccctgcattcaacaaaaacaaaataattaataatgtttattaataataataatataattatagtttatatatatgattatagtgatagaaatttggtaccaataagggaaaaatgaataactctgggaattagaagctgctgggattggtgccttaattactggatgaacctttatctccttatt

SEQ ID NO: 97438 - DNA, 809 bp, Cannabis sativa
caagagtcatggttgatacaaaaatcagagctgtatataatatatatatatatatataatagctcttaatttctctttgataaaaggagagtcacatctgttctagctatcatgttatatttatattgtaactttagggataagtttagaattaaaatggattaaagaagataaaaaaaatagcttaattaaaaacctatagccgaaatcttatagagaaacctatgagtttcaattttgtcattttattaaaatttcttttcttaaaaatatcacttgtttcattctaactctttaaatgttaattttatcaatttaataattataattaattatcaaataaattattatataacttatttatcaattaaatttctaaagtctcttaattaaaaaatatactctaagttttctttttcttctcaaattcgcccttgtttaataaaactcataaataagacataattttacttaaaattctaattgattaattaaactaattaattcagtctacaaaacaatatcatctcaggtagtgtgaggaccaggcctatataatcaaactgccaataagcagttttagaatttacttagtaaattctctatcttattaatttttcctaactccactataaatttggaattgcattcttggttacatagaatactctatttaccaagaatagatacattaatataagttatctattatttgaatctaaacaataaaggatcctctatagatggtctagctacatcgagtaaggactaaattatcattttacaattaattcaagggtaaataccat

SEQ ID NO: 97439 - DNA, 646 bp, Cannabis sativa
taattacttataaaatttaatgatatattcaaacaaacttggaattgaacgttaaaactaatcattctcatttttgaccaacttggaattgaacgttaattacttatctacatgttatatattaaataacacaatttatagtcttgttttttttttccaaaaattatagttttgtaattatatatatattgaaggaaatgaatatatcattaaggcaactgcccttaaaacagagacaatcaacttacaaacccattagaatgtccaggccaccacacttcagcactactaaagataagccaattttttatttttttatttttttgaaaaagataaagccaatttgagcaagatcacttacttaataatttcgtaatgtctttctctatatatgtcttactaacttgtatcaagtgtcggcaattaagtttgtaataattaatgacaatctctagagaaaattatgtaccaactaatttaaattttttattcataaaaacaaactaaagaaaataagagtgggttggacgttgaatgcagattcttttggtatggctcctatgtagccttttttttatttatttattttattttaatatatttatataatataattgggtggtccccatttctttttttttttttt

SEQ ID NO: 97440 - DNA, 698 bp, Cannabis sativa
gcttctaggcaaacctcctggctaatgtgtgtatcaaaaatcaaatttctttttctaattgcttaccaaatacatttatagcaaaatattttttaaaaaataaatttttaacttttttaaaaggtacgctaaacacgtttaaaattaagttaaaggatatattagaggagttgatagtagtattctcataaactaggactttgtaagttagtaaggtattaaaaaaatacggttaaattcaaataaattattataacatttttgcaatataatataatcttggttgatatatccattaaaaaacagaggacccaaatgttagatgttttagaaaaacggataaaaaagcaaatagaaacaaattaagggattattagtaatataggaaagttagggtcttatggaactttaaaaaccaaaaccaaaaccctaaccctatcttcttctacttcctctcggactcaaaccctagctgcggccacggtaactctctctctgtcttcctctcttggtgttgcgatttagattgtttctttgggaatttattcactgtgatttcatttctcatatcaaaatagatacaggctacgacgattttgacgagaaactaaaacttagttaagaaccattgatatgaatactaaagcaacgatttttattttaaacgatttaatttatgggaaaaggacatatttttt

SEQ ID NO: 97441 - DNA, 539 bp, Cannabis sativa
ctaccacctcttacatatttaaaagttctctcataaatacacttatctagaatcaagccacctcttcccttcttatttattcaccctaccaaacctaaattattgtgcttctttttctttaatttagggcttacttcttctttccctttgcttcttcttcttaaatctaagctggctcacttcatcttcttattgagggtgtaggatcgtcaatgtaggccaacaactttaagaggaagtcgatcgaagtctgaagattactgcataaggtattgatttctaacccctttatttctttgttactttttttttaatttttttttaaaaatagtttgggtatcttcttacattttttcatggaaacactttgattttctaattattaatttgaggtggttcattacttagtttctgtaggtattcaatcctcctaatgttcaagaacacattgcagattttactggagttgtgccttgtttcacgtttctgtgctacgaagttaagaatggagttacagtttatcattttgtgttttattg

SEQ ID NO: 97442 - DNA, 906 bp, Cannabis sativa
gaaaccaatgacaataaagtcaaatatcttaataattaaaaacattaaaatataataaagggtcatgctcagacaagtagtaaagtcaggacagatatatcatataatagttgaatcggagatttatatggatttatcattacaaaatacagtaaataaataaatacaaaatttattcttaaaaaatatgtataatcttatcctacaaaactagtatttttatttatattattattgttggaaccagacaggcatttatagttgtaataatgtattgtttatttgataaaaaaagaaaaaaataatgtattgtttctaaatgttcaatttacttcccttcccctttttaagtattgtttttttttttttatcaaataaataaaaagaattgttaaagggtggctacatgtggtatttgagtgtataatttaagttaaatttaattaaaaaaaataagtaaatattatatttgatccaaaatttataatggtgctctcatacattaaggtaaaattaacttttttttatataaaaaagtgtaaaaaaatcctaaaaaaaacatcaaatttttattgaaagtaaataaaaattataataaataaataaataaaatgtaaagttattagttacattaataagtgacaaaagagtaaataaaaaattatatttattgtaatgtaaaataaaatttgacttatattttgttaaatttaacataaattttaacatttactaaatttggactactttatactttaccactgaagtttgtttttatgaaaatatgctaaaatatacctatatactatattttttagcactctattaagaataattttataatgtgtaatattattaacaatacaatttaatctcatgtcctatcaatatctatatatctatata

SEQ ID NO: 97443 - DNA, 766 bp, Cannabis sativa
aaaagttaccattttccgcttgcagtcaataatggcagaggatttggacaagaagtccattccgagtataatatcaaactcgggcaaaggtaaatccactaaatcggcacttagttctctgccttcaattctgattagcacagatctaatccactttctcgatataatcaattccccattaggcaacagggttccaaaccccatttcaaaaacatcactaggcctaccaagatgattaagtactctggttgctacatagactcacatagctctagaatcaaacaatatagtataagtaaagccgttaataaagagcttacctgtgacaactgaacggctggcggcagcgtctgcctgagtaatagcaaacacatgagctagtgcagatttagcttctggcttgggttcctctttcttcagctgaggacaatctttcttgaggtgccccactgctccacactgaaacaacccgttcgattacatgctttggggtgatgcttcttgcagcgcgggcactctggataggagtaggtctggcgtccccctttaccctaatttccacgaaacttcttactttcaccagaacttcatgtaggtggaaagttctctttctttgctcgatagtggaatctccactctccttgccaagaccagagatagggagagcagtgcttccactagcatcaggagtgtaacgccctaaataattaggcacgctaccaaagatatttacgaaaaacttaatcccctaatttggattactaat

SEQ ID NO: 97444 - DNA, 1151 bp, Cannabis sativa
tacattgagcagcaaacggacataatttaaggttaacctatttgaataagttgtttgtaactagatacataattccatttctagaatttgtcaaaccttttctttatctatcaaataatactaataataatgataaaagaatataccacacttagcataccttcatatcgagtaaaaaaaaactttctagttataattctttttaataaaataatgataataataaatccaaagatatataattagaatagtgtggtgtggggtggagggattagtttgagtccacaggaagtggtagtacggactggacacactaactaactcatgatattatgggaattgggaaatgccgacattataaaatatcttaatttctatgttaaatattacaggaatgctaattattgagtgattttataatacacgtctcttaaaaaaaaagtgtactaatacactttttttatctatttcggtatttagaaaaaaattctagtctaatttttttatatagtcgtatacgttatagttatttaaaacacattgtaaaattctaaaaaatttaaaatgatttacaatataaagcaatattcaaacagtttctttcacacacgtacgtgtgcaatagactgtttaaatcttatttttaatgtattaaatttctttgaagatagtaaaattttacaaaatatcttaaataactacaacgtatatgactataaaaaaattagaataaaaaattctctcaaatactaaaatagataaaaatatatccgttgtaaaaaaaaaaatttctctcactatttacacttttcttttttattaattaaaacttttataaaattcttattctttcccatatatgtctttatcttttttcagagacttttttttctctcatttcgtttttggctgactttttttcattttttttttccaattttctatctctctctttttttattttttttcccacactaatattttttttatttttatatatataaaattatatataataaaatacacatttttatactttttttccaacacttttttactctctcaattttattttattatttttaacaaaaaaaatataaacacttattatatttctttttctctattttacattttcttgtcattcacac

SEQ ID NO: 97445 - DNA, 628 bp, Cannabis sativa
ccctcttcaagatcaaccttgtcattgaaccctttccactcaaagcattgaatcatacaagcaatacttgtttgaatgatcaacaaagcaagtgaaactcctgggcaccctcttcttccactcccaaatggcaaaagattgaaactttttcccctaacatccatgcggttgatatttccactcccatcttcacttagaaacctctctacattgaactcaagaggatttttccaatatttggagtctctaccaatagcccatgagttaatatacactttggtctttttaggaatatagtaaccattaatggtgcaatcttcagttgattatcttactattagtggcccaactgggtgaagcctcaatgtctattttgttatagcttgaatatatggaagatcaacaatgtctcactcctctactagtgtggtttttccaactatgctatctatttctaatcttgccttttcatatgtttgggtggtttattagctttgatattacccactctatagttatggtagttgtcccagtcccagctacaaatatatcctgtagatgtgaaaaatatatagtaacaaatgtatgaatgataatttaaggcctacattgcacaatggtgttttac

SEQ ID NO: 97446 - DNA, 1610 bp, Cannabis sativa
atatatatttgtaaatattaaataatttaattaatattgacaattaaccaattgaaaataaccgatccaatttgtacttttgcggattagattaaatccaaaatatgacatccacacttagtgtggatcggatgtactatgagaaaaatagtgcgaattagattgaatgaacacccttagttagtgacagctgacactactaactgatctaactaatacagttaaaggaataccaattgtaactaccaaaaaacagaattaagactttcacaagtcataaagtgtctaatttatatagatctaaattatgtattgaatatatagaaatgagcaacatattatgcgaccaaataaatcactcatacataacaaaaaaactctttcatgtaactagacttagaaactataaatgttgaaacaccaataacaatatatgatatctatgacatttacatcttgatcatgtttgactatgatgaaatttaactactaaccaaaagcgacctttgaaaaaagtgagttacaagtctacgaatcatgtcaagaagtcaaaatgaataaacgtttcattctatgcaaagacatatagagcctaataactacttaagctaatataaaagcttatggactttagaatgttatgagtattttactattgcaaaataaatttttagtgtcggttcgagagactcttttaaaaaaaactgacactaaagaccaccccaactctttagtcacagtttataactgacacctataatgtatttaagtgtcggttagtataccgacactaaaagtaaaatagagacaaaaatagttaaaaataaaaatatacatacaatataagtgtcggttcataaccgagactaaaagatcatttgatctcggttataaactgacacttaaagggtataacaaaaatattagaataaaaaataaataaaaaaatatgaataataaaaataaatagaatgttatagatttaaacaaaccctaatctcatctcatctcatctcttcctttctcacactctctcccgaccccccgcctctctttctctcacttgctccctacggggctagaaaaaaactagacaaggattgaccctcgctcacccaccgctcatgactctcccgttctcttcctctctcacaatctctcagcttaacctcaacgagtcgctccagtcactgttgccactaagccaggtaaactcttttgttctctcctctctctctatatcgctcctgagttctctctctctgttccctcttgcgcggcaacttcgccagaccacgatggccatttccttgagcaccatggtggatatcgtagtcctgaagtcactgtaaaatgaaggcttccttaggtgcttgtaaattttcaaacaagtgttttgtgtgtgatgtacaagtatagactatcaatttatactcgtgtgttgatcttactgaaatcgtactcacatacgaataaggtaataaaggtctttctacaacccctttcagaaaaattttaatcatattttctttcgagttattcatgttttagtttatctcttaacaatattttttattttgccttaaagcttgcccaagatgaatacactt

SEQ ID NO: 97447 - DNA, 688 bp, Cannabis sativa
ggggggaagccttagcaatcgcaagctaccttaataataggagcccaaatagagttatagaccttaagacaccttatgagatgtagtacaatagaacccccaacctaacgcatttaagaacatttaggtgtattgcatatgctcaccaatccattgacaagctggaacctaggctcgtgaagggaacttttctaggttatgccttaagaacaaagggatataaaatctacatttcatggaacggcaaaccaaagattgtgattgctagaaatcttgttttcattgagttagaatatcctcactcgacctccgggaagggtagtgtgtctctgtgtattacaagaaaaactaaaatcaaagacaccagaagtgtggaagtggagtacggaacgaagctcctggaagaaggttcacaggcagaagatagtgtagaaccgaaagacaatgcacatccggaaggttttatggagccagaagaataagataacaaaaacctaacaaaggtgaggtgccatgccagaagggttcggacagacaggtctggaaggttatcagttggctcgtgatagaattcagagagggattcaacctctagcaaggttcgcagaagtagacataatagcatttgcacttgcgccagttcaacaaactaaaattgaagagcccggaagctatgaagaggcaattt

SEQ ID NO: 97448 - DNA, 1347 bp, Cannabis sativa
gtttatacaagttgttcttgtctagcatcagtatagaaaaaaatatttattatggctatcgtttgatttgccacaaaataaaataattattgttatcaattcaatcaaaatttaaaccaaattcatttgagatattttataaccaaactatcttgagagaacattgctctctatttttatgcatatacaaagtctaatttaataaattacaggatatataattatatacatgtataaaatattcattcatcaaatgttaaaagtatatacatcatagacaacatatatgaatatatatatgaagttgctaatgctagtattagcgtatacctctcccataatatgaaatagcaatatatgggcaatgaatgatgcatcatgcctcgaccagtctttagcttccttcaatggtcctatcttggtgcctatgctcttaataaaaagaataaaccttgtaactacaaagcagaaccatgacaaaataaataaaacagggtcatcttatctattgaaattaattaagcttctccaaaactgcacataaacaagattggaaaacttgcccaagcaattgtataaacaatcttcaaaaaaaagtgacagtatgagaaaatgaacaataagatttatagaggtaattaatgagactcaaagataccaatgattgttctctgcaccaatctgcatctaagaagatttcttttggtaactgacttccactgttttagaccttcttgataaaatgatagtcatgtcacaatagcaagttatatttattagtggattagtttccctaaatacctaaactagttatattttcaaaaacgttgtaaagaaagcacttcgagagtatataagttataatgataacaataaaatattttttttcctaataatcatttcagtgcttgatgttgctcttcctaaggcacaactaacaaatgttcaactatttcagtacaggaaaattattgacctcagcacctaatacaatcctatattgattgtacttcaaatcaaagtagttgattaaacaaaccaattaccaatggtgatctcttattggaaacttaaatctttaaattaacaaaaatgttccaatgatatatcttagcgttctcacagattaagagtttacgaaaattgacacggcatcagttgatgagatcattatgctatgtgtagagttaggaagaaacaagaggactttctatgagttatttcaacaaatactgagaaggcattttattttcataccatgatccaaagaaacacataaaaaatcatatatatatatatatatatactaagtgatttttacgtgccaagccacgtagtgttagtttt

SEQ ID NO: 97449 - DNA, 520 bp, Cannabis sativa
  modified_base (470)..(471): a, c, t, g, unknown or other
atttctgcttcaactagaccttacacacataaatgctattagtaggtagtatttctattaaagtttgttagtgaatcggttgattacaacctcttccaatcgattcagttagctagctatcttcctccttttttgtttcatctttgtataaatagaatgatactgtttatgtatcaattaatgaaaaaattcattttcttcttctctctttctttatcttttctctatcttttttttcttcgattcttgattttgctcatcaatagctagaagatttaatatggtagcagagtaatttcttccctcgtgcttaatgttgcttcaacaagagctggcattcttagatctagagacaatgccgacacctatgatacctttggtgtccataatcatcaacaatcaacgccattgccaatgaattgattaagaacacaaaattcaaatgagttcttgtgacagtcagtagtccnntgatccgtaaggggaaataccggataagctgtgcaatcccacatcgcct

SEQ ID NO: 97450 - DNA, 790 bp, Cannabis sativa
  modified_base (593)..(598): a, c, t, g, unknown or other
tgatcgtgtatgttgtagttatttaagacaacctgtaaatttttaaaaaaattcgagtagtttacaatgataaaaataaaatttacatattttattgtattttttaaatgcttgttagtaagtaactgtttaaatcttattttcagcttcgtaaactatttagaattttttaaaatttacaaaaagtcttaaattagctacaacatatataattataaaaaaaaatattagtctagaaaaagttttctaaaaatgctaaaatagactaggagtctataccaaaacgatcatttagtagagtttatagaaatttcttatattatttactaatgacgcgtttactaaactataactagaatcaggataatcaattagagaaatgaatcggtttaaaataaaaaataatcgaaaaataatattttattatgctgtttactgaactgttcagaaagaaaaatagattcatattattttatttacataactaaaaaaggtaatcggaatgctttaatttgataaaattgctattatcagaacaagtaattatttctgtttataaatttttaaagggtatatttgtcttttttattttnnnnnnataaaattaaaattaaaataaactaagttaggaaaagaaaagatatttcctgtaaaaataggggagaatatttgcttttattttctcgctatttggatgtgcctcacattctttttccaaaatttaataaataattgtatgagaattaataccatattattaaactcgatattattaatttagaaggaaata

SEQ ID NO: 97451 - DNA, 2851 bp, Cannabis sativa
gctgccatcacagctacacaaaatctgtgtctgaaattagtgattctaacctgaagccagcttttccatccagcagcagcagccggccacgcctgaaatcccagccaatcgaaaactccttgcatcactctactcgacagcacacattcaaaaaataaatggtcatgattctcggcttccagctcacaaacaggacagtccaaagaatcagggacaattcgaaactgagcaagcttatctcgagttaacaaattgttattgaccacttgccataaaatgaatcggtgtttaggaaggtttagagaactccaaacagctgtgttgtaggggaaagaatgttggactaatttgctattgtaaagccaattagttttgaatttcttacctcttccagccgcttgcacatcctctctagaaaacttgtctcgcacatggcaaagtttacgccaataccaactcgaatcttgtttgagctcatactcccaaaaacttttgttcttcaaatagatgctattaatccatttgacccatagtaagtctctcttagaattaatagcccaaacatacttagccaaaatagcatgattccatctaatcccatctttgaacccaagaccatcataactcttaggaaggcaaactttctcccaggaggccaagtggatcttacttctattgccattccaaccccaaaggaaacctctgcaaatcttctctacttccttagtaacactatgaggtaaaacaaaaatgctcatccagtagtttcgaagcccaagaagcactgagtgaatcagctgcacccttcctgcataagacaggtgtctacttgcccaagtatgcaatctttgcctcattttcttaataatgataccacagtcctctgctttccatttagttggccttaaaggaactcctaagtatcgcaggggatagctcccttccatcaacccaaaatctctcattatactctgctttatatcagaatctacccctccaaaataaatttgagattttgaagtattaatggagagaccactcactgcactaaactcctcaagagtgtccttgagagctttgacagattgttaaggacctttgctaaacaacattaagtcatcagcaaagcatagactcacaattctaagctccttgcacatgggatgatacctgtaattagtacaactagcaactttttgaagacaacgggttagatattccataacaagcacaaacaagagaggggataaagggtcaccttgtctgagccccttttcccctttgaagcttccttggattctcccattcataatgatagagtagctagtagctctaacacaagtcataatccacattacaaacctggaaggcaagtggtaagcattcagtaaatcctctaggaaatcccaacacaccgtattatacgctttgctaatatccaccttgatagcacatcttggagacactcctttcctcttataattcttcaataagtcttgcaccatcattacattatgagctatagaccttccttgaacaaaagccccctgattttgattaactaaattaggaaggacctgagcaaggcgagagcaaagaagctttgagatacatttgtacaacgttgtgcaacaggctattggtctgtagttaactgcctttgaaggattctcaatttttgggataagagtgatcatttttgcatgaagttcaggaggcattctacccgtttggaagaagtcttttatagcatcactgatatcattccccaaatctgcccacaaagctttgaaaaatcctgaaccaaatctatctggaccaggagatttcgaatcaggaatgctgaaaagagctttttttatctcctttttagtaaatggcttcagcagccccacttgatcatcaagactaagcttagccccatgatcaatacaactcgggtcaatttgacttgtagtttggctgcgtcgacccatgatgttcttgaaatgagataaaaaatgattaaccacttcaggaaaattgtccaccaccaaaccatgctcattagtgtaagaagttatcctattctccattctcctttgctttaagatcgaatggaaataggaattgttctcatcccctttgcaaagccaattgattttactcctttgtctcaagaagttgtggtacattttttcctgaagactaaacctggaagcagcttccttttcttgtctttgaatcactatgtccatcgggttagattgagcatcccttctagctgttaagtaaccctctttggcttcttggtaatttcttccaatgtctcctatagtgttcctgttaaagtctttgagcctatgtttaaccctcatgagtttgaaatagagagcctttaaacccatgctccttagaggcatataccaactctccaaaaccacctttttaaaatctggatgttcagtccagaaattaaaaaatttaaaaggtttaataccaatcctctcagaaactactatagagataacacaagagcaatgatcagacattacttcctaatcaaaatgagctttagcatccggcataatatcaacccaatcctcattcacaaaagcatgatcaatcttctaataaattctgctgttatcctcctggttgttggtccaagtgtaatgagatcccgtcttttttagtctcacaacattagcatacattaaccagttattagaatcgactatgtcattcagagtgatactatttccccctattctatcatccaattcaaaaacagcattgaaatcccccaccacaagccacggtttcacagggaacttcaaattcctcatctcctcccaaagacttttcctag

SEQ ID NO: 97452 - DNA, 541 bp, Cannabis sativa
  modified_base (259)..(260): a, c, t, g, unknown or other
  modified_base (508)..(515): a, c, t, g, unknown or other
tcagaaataagattgtcaatcatgaatgattgatgacattcttcatcctgttgaagttgtttcccaatgtgaaaaatgttgacctgaagtgtcatatttccaaatgatagtttcattttaccattacgataattaatcaaagcatttgcagtggcaaagaatggtcttccaaggatgataggaattttcgattccatgttgaccacagattgggtatcaagaacaaggaagtctacggggtaatagaatttctcaattnnaacaagaacatcctcaacgataccccgaggctttttgatagagcggtcagcaagttgtagcacaacaaatgttggcttcatttctccaagaccaagttgcgaatacacagagtaaggcatgagattcaaactcacgctaaggtcaagcaaagcttggttgacttcataagtcctaatttggcatgaaatggtgggaaaatcaggatcattgtattttggcggtgtcttttgtgttgggttttatgccnnnnnnnnaactccatttcaatgtaatctatttt

SEQ ID NO: 97453 - DNA, 686 bp, Cannabis sativa
tgtaatatagacaattcttgtactacaaagtgtggtttctcacacaatacttgtaataaacaatctgtcaataaagattctgtttcttgtacttctgagcattcagttttacatgtttcgagtccctctgatgttaacctttggcattgtaagttgggacatcctgctatgtccacactacaaaaactattaccatctctaccacattgtggtacattaaaacagttcaccttttgtaatgcatgtcagcaagggaaaagtcacagactacccttctcatcatcccaaaaacgtgcctcccaacccttacaactcatccatacagatctttggggcccttctcatgagccctctaaagatggttttagatactacatccattttttggatgattttagtcgttttacttggatctaccccctaacaatgaaatctcaggcttttgaaacatttattcagtttaaaagcatggttgaaagacaatttgggttacctatcaagagtgttattgctgatggtggtggtgagtacaagccatttgctagatttctagctgatcagggcatattgtttacacatccgtgtccccatactcaccaacaaaatggtagagcagaacggaaacatcgacatatcacagaaacagggctcactatgcttgcacaagctaagttggatcttaggta

SEQ ID NO: 97454 - DNA, 1028 bp, Cannabis sativa
taaaaaaaaaatatgtatatttgtttttcttaaatgatgaggatctatatataaatatattgcatttttttactttaatttactaaaataatataatgactttaataataaattagttaaataattaacttggagatgctatgtatatgattgcaatctatcaaaaaaaatggaaaaatgagagagatattccattaaaaataactaacaaaagtcaaattaaattaaaaccctttgccaaaatgtctcaactctacgatgtttatcaaaaatatttcttacatattattgtaaacggcttggtaagctacttttgatgattttactctttgagctatgtaatggattttgtccaattaacctattaatgaatatttttgttttaaacaaaaaaaaaaaaaaaaatgtctctactctataaagtatgttaatttttcttgttttgacaaactctaaagacatgttataattttttttcaatctacgaaaattaataaattttctaataatgtgattgtctaacataaccacaacatgttatatgaattattattaagtgttaggtctagtatattttaatttaaaattttattataaaaattgttagtcataagacgctactcataatacctaataattaataatgtttttttttttaagtgaaaagcactactcatttcattgattgcctaaaattttgctcttctaatatatatatacatatagaaacctcataagccttcctcaccacactccaaattaaccaatctctctcccaacacatatatactccatatatattgtattctaaagcaattttatttttcatttttgttctctgatttttctttttaattatacttattataagtatatattaatgggtccaaaaaaggaaggatcatcaaaaaaagtaatgaacagaggagcatggacagctgaggaagataaaatactttcacaatatatcaaacttcatggtccaaggaggtggaagactctttctatccaatcaggttttctttctt

SEQ ID NO: 97455 - DNA, 662 bp, Cannabis sativa
ttgatttggaatcaaaatacattatatatccactcactaaatgacaaatacaaacattttatatttcaaaatactaattagaatcaaattacattagttattacagctaactgacatgtctgaacagctcatataaaaattaaatattaaaaattttaaatcaaaaatttattgacaataatgaagaaaagtgatccttaccccactactatacaaagaataatactatcaaattatatatgaattggaatctattaattatatgtcaattaattaattagttaatcaaattccaaaaccaaaatttaatcacttaatcagatatgatctagaccccataaaaggtttatctaccaaaaaatattgaagttaattaagagctgatcatgtcatgtgaactaccaaaggaaagaagaaatataatcaatatatatatacaacaaaccctagctagctactacccaaagaaaaattaaacaaaaaaactaaataataattttaaaaaaattataataatatgtaatattatcattataaaccaaattttgaaaggaagaaaaaacccctttaatcattaatcatatattattattaatttattatttaacatcataagagtatctcacctttctctttgcagcctctcaccacacatataaata

SEQ ID NO: 97456 - DNA, 623 bp, Cannabis sativa
aaattcccattcgaagagctaatgcttcagccaactccaccgaaaaagcacctgattaatactgagtttttgcagcaacaacctcaccagtatgagtccttaaaaccactcccagaccgattcttgcctcagtacaaagcacacttgcatcacaattaatgcaaaagctctccaaaggggaggttcccaaccaatatgcttagttgaaggggtgatcttgcatctgtctatagacggatcatcgtgcatcatgtagtctatttccatttgagcccattttgtccaagactcgttcgaaaggacatggtggttaagctgtttcttattccttcggttccacaatagccaagacataataatgaaaaaaacaaattcctccttagaaacctgctgtttaatatgaatgagaatatcaataatggtacatttgctctatttcattatcctccatattgagtgattcttccaaatgtttttagaagagggacaaaaccataagtaatgttcaatggtttcttcctttttcccacaccagcagcaactggaattaatgttcattccccgatgcttcaagacagtgttcacagggagccagccattgcacagccgccaagtgaaatttc

SEQ ID NO: 97457 - DNA, 567 bp, Cannabis sativa
ttttattccaatattatgggagtcgtggcttcctagtgatggaaatgatttgatcgaattaacccatccagctttagtcaacgcatttgtttcgaacctgttatcaatgtatggtttgtgttgggacagggagctagttgctgacttgttcactgcaagagatcaacgtctgatacttagcattccccttcaaatttcatctactacggaccacttgttctggtgcaaagaaaattctagtttatactctgtgaagagtgcttatttgctgctccaaaaacagaaaggtagatggtttgatgatgaggtttctactttttggaacaaactttggagtcagcaattacctcctaaagtttttaatttggtttggcgtgctggtttgaattgtctgcccacgctaactcagttgcgatctaagcgtgttgatgtctaggttctttgccctgttcgttgtgagcatgaggagaccatcttacactgcttggttacttgtagagtgatcaaacaattctggaatcgagttgggattggcataattattgcagtaggtgcttcttcggctgg

SEQ ID NO: 97458 - DNA, 1474 bp, Cannabis sativa
tctcagtagtcctatgcgaccataggacctttaagagtagttcaggctaatttccttttgcttccttaaggcgcttctttagcgtgtccttgagggttttgttgacaacttctacctacccatttgcttaaggatgggccacaacagagacgcttttgatgatgtcatgtctattgcagaaatcagtgaacatgtcactgttaaactgcttgccgttgtctaacacaatcttttggggaagcccaaatcggcatatgatgttcttaataacaaagtcaaggaccttttggaggtgattgttgccaggggttcagcttctatccatttggtgaagtagtcaactacgtcaatagcaaactgtacccctcattttccctttgggagctaaccaattatgtctatcccccacactgggaagggccaaggagactgcatcatcgtgagctcattgggtggagctcttggtattttcaaaaatatctggcacttgtcacattttttgacatagtccatcgagtcttcaatcattgttggccaaaagtacccctgtccgagtatcttcttggataggctttgccccccagcatgattgccgcagaaggcttcatgtacttctatcattagtcgttcaactttggctttggtgacacacctcaagagaggcatggaaaagctccatctgtacattatcccatctaggatcaaatacctagtagcttttcttctcaattttcttgctttatttttgtcttctggcaaggctccggtctagaggtaagctgcaataggcgtcatccatgttggattgtcatccaacatgttgacttcttttgacataacaatgctaggttcctttaggaactatatggacactaagtttgctttgtcagcaatggtgttgcttgctagacgggcaagtgcatctattgtggcgttctattctctggggatctgcctgatcgtgtagcctttgagctgacttagcaagtctttgaatttgctcaagtaagccaccatcttcttacctcgagttgtgtattgacccaggacttgattcataactagttcagaatcgctaaatatgtccaggtggttagcctgtaatttatgtgccagcttgagggcgactatcaaggcttcatattaaactttattgttcgaggctttgaagccaaatttgattgctccgtgcaattgctacccccaggtgttgtaagggcaatgcctgcactggataattggtcaatgcaacttccgtcaacatggagtttccatgttagttctttgggattttattgttgctcttgctctcgcttcttctttggaatttgcttttctcccaagtcttgagggatctcaagagttgagttggtgcactcagccacaaagtcttcaagggcttgaccctttatggttgttcttggttggtatgtgatctcaaactggcaagctcaatggcacatttgagtagtca

SEQ ID NO: 97459 - DNA, 714 bp, Cannabis sativa
  modified_base (654)..(676): a, c, t, g, unknown or other
atacaccggcctctaattcctaactctgaaaagaattaaaaaaaatactaataactgccaaaaaaaaaaatagtccaataagaagaagtattataaatatccttttttgggagattttggtgtcaaaattatcataaaaaaaataataataaaaagacttgatgatagactttgtttgtttggtgacttctattgatgaagttaaaaagtgttctctttcattagatgattagcaattgggtttggaaggaatacaattttattattaattctcctagtcagatacaagtttcagcgagaagataaattatcgcagtgcaagttgtaagatatatctattaacgtaattgtgcattgtaaatttgtaatttatctttatttttttatttattattaaacattttatttagagttttttttttattgggattttgcgacatggctccttttttttttcttcaattgtcaaatttgcaaggttgttgtggtatgaattataattcatggtacatgttttgctgagtgtaaaatgtgaaagatttgtgcataatttttttagacattgccttattagtaataattttttcaataaatatctagaaaattattcaattataatttcagttatatagaacgttctatatgttccacgannnnnnnnnnnnnnnnnnnnnnnattgttataatcccaataatcactgatcctctatagat

SEQ ID NO: 97460 - DNA, 2869 bp, Cannabis sativa
  modified_base (2667)..(2685): a, c, t, g, unknown or other
cttagaaaagtgttaaacaaacttaaatcacatcatttactatatatactaaatgtgtctcatatggggcatctttgcaagcctcgtggttaaaagaatttgattttagagatacgactagttgattttatttcctctcctatactaattcattatgataataataatgttttcttttcaaagaataataagattagtagttcatccaaacatatggaaataaagtatctcactattagagacttgatcaacaaaggggacattgtgatagaatattacaagatcaagtcaatgttagcagatcctcaaaccaaagggttaagtgccgtgttgtttaataaacatgttgttgatataggtattttgtaatcttttgtttctttgagatagtgggagtttatagctctattaataaagatttacatttatatatatttttcttgttgatgttaagaactacttggtgggccaataattttttattattggatgtttatgctttcaattatgttttattttattctcaagaatgattaaattaaagcatgtagttcatatcttgttgtgatgattgcttttaagtttaattgcttaacgacaatgatattttagtggcttaattttttaagcatgttatttagacactgacttatttattaagtagtgtacgattaatttcactgacttatttattaagcatcacattatcagtgaaattgagaactgataaggaaattatgttatttaaattgatcacatgttgacataatgccttagcacactactagacttattgaccatgtcgatttattactttgatatatttgtgattaagaatgtctttaatttgttgatttaaaaataatatgattgtcatagctcaatatcaaagattaaattggaccaatatgttgagatgctatcaaagaactatcatttcttaaagtggtcacaaatatttttctattattcaacacatgagtcattttataataaaactattttgatatataatatatatgtattaaaattaatgtagtccaagtgggagaatgttagacttttatgtgggcttacattaacttttattgattttaataaaatatgggttcattagatagttctttgcagtgttagcccatattgttagtgttcaatatttaatgagcttaccatttgtgtgggtaaagtctagttgaagcagaagtttaagattttctagttaactgaggccttgatgagtaggcccagtccaattagagttatgtagctaaaactcttctctaactttataaatacattttctcatcacaattgtatattttcaataatcagataaacaaaactgcttctgatttagagacctaaggagaaagacttagtttatagtattgcactattaaattgaggtaattgttatggatcaatcaggtacgcatacctgattattatatattattatgatgttctagattatatataaattttgtatcttgagttattttgattttttaacaaagtttattatgtcgaaaatagaactcctgatttactaagtgtgttcaaaatatctcgaatctttttttgatcttgtaaactcttcgaaatttttataagattgtaactataacgaatattgtcatgaaaaaaatatttcgacatgtgttttcaaagatagatgttttaattaggagcttattatttgcaccaattcatatataactgtatatatctcttacagtttagtaacccatcataatcttaatttaataggattatgtaatttttaaaaaattaattaaaaaatggagacaattattaaaacccgtgattaaataacttataaaagaggaagtgggaaggaagaagtgcaccccttatagtcgggtctttaaataataacttcaacaagaactctaaataatattcataaaatagtaatgagagcatatggattcgattaattaattcactcattatcatatctagataattctattataaaattagtaatgagagcatatggattggattaattaatgcactcattatcatatctagataattctattataaaattagtaatgagagcatatggattggattaattaatgcactcattatcatatctacataattctattatcaaattagtaataagagcatatttaaatttaatttaatattacctagcaaagcattactcattatacgcttggtgtgtgtgaatcaaattggaagaaatatttaatatttattcttaccttcactaggttatatttatttgtagattaatttaattaaaatatgacagaaatagaaagtaaactcaagctatatttcatatatatataataaagaaagactatgtggtatactagtggaacaatcaaagactaaattaaaatacatttgttttacattaataagaatttaattaaagcctgatagaacgtaaacacaatttatttaatatatatataaagaaagagtagactttttttctttatcgaacaaagaaagactaaacttggtcaatattatgtaaataaagagtaaatttatttattccatatatatatttaattaaaatatagtataaatgtaaaatatatttttaaatataataataacaacaacaacaacaatataataataataataatnnnnnnnnnnnnnnnnnnnataataataataataatagtacttcatgtcagaatataaattaataaaaaaaagaacataccactaagtcattgatcgcaaattaatgttacggattaaacctgatcaagaatcaacgtaacaaacaattcatacaagtcattaatacaataataataatataaattgatttgcaaagaataag

SEQ ID NO: 97461 - DNA, 807 bp, Cannabis sativa
ttaatattaacattaaaatataaaaaaaataggtaaaaattaaatattactctttatttaagtttaatattcaataaacataccatctttacaatgtaatacaattaaaagttttaaataattagaacaacaacatttctaaataataaaataatataaaatatcataaaaataaatacataaaacaaccaattcttataaatttaacacaaaaaaaattcaataaaaatataattaatatatattatattttttattaaataaataaatataaataattttttaatatatataaatataattggattggatcggcttttaaatggattttgagattgacatctaataacgattcaatctaatgaaaatccaacttttagcattcaatctaattcaattgtaattagaaatctaatttttttgtaattggattggatttgatcggtttaatttaattggattggattgaatattgctcaccattatttaaaagaaagaaaaagagagagagaaaatgagtaccaaaataacaagagtttttgtgttttgatacaatgtggatagtcaggtacaatgtgatcctctagaaaacaaacttagctaacgagtgagcgatatggttggccatttaatttaatttaatatttttcttctaatttgatccaattcaattagtaattagatttgaaaaattatcatttgatccaatacaattcaatttaattatacaaataatttttaatattgacttaagaacaagaagaaaattataaagaaaatgttggcggtaaaatctttcaaactact

SEQ ID NO: 97462 - DNA, 4547 bp, Cannabis sativa
  modified_base (655)..(664): a, c, t, g, unknown or other
aattaataaataatataaataattttatttgataattaattataattattaaacaaatagttttgacatttatagtattaaaattagaaaatatggcatttgtgaaataacagaaaaatagttgaaaaatggcaaaaatataattagtggggcccatctatgtggcgagccactaagtcctatttttggctattattttatcatatttttattttatataaatcagtcttaaccctaagtgaaatagtataaaaagaataagatggtctcattatccaataacctaatataacctagtttacattctgtcagacacctagttttgagacttccttcttcctttttcttcttctagttttgaaatctcatatagtgttcttcataaatttttgagccattactgagtgagtgcatgcccacccatagcaagtctagtactcaatcttagtgtgtaagactgtgaagaatccaaacacctgaaggaaaatcgagttcatatcttgataatactctgctacagaaaggaaaaagggttagagatctgagtgggatgagtcattatattccgctacaatcaatgtaaggttacttaaactttatatgtatttaaatttcattgttttagaaatttatatttaggatgttaataaacatnnnnnnnnnnaaatctagatcttggtaaaaatatagtccaacatccattccttatcctattttgaaatcatctctctcctcttcataaagttcgaaccaatagtgaaagtgtacatgaccacccattgcaagtcaagtactcaatcatagtgtataagactgtgaagaatcctacacttgaaggagaattgagctcagatcttgataatactctgcgacaaaaagaaagaagggttagagatctgagtggaaggagacatatcattccgctgcaatcaatgtaaggttacttgaactttatacgtgtttatttacactgttttaaagaatttatatttagggcgttaataaatatactgtcaataaatcaagatcctgataaaatatattccaacatatggcatcaattttttggaaataaccgacgccatagagtgtgcccctatgtcgtcgattatttctaaataaccgacaccataaggggtttataaccatccctagctcttcgtcttcttcatttgatcagccaaccgaaactagagaaattccaacccatcttggccaaccacctcgttgatcacccccatttcaccatactcctaaaaaataaggaaaaattgtaattgtatgaaaaataaaaattgaaaaatttacacaatatacctaaaaatggaccttttttacggtaaaaaattccataaaattttaaaaaaaaatatatgtagattcctataaaatgtaaaatttttgacatttttatatatttatgaaataattcaataataaataaggtattttagctcgcattcaaattcttatattcgctcataaccaagtcatatttgggcacgtatagtatgacacggaaaaatctaggacatgggtcgggctaggccttactctcaaaatatggacatggcacaacatgattcatattttataagggtatttacaaaaatatggagagaaaaaaaaaaagaagattttgatatatatatatagcatgcaaacataattgcataaaatatgacattaaaaaaatgacttaaaaattcatatatatatatacataaattttacttgtataaaatcaaaatcagttttatgatgaaaaaactagtttcataatgaagacatcagtttcttgatgaaaaaaattaaaaaaaactaatttcttgatgaagaaactagtttcttgataaaagatttttggtaagtttcgctctgaccgatcattgccggatgggtggatcgtcagtcgtcgtttgcagattgtggagttggtgaaggaaggtggataggtggagctgttgaggggtggtggaggtagggtttgacagaggagaagaaatgaaattttttattttctaaaattgattaatctaaagattaaatataagtttcaactttcaaaaattacatttacatatacatagaaaataccataaaatagttcaaaaacaaaaaaaaaaaaataccataaaaaatggttaagtttaaagctcttgtatttaagtgaaaaaaaaactcatattgagtgtaaatttaactattttatacatgtgctagacctttttttttttgaaaaaagcatttataaatgaaaataaaattagacatcatggtcgttacaaaaattattgtcgggtatagaggatagctccaccataccagttaaattatttacaaacgctcacatagtcacgttataggccgtgaaattacaatatgtaaaaataaaagaaaaattacaacataacaatttaatagataagtgtttacaatgatgtacatagttatcaatgttaaaggaattcaatttattctgttattttctgttaagttagtttctcaactgttttggcttcggttgttaggttagcttttcagttgtaacagattcctattttgatgagtatatattgtactgaatcttccctaacatggtaggttgttaggttagcttttcaatctttatcttcatcttttctctctatttctctctgttctttctttgttgcttatgttcatcgactgaacatcaatggctaggagattcaactctcctaacatggtatcagagcagtggccacctctcatggcaaatgtggctagctcaggtcctggtacaactactaatggaggaacgacgatcaacaatggtggaaatcagatcaatacttagaatggaagtcgaaacagagattaagatgagaactcaccagtttattttaatcgttcgatttctatcaaacttaatgatcacaactttcttctatgaaaacaacaggtttttgctgctattcgtggcaatcggttgctgaaattctttcaaaatgcagctcctcctcctcaatttctcaacgacactgatcaaactaatggtgtgttcaatcctgcgtttatcgaatgggatgttcaagatcaactcctcgtgtcatggcttttgtcctccatgacagaaagtttactaaccagaatggtgggatgcaacactgctaggaaaatctagagctctcgaaaagtattttactcttcgtgtttcatcaaaaattctggaattccgcaccagacttcagaatcttcgtaaagaatctatgaccttgaatgagtacttactgaaagtaaagcaaatggttgatctgctagcaagtgttggagaaactctcaatgatcgtgatcacatttctgcaattttcaaaggtcttcccactaaatatgacacgttcataatttctaccaatacaagaattgaaggctacactgtagctgaaattgaagcattgttgctagcatcagagtctagaattgagaaaactaatcaagaacatgagatcagtgtgaatcttgtcaagactgaagcagataatgcctttgatcaagatctgaactttgaagctaacattgctcagttcaatcacaacatgcgatatcccatgccaaatcgcaacgacttcaacaattccagaggaggttacactggaaacaataatcgtgatgctggaactcaatcacatcaaccaaatcagaacagtcgtggtgctcctttcactggaagagggggaagatttcctgctccaccatcaagaatccaatgtcagctgtgtcatcgtcttggccacattgtccttgactgctactataggtttgacaaatgctttacaggtgtgggatccaactccacacaacaaaaccaacctcaagccaatctttctcagaacacagtttcacaagacacaaattggtaccccgactttggtgcaacaaatcactatacacctaatgttcagaaccaaatgagtcgatccaactaccatggccctgacaatctttatgttggagatggaacaggtttgtccattaaacacactagtcattcttgttttttgtccaattctaatttgattcttgtgttaaacaatcttcttcatgttccaaaaatcacaaaaaaccttctcagtgtgtctaaatttggtagagataacaatgtatactttgagttttaccttgatttctgtcatgtcatggaccaggtgacacacaaaattctcctgactggtgctcacaagaatggcatgtattcttttgatgagtccctggttcagcttcaaccttcccctttgttgtctagtgaaaattccagttcagaaagtgaagccaaaaccaagtcagatcctgtccaagccaatgtttccattactgccaacatagaatgtagtcataccaataaacatctgtttcaaatgtggcacaacaggctaggccaccctagtgagaaaattatcaaaactggtcataactcttgtaacatcaatgttagtaataaaattcctttttctccctgtaatgcttgttgtctaggaaaaattcataagtttcctttccctaaagca

SEQ ID NO: 97463 - DNA, 550 bp, Cannabis sativa
aataaatcttgtaaactcataagataagagttgatgatttgatgcacaagtctaggaagcaatgaattttgagtcctaatcattttatgcccactaaatcatattcaatctcactaaacatctttatgcttgaaaacaacaatttttttttttttaccagttccatttgattagcatattattaagttttaaatattttaatgtatttcaatttttgtattttacttttaggaccaatggcccaatggcctttcttctctctcaacggccgctgccatggcagatataatttgggctgggcctaagtgagagcccattttctgctatttaaattgaggcccaattgtagggtgtatgtgttggaccatttttagcaacaaggtaactaacataaacttttttacaacttaactataaaatagtttgacccgattaattacataaatacctttaacaataacggattctttcatatgttttgttttgttttctttgtttttcggtgtaacaattatatactaattaatttactttattacaacattttttt

SEQ ID NO: 97464 - DNA, 920 bp, Cannabis sativa
ttcagtgaacatcctttacagggaaacactgaagaagatggggctcaaaaaggccaaattaaggccttgcatggtaaatctatgcgaattcactggcgacagtatcgccatgtcaaggtataattgagctcgccttaaccttgggtgaggcacccctatccgccacaattatgcaagacattctggttgtcaacctgccatcagcttacaatatattattgggtcgtccaacattgatcggactaggggcagttagttcgatcaagcatctatccttgaagtttcaaacatcagagggtgtgggagtggtgtgaggaaatctgatgctagctcgcgattgttatcgcatagagctacaacacagaaaatccggtcacaagttaatggcagtcttggtagaggaaagcgaaaagaaggatgaagatcttgatcctcagattcaagatgaaagaaacttattgaaaccaattgaagaattggaagaagttgttctagacccaggaaatcccacaaaatgtgtttacattgggaagagcctggacgagtagttgaaatagcagctaataagtttcttaagggcgaaccaggatcagtttgcctggaaccatggagatatgatagggattgaccctaatattatctgccatcatttaaatgtcgatccaaactacccagcaaagaggcaaaaaaggagaccctggattctgagagacaaggagcactcaaacaagaagtggataagttattagtcaataactttatacgtgaggtgttttccccctcatggatagccaatcctgttctcatcccaaaacctaacggaacttggagaacttgtattgatttctctgatctaaataaggcatgctcaaaggattgttttccactacccaggattgaccagttggtggatgcagctg

SEQ ID NO: 97465 - DNA, 722 bp, Cannabis sativa
  modified_base (434)..(434): a, c, t, g, unknown or other
ggaacaactgctcaacaaattacaggcccctaaatcacattgatcataacatggataagtgacacgctaaaccacaaccggggacttaggttttaaaccaaaaacctacctgttgtaagttaacatggtagtaccctaaactaacagggagttaaccagccaaggttctaaaactaacacgaatcgacaacacaaaatttttggggaaccagcagcaaaatcaggttaactggttttacagggcctgttaaactggttaaccaatttacaccataaaatccccaaaattccaaaacctaaccaaatcgattccaattcttaccaaaccttctagacctgcatattatacccaatagacatattccaagcaataaaataattatacaagctcagaatcaaaaatcaccattaaagagccaagcttgagttctaanactcaaagcttgctcaaacaacaccacaactcttaaatcatcttcaatttaacataattaacctcaaattaacttcagaacacaaaatcatatagccctaaaagctacagaacactaccatataaaatcatgcaaaacttaaacttaaagcttaagaaattactaaaagaaaggctaaagtatcttacttagagttgaatcacaaaaagcttgctatactctactgaattgcagctgaaaaatccccaaatgttgctaaacctccaagggtgagagagagagagagag

SEQ ID NO: 97466 - DNA, 531 bp, Cannabis sativa
  modified_base (402)..(409): a, c, t, g, unknown or other
agtatacgtgcctcgcacgtaattttttactagtatatatatatatgcctaaaataaagtcataccataccaatacgaaaaaggagactatcctacaccaaatataattctttttgtaaataattaattaaaatgaataaaatattgacaacttgtgattaaatatatagtggttaattaagagtacaaaaagttgaataatttagtcacaaaataattgcccttatctaaacagtactgaattttcttaaaatgttataataatattatttcccaattcttgaaacattaaaatatatatgtatatttattcaaaaatatttctatctatataaagtgtacctatataattgaaattcttggtttatgagaaattcatgggtaacttttaatttttatttnnnnnnnnaataaaatattatttatatataaattaaaaaaatctttttttaaactaaaaaattaaacaatctttttttaaattaacaatcttttaaactgtcgactatatattagaaagtagaaactaga

SEQ ID NO: 97467 - DNA, 778 bp, Cannabis sativa
aaatatattccccaaatggcaaaaggataaggcgaggttatcattcaaagctctgttggaggtatttgaggaatatgtgagaatcgctagcattttccacacttcttcatgaactcatgagtttctttattaatgaatgacaaataatatccttgtcaaattattttattggataaactttgccttccagcatgatcctcacagaaatattcatgtatttctttaatgatgctttaggtttcttctggtgttatacccgaaattcggctgccatctcaggggaggaaacgtgtcaagataaagggaatatggattgatgcaatcactttttatggaaaaactcattaatttcgtaagtatcggagtatatttgtgacctgatgactgtaaggtcttaggcgaggaatcaatatacaatctgacgcttactatattagagacaaaccatatatcactgaatgtgaatagcgaggcatcaaggacagtacacataggaagacgaaagcgataaatatcaattgcaaaagcccttagtgtataatgtacaaactaagtgtaacagtcggatcagctcgagaccaagtaagcgaggtgcccgtctcgctttgggaagactttctataacttcatccagtcacgtcagcgaggcttacaaccctcgcgagccataatctatcattcaaatgagcttcaaaaaactctttgtaaataggaaccgcgatcgtcacaagacatgcatcgtcgacctcaaaatgaaaaatggccccagctcgctatt

SEQ ID NO: 97468 - DNA, 746 bp, Cannabis sativa
gttttatggtattaaatcaggtacgcatcgtaagaactcgtatataatagattatcgttgtaccatagccctatgaatctccagaagtataaaaattaaatcaaaaacttaaattacaataaaataatatatatacctcttcatgactatcaaggtatcctcaaaacttctcgtaagttgtatctttttagttgattagaaactcacactgtagtcttccaaatcgatctatcacatacaaggaatagtgtgggctattaggataaagtgtataatttgttcttgattaattctcaatacatgaacaagaactatttgagagagaaaaataattttccttttctcctttgtatttcgaaaaaagcagtgaaaattatctcatgatttctcaaatctagcttttatttatagtaattaattctacattaattaaatcatatttaattattgtaaaaaatatctataactgagtttggttactgatatttcagatgagagaatctctcaaccaactttgagggaatacctccaccaacttgaaatatctttaaccacttttcaaatttaaatatttatctgattgaattaattaaataattaatttctccatctattgttttattaattaaataattaagatggaaaatagagttcttagtgttcaagtaataaagtggctataaatgaagaagtatagctagggttgtatttgttgggttttgtgccctagatcggaagagcggttc

SEQ ID NO: 97469 - DNA, 639 bp, Cannabis sativa
tatatatagatactgcaattgttgagcaaagcctttccgtcgtattttcgagatttgtatgttacgagtatgcgaaaattcaatttggtaacgcgtttggtgcaactttacaaaccatatgttctattcaagggcatgtaagtatatatatacaacgattcaatttaataattaatttcacaaaaagcacaattaattaattatattgttatatataaatgcagctttgatgacactaactcagagaggctccgaggaaaagcaagggagatgagcagttctaatgatgaagtggatttgttcaacttcgatccaaagtgcattgattggaaagactacctcatcaatattcacattcctggagtcaagaagttcgtcatcaaaaaataaacatttatatatatatatatatatatatgtattcttttcttttttcgtgtgtgaccaaaaatactatattgatcattatttcttccttttatgtcgcattatatgtgatatatatatatcaacatataattatattctatactactatagctagagtgtgctcttcgctgatcaatcaattcatcaaaagatatttacatatatatacattacattctgttattaaatgttgaatgttattatatatta

SEQ ID NO: 97470 - DNA, 1079 bp, Cannabis sativa
ctagaaaattgggaaaattttacaaaaaaaaagggaagatttttacatttttactatactaagtttataaaaatattgtgtttgaattttaaaattacaaaaatactgtgtttaaattttaaaattacaaaaatattgtgtttcaataaaataaaaaaaaataacttaaaacaaccttaaaataacttaacaaaaaaatataaaaataactataaaataacaaaaaaaataaatataaattaacagaaaaataacaaaatattatctatctacaatttgcaaacaacattaacttttacagtttacacactagattatatcgaaaaagagaacaagttgtctttactctatccctaccctatcctatcctatccaaagtgagttttattgattattcttttatttctaatttcgaggtgtgaccataatgcataagtaaaaacattgtattcttcttcttctatagagcccatgcgtgacgaaccttccctctatatgcccatgctggaataattattttctatttatctacaatattttctttttatgttttagatcctcagctagttttgttctcattcctaactcattttaacaatgaaatctttattgacattttttcctatgggtgtttgcagaaaatgtagatttttgttaatttattggatcacattagatatgtaatcacaaccacaaaccgcactatatatactacatcctaaaattatagtgcaatgaggccatatactagtacatcctattgggtttactcagaaaatttgaatgaggctattttcaaattaatataatatatatcttttaattggtattacttatctatgggtagtattaagaaaatttgaatttttacgttaaattttaaaatctaattagaaaaatctctcatgttttagacaccattccaacaacaagcacttcagctatgaatgattctcttacacagccattcacaagtagtgaagtgttcaatgctcttaaaacgattaatccagataagagcccagggagtgatagcatgtctgctatgttctattaccaatattggcctattgttggag

SEQ ID NO: 97471 - DNA, 522 bp, Cannabis sativa
  modified_base (343)..(356): a, c, t, g, unknown or other
  modified_base (470)..(470): a, c, t, g, unknown or other
tcagaatatacttaaattaatttaataaattattatttaatttcaaaatattattataaaataaatttacatataatctaatacattctaaatattaagtattgttatacactcattgatttatcacctttagatttattatctatggctgtaaaaacatccctatcataggaacaaacctcatgtacctaccatagacatatcctataattaattatcaaataaaattatcatttatgtaatttattaattataccatataaagtctcttaattagcaaattgacctcaaaacctcatttctttacaattaagcccgcccttagtgaaaattcataaataannnnnnnnnnnnnnttagaattatgattgattaattaaaatcaattgactgagtctgcaggcagtattatctcagctagtgatgggatcatgggcctatataaccaagcttttaataagtagatctanaatttaccaagtaaattctcaacttattaattccgccttgtgccactataga

SEQ ID NO: 97472 - DNA, 912 bp, Cannabis sativa
caataaaaatgtaaccattaaaacctcttccatatatatatatattatatattattattattatcttaacaaatatattagatgtgtttaaatattatttttttttcaaaaaaatagacatacttccttcattttaatttttaatcaaaagtttggacaggttgagaagaagtacctattatatatggataagattgagtaaagtagatgtttggataagctgcctaaccctctttacctaactagaatatggcggcaaatttattataagattttttccacgcgatatacatcgaaacaaaatatttattgcatgagaaatgctaaaaggcatgttatgtactttatatatgagaaatgctaaaaggcaccaatggtgcttagcatcctcctatgtgttaatatcgctattagtccaactaaatatcgggtcccacatagtttaatataatagcttttaggaagtatcgctagtcaatcgcaacgtgacatgtcgaaaagatgctagacaccactcgtacctaatagcaatactctttatatatatatacagggccggtcctgaaacaaagtgggccataggggaaaaaaaaatttgggcccttatgttagaaaaaatgtggtatttttcaaaatcggtaaaaaaaatgtataattttaaaagagaaaaaaaaaatttgggtccctgggctgggtgggccctaggcacaggcctagcccgcctctgcccagggccgggcctgtatatatataactataaatatatatatatatatataaactaggaactccacctaactttctcgaattcatatatgtattaattaaagaataatgattgagacacaataaaattatacagattttttatatataatattgttcattatgtgtaataatatgattccacct

SEQ ID NO: 97473 - DNA, 827 bp, Cannabis sativa
agaaaaattattgggtattgggcttttttttaaaaaaaaaagatcttcttaatttagtgatttacatttttctttttgaaagattagtgatttacatttagatatttgtaacaaattcatcaaacaataattagtatacttgctccttgaatttcaacactatctatttttgtcccataaaatatataacttattaaaaattctccttaaaatataataattacataattatgcccactaggttcttttttttttaccattaaaaaattatatttttactccctgaattttgaccaatacaaaaattttgtccctttaattaaaaaaattaattttaaaaacagtaatattctattaattctgaaaaaattaataaaaaattactaaaaaactcgataaaaatattaaattaattaaaaaaatactaagtttacttaaaaaaaacctaaattattcctaaaaagatattttaaaattttattttatttataaacacgtatcttaaaaaataaaactaaaattattaaaaatccaaaaaataatttaaacaaactataattttttgaagaaaaaatcaaacttatttataaatgcgtatcttaaaaaaataaagaaaaataattaaaaatttaatattttgaaaataaaataaaaattaaactaaaaaaatattatgtatacttaaacaaatctagatttttttgaaaaaaaaaatagactcaaatttgcacacataaaatttagttttttaaaaaaattgaattttttaatatcaaaatgaattttttaataaaaaaataattttataaatcgcttaattagtttaa

SEQ ID NO: 97474 - DNA, 696 bp, Cannabis sativa
ccctgtattttacaaaagttactagttggaccatctgttttgttaaatgataaaatagaccctatatttttttaaaatggtaaaaataggacactgagctaaatttttaataatttcaaattttaatataatcaactttaagacaatttataacatgaatagatacataacatataagtagttttgttatagtatctctagattagattattattaaattttattttgacaaaaatcagtttagggttctatttgtataattttagaaaatacaatgtccattttatcatttaacaaaatagagggtcaaattggtaactttcacaaaatacagggtccaaaatggtatttaccctagaaattatatgtaaaagttaaaggttttctttttttaaaaggcataattaaataatattaataagtataaaatttttattttgtttacaatcttgaaaaaatttcttttttctttttttgtcttttttaaatttttattgttagagcatctctaatggtacattattttactaaattggtgtagaatctttacactatttcactctaatggcataccaaattggtgtacatcgaattctacaccattaatggtgttggattttgaatctacaccaatttggtgttagaatttttttttttttttttacattctatcccttattttaatttatttttaaa

SEQ ID NO: 97475 - DNA, 549 bp, Cannabis sativa
tatccaatttcttataatcattcactttttctgtgtttgtttttcctctgttcaagttcaaatacccatacgagttttaagggagaaaaccagattgcaaaatggctgatgctaagagggctttgatggaaggtggtgggaatttgaaccagaagttttctgggcgtctgattccaaagaggggtcaagtcacgatgactgttgtggcggttctgcttcattctttctcttcggtattctctctcaatggtcgctgtatcgatggtcctcacttagctagagcctagctaagcttccaaatccaacgttggtaacatattcagttaccaaagtcaggggtggagagagagagagactgaatctcaaaaagttgcaagctgtttttgatgttattgtaactgggactgggaggctgtaaaatttttgtagttttttttctatatgttagatgagttttgatccttctaaagtttcatctttttcaaattgttagtgatgataatcttactgagataatcttcacattccactgcttcacagtcttagcca

SEQ ID NO: 97476 - DNA, 590 bp, Cannabis sativa
cttggcagacgacctctctaggtctagctaactcaagatattctcctaagtccatgtggggctagccaatagtaggcttgcaaattcctggtcctatcaatcctgcataatactagggatgagatttggttattgttcctaggggctgttccccaagggtccttccttcagtgggaggcgcctgtggaaggtcctcccttggaggtaggggccgattgttcagatccacagtgatgtttatagcatcctggccagctgtagtggccagatttgtggtgcctattgagatggcaggattgatgacatctgcatgcattagtgtagtgaggatcactctcagctaagtttggatgaaaaaggaaatctctaactactactttaaagtatacttttttctttcaacttagcttacagtaatggaattgtatttaatttgatgagaaaaagcgttgaacaaagttttttttggtacttcatttaagaaacattgacattactcccagtaatcgagtttcttaagacattgtgtactgtacaagtactaaatagtcaagcgataacaggtaaagtaaaataaaaagaaagtatcg

SEQ ID NO: 97477 - DNA, 3506 bp, Cannabis sativa
tcttgagaccaaatggcatgaccttataacaatatagacccatatctgttcggaaacttgtatgttcttggtctggtggatgcatcttgatttgattgtacaacaaataggcattcatgaaacttaatatttcgtgtcctgctgttgcgttcactagttgatttattcttagaagtggaaagcagtcttttgagcatgccttgttgaggtcggtgaagtcaatacatactcaccatttttcgttcggcttgggtactagtacgtaattagcaacccaggccgggtaaaaagcttcaattatgaaattattgttgcgcagcttttctacctcttctttcagtgctagtgcttgttctttgtctaacaatcttcttttttattgaacaggccgaaaattaggatcaatattcaggacatgtgaaattatagaaggatcgattccgaccatgtcctcatgtgaccatgcaaaaatgtctaggtttgctctcaaaaattttatcaatgctgattttactttgagcagcaaaccttttccaattttgagtttcatggtcggaacatttaggtcgattccgatttcttttagttcttccactagaccaacattggtatttggttccctaagctggggatccacatcttcatccccgccttgggcagttccctatttggcaatgtcttttcccttgtccgacctctaactggtggatacttcctttttagccttggttagggcaaggttgtaacattctcgtgcaacttgttgatttcctctcaggggcatttatgtctgattaaccggaattcatctagaaatacattgtataatgcaaaaataatgaaagatgtgttatggtcgacaatccaggtactaagtctaattttaaatgttgtttataatttatttttgttactcataaataaaaactcaaatttaatcaaacaagatataagatggataaagattggcaaagagactggtgtatgaaagaaatgggagatttgagagcctcaaagtcaaggctagttactcagcttaatgatctaccaaatgaacaagagcgactcaaattaaagcctgataacatcaagtctgaaactgaatggagggtatttgttcgcgaaaaaaccagcaaggaatttcgggtacagtttaatttgtaattttatttcataaacttgagattatgtggataatttgctaagctatataaggattcaatagtccaatttggtgttaatagttcctaatgtattgtttggtttcagttttcactaattacaagtatattcttgtgcaatataaatttgttgttaatatgtggattgctgtttattttataatctatttacgataataagtaacaagtttaaagaaattcaaaagaaacaactcccacatacatgcagccgtagaggatatgctcgaacaatggatgacatggtagtttttttattattaaatatgtatttctcctaaatcttaaaattattggatgttatctaaaaaattcacttgaatacagaataggaaaagctcaaaacctgtaacaagagttgaagcttttctaaagacacacactaagaagaatggtgagccggtcaatgcacaagctgctgaggttattgtaagtaatcagcttatatatatttacaatatccactcaaatttgtatatagtactcaacattaaatgatttataggagaagctccaagttcttgcaaatgaaaatccagaatcatgcacaacgcacaatacattacaagatgctttgactattatatttagtcctgacaagcctggtagatcattagctaatgggagaggaataactagtacaaagctagctattttaagagctagggatgaccatatttaacagttggaaatagatcaatgtgagatgaagaataaaatagctgaaatgatgagtcttcttacaaacattgcaaaaaagtcaaatattctggtaaattttattatcttgttctcggtagcttcaatttaatttaaaattataaatgcctatattatttcaatggatgcaggggttcactccaccaagtgaaggagactcatacattccaacaccttctcctacggtaactaacccttaagtattatcgcattcactttgaaatttgtagggaacttaattaaatttttatttttcaaaaaagtaattactgctaatcattaaacagagtgttaatctaaagtttacacctgaaaataacgcttgcaatttacttgattggtatggaggtggggaaattgtcgcagaaggtagatgggcttctagtgatcctaattgtgaggtgcatcatctacatattggaccgaatgcaatgaaagtttgggttgatgttgttaagaaacctgatgcatatttgtggagaccaacatcagcaatgagtactattaaagaagcagttggctccattattgcatggcctgccaacaaagttataatgaggtgaaattctaatataattgaaaatagattcttaattaatacgatagcaatcataaactagctctgactaacttctcttattatcaaaatttataggaaataaaatgaatggatctctttcaaatatcgtggtacatatctttacatgaaattatttaactatatatcttgtttctaactattttttctttgctatttctattattataaagaattattttgttgttgtttaaagttgtacatatttttacttttataggtgctcaacagatgaatgaatagcattattttggatggacaaccatgatgaagtattttgtaataattagtttgtttcaattctattacttaattagtgtcttcaaaacaagttaatacttggaatattgttgttttagctttaagtagctatattattactactagacaatatgtttgaacataatttgaatttatgaaaatgtggaattattttcgtattgaacttttatttatattattgttgtgattatgagtatgtatatatgtatattactgtgtagttgaataaatatataaatgttaaaaaaactagagaaaactaatttaaaattgctataccgtaaaattatatgagaaataacgtgttataaattgtatgaacattgcatttaaaaaaatatcattaaaagagtaaaagataacaattaaaaacgttgcttttgtggtctctctataagaacacatgacagttaaaaaatgtttcatattataatattgataaaacactataatacacatttctataacaagaatgcataacaattttaaaatgttatgaaaaaggtgggacttttaataacatgggatgacatagcattagttttaacgctatctattgccaatgatagcattttagaaacgctattgaaaggtctttttcttgagatggcaccatttcaatttttttttttaaattcaaaggttctcgactaaacctctttgacgaaagtcgagtcgaactgatataactccctaaccaaactttt

SEQ ID NO: 97478 - DNA, 949 bp, Cannabis sativa
tgctattaaattacatttcaaagatcatcttgtcatcaaacaataggatcttaatatatgatcttaaataatcagaagacggacagtaacaggatgctttgtgcactgacctggccactaaaacaaatgaaaatgactacaaagagaatactagaaacataaacacatctaattgaaagtgttttgatttaaggttaaacatagttttctccccaactattatctttatagagttttgcaatataaaagatatttatttatttactatacaataaaccatactaatattcacaaattaacgatctgcaaacaagttggctaatgttttagcccggattcttgtttctctccaggtcgtgcgcttcaattgaagaattgttccaacaaattacagttaactatattatttatacaatgtgtctatatttattaacttatattattttctacttttgaagtggtaaaaaattataatatttcagattagatgaagagttcgcatggaaaatattagtgaattcttttgagatttaattgaaaaataacatattctaatattatacatatcattatttattttaagcttaatatgacaattaaaaaatataactaaaataaaataataaatttttgaaataaaactaaataaatatgtgtattgcaccttactcttacctaatatatttatatatatatatatgagcacagcactgacgtacacatatttaaaaagagataagaacaatggaccaccattaaagatgagctagtatgatcttcaacatatttcaggaaattaggacagacgcaaaagcagagacaagcatagtgggagggagcatgagtaggacaacaaagataactacgaaaaaaaagaatgaacaatatagtagacgaaagcatcataatatatcaaatgccaataaatttttccatgcgcttcgtgatt

SEQ ID NO: 97479 - DNA, 532 bp, Cannabis sativa
ttaatcggactactggtattcaggtttggaaataaccacatttaatttataataataataataataataataataatactttgtttgtttggtaacattttcatgtcatgttgaagtgcaggctaagcaggttatatcagatctgttcaatttgtgtcccaatgcaaaagttgctagtgaggttagctcaggagagatagagaagattatacaacctcttggtctgtttcggaagagagctgtgatgataaagcgtttctcccaggagtatttggaagaaagctggacccatgtcactcagttgcatggtattggcaagtatgcagctgatgcatatgcaatattctgcactggaaaatgggatttggttaaacctgctgatcacatgctcaattattattgggactttctctctaccattactcacactctcaactagtaatatattttagtacgctttattgggtattctctagtcttgtatccactacactaggagtgtttacagaacaactttgtaaagatttggtct

SEQ ID NO: 97480 - DNA, 508 bp, Cannabis sativa
gatatgtagtttctcttttattgcgaggttttttttgggggacttggacttggagaaacttgggcaacataaaattgattgtcaaccacttctacaattagaataacggtacatatttaagtgtaaaagagtttgttaatatacattcatgtatattatatttgttaatttgtttgattttgttttttttttttgataaaactttttattgttgtagctttggagaaatttcagcaatgaaaattaaagtgatgaggtgacagcctctatgatcttttttattttctcaatgtttctcatttatttaatttttaacaattttttaatttaatcataatttagtcaaatggaactcaataatttattgtttctttgaatgtgtgtaaattaattataataatgaaatagataacatacgttatgttttataaaaaattctcagcaataatcatcttcattaaataaaaaagctttctcaaaacgtttttgtaaaaattttctttattaa

SEQ ID NO: 97481 - DNA, 1201 bp, Cannabis sativa
aattgataaattgtttttattataggtaaaacaaataataatatttaaaatatgatttattattttcatatagctaaatgacaaaaaaaaaaaaaaaagatattgttggaaataaagctaaaggttagacgaaatttaactttaaaagggtatatactgccttagtatatagtaggaaatgtttttattctttaatgtttaatatctaaattaatacaacttttttcaactcaaagtacattaaaatctataatttaccaaatatataacaatttaccaaatattttattctttaatgtttaatattttttattctttaatgtttaatatcctctcttggcaaggctgatcgtattttcagtagtcactctttgcctactgttattgtttccttagttcgagatgatttagtttaataaagtttcatttttattaaaaaattcaagagaggccaattaaaggaatgagaatgtattacttagtttataaactaaaaagattgaaggtgatattaaaagagataaaccaagcaaggtttagtggtattcaaagtcgagatcatcaagattatcaagagatcatagattgtcaagaattgttgcagaggaacccactttgtttgtccttgttggaacaagagagtaaggctcgaaagaagtatacaatgactcacgaagctctcttgtcttttcttcttcaaaaagcaaaagtaacatggctcaaggaaggagatgaaaatactgcaatctttcatgcaagtattcgagctaggcgagctactaatcagatctatatggtggttgacatggaagggagatggcatgatcaaccagaaaaggtaagagatacttttcttaactattataagcatttgctgggatctcaaatggttagaagggaaaggttgtttcgagtttgattagagtaggtctgattataactgcggctcataggcagctattgttgaaattttttactagtgatgatgtgaaacaagctgtctttgcgattcttgggagtaaggcgccatgacctgatggttttggtagctatattttccaagataattgggatttagtggggaatgaagtttgtgaggttgtcttagattttttgcatacatggaaattattaacggagttgaattctacagtaattactcttattccaaagagtaaatgcccagaaagtgttagtgact

SEQ ID NO: 97482 - DNA, 1587 bp, Cannabis sativa
aaaaaaaaaaaaaaaagctctgatttttagtgttcttacacattgaaaactcacacaagtaacctgtgaagagatggattatgaaataaataatacacaaaagatgtcatgttaatatttaacacaagtaattcttacttaaataaacctttgataacatagagaatttctttgttttggcaagtaaaattccaaatgaaatgacagtaatcaataagagtgcattcaatttctactttcaagcattgcaatctagcaaccagaatttggatctttccaggtataaataacattatgcagcaccagaaatgttattccaaaaagccaattatgacatattttccaccaaacatacaatacctctactagtcaatatctgaccaaagttctctgagataactcttccaaagaagaaattctttgaaatagaagaattagggaacaaaaacttgtaattctacatagttgaaacaaaagaactgacgaaattaatgtttaatccgcgcacaattattatttaaactgttctctctctctttcttcaaaagatgtgttggtttcgaaatactggaaatcaaatctatgcagcagcaaccgcttgtttctgagcaaatccaaagcccttttcaatgctggccttcaactctggcttaagagcttccaaagccttttgttcgtactccgtcaacccttgaaggtctgatggtattaaagcttcaacaccatctcttccaagcttaattcgtgatgcaaagaatggaagctcggtcagatcagactgcacataggcacattcatagacatcaccgtctccatcaagtgcacgaagagatgactcgacaaatctagctgctgcatatgccatcgacaaagttgcagaccctgcacctgctttagcctctacaacttctgttcccgcgttttgaattctaacggttagctcttgaatttcttcatcagtgaaacttactgatggtttagtctttgataacagtggcagaatagttataccagcatgtccccccacaaccgggacatcaacatcaatcagtttcaggttctttttctgagcaacaaatgtattggctctcacaacatcaagtgtggagacaccaaaaagctttttgggatcgtaaacacccttctgtttaaggatttctgcagcaatcgggacggttgagttgactggattactgataatgtggataaaggcatcagggcagttgtcagcaacagcctcaatcagtgtctttactataccggcattgatgttgaataggtcatcacgagtcattccaggctttctcggaactccagcaggaatgacaacaacatttacgcctttcaaacaattggctaactcaccatgtccagtgaaatcaataacttcagagggtgtgttgcagtgactaagatcagcagcaactcctttaacatttgctatatcgtaaaggtgcagggaagaaaccaatggagacatcttaataagaagggacaatggctgaccgatccctccagcagctccaagaacagctactttgtaagaagcttgaggctgcaagagattataagaatttgacgaatttg

SEQ ID NO: 97483 - DNA, 1765 bp, Cannabis sativa
acaccaacacttgttaaatgtggctcgtgctttatgttttcaagctcatatgccaatcaaattttggggagaatgcatcatgacagctgcattcttaatcaatcgtataccatccccaaatttacaaaacaaatcaccatatgagttattattcaaaaaggagcctgattatcaacatttaaagacattcggatgtttagcttttgcatccactctttcagctcataggacaaaattcgatcctagagcacgcacttgtgttttcattggatatcctcaaggggtaaaaggatatcgtctttatgacattaataacaaacagatttttatttctagaaatgtggtttttcatgaacatatctttcctttcttgaaattaaatgaaaatactactaacattgatccttttcttactactgttttgccttctaataatgtttctaagacacctattgatgattaccaacaagccattccagaggcacctgactcgtctcaacatctccacaccagtacacaaagctcttccaacaacacacctgatgcaccaagtccgcctgctgctgcagaaaatttacaacctgctgctacagaagaattgcaggaacatatcactgaacaacccgatgttactactcgaaaaacaagcagaataactagaccaccagcatatctcaaagactttgaatgctattccactttgcaggacaaatcatctacacctcacactttaaataaatatctttcctatgctagattagctgaatcttacaaagcttttatccttgcagttacttctctaaaggaaccacaaacatacaaacaagccattcaatttcaacaatggcttgatgctatgaatgctgaattaactgcacttcgtaacaacaagacatggagtgttgttcccctaccacctaatagacgtgttatcggttgtcgctgggtttataaaataaaacttaatagcgatggttcagttgaaagattcaaggcaagacttgttgctcaagggtatacgcaacaagagggcctagatttttttgatactttctcacccgtggccaaaatggtcactcttaaacttcttctagctatttctaatatcaaacaatggcatacactacaaatcgacataaataatgcttttctaaacggagacctcaatgaggaggtctatatggctctacctcctggactaaccgattctgaccatgattctacaggtaccaaactcgtgtgtagactccacaagtcgatctacggtctacgtcaatcttcacgacaatggtacaagaagctcacggcagctctcatccaagaaggcttcaaacaatccaaagccgactatactctcttcactcgaggcaccaatgacagtttcatagcactccttgtgtacgttgatgacattgtcatcactggtccaaatattcacattttgcaccagctacagaccactctcaatcaacaattcaaacttaaggcactgggtcagctcaagtattttctcggattcgaaattgcgagagcttctactagccttttcctctctcagcgacaatatacgcttcagttactcgaagataatggctacattgggtgcaaaccagcaaaagccccaatggatcctagaaccaaattggatgaccaacaaggcgagcttctggccaatccttcagaatatagacagctcattggcaagctcctctatttgactttatctaggcctgatattaccttcgcagtaaacaacttgagccag

SEQ ID NO: 97484 - DNA, 749 bp, Cannabis sativa
gattcattcaaacaacaatcaatacaatggattagggttgttacattcttttcttattattttaaatagaaaaaattagaaaaaaaataataaattagcgaaaatagaagattaaaaagagaaaatatcacctaatcactcttttgggctcatatttagagagatcaatcttttttttttttttgaaatagaaccctttaaaataacatttatacggttttttttaagttcatattttaaaacttaccataaataaataaaaattgttactatttattcattaatacaaccaattaaataaaattttatttaatcaaaatcaattaggtgatataattcagaaaatataaaaatcagttatataattttatttaatcaaaatataaaaatcagttatatgattagtataaattaatattgttaatgttaggatgatatataaattatggttacataatgaactcactctattatattcaaattcaaaccaactttttctaaaatcatttctaattttcttcaagtataaaatctttgtcagatgtcatgtttattgagtgagtccacaacatcggttcttttagaatctttctatcaaaaatatataaaatcatataacatataaaaaaaatcagctataaatataaaatatcatagagctatttatatagagaaacaatcaaaaataaaagtgaggaacttgaagatgatagacaacaaaatattttctttatatatagatataagtt

SEQ ID NO: 97485 - DNA, 1080 bp, Cannabis sativa
gaaaaatctggccccatttcgcggtcattgcaatactcttcgactttgagctcgagaagttttagggttgaggctggcttgaactcatcatcaaaagaatcaaggcaacaagacccttatggcatcttcaatcttgaagagtctattccaagagacattggaccttataaaaacttggttatttttacttcaagctctatggatccaaaatgcatctcaagccctagctctgttccactcctaagaaaattaaggtgtgttataaaatgtcacaatattcattagagatttccatctttacaatttttatggaaaaagcaaaaatatcgcttttttgtttccttcaaaaagtgatcttatggaaaagtttcaaaaaaagttaaaagatatggagaaaactagataaagtaattagtaaccataaaaaagtaactagttactctaaggggtaactatcaccctaaactatttttgctatattttttataaatagtaactacacaaaagtgtaatattttgtaattacactcaattctcacaagaatgacaaatataattggtagcaaactatagttatttttaattacataattaatgcgtaattgcccaattaactaaacatgtgaaacgtaataattattctaaattatactcaatttcaattacataacgactttctaaatacacccttacataatttcgatatttctcactcactttgaatttttatattattttttccttttttaatactcacaacaggttattgatgaacaatcttcagacagtgaatttgaagaacttgacataccatcagaagttagcattttggatcaacatgtacaatgcttgtataatgcatgtatatattacaaaattaaagcttttttttttcttcattctctttaattaaattcaaaattttttttgatttttccattcaaatagaattaaatttattcttatttaaggctctcatataatatttcagggatatatccaatatggagtgccatctaccccagaaaaattgctaacattaatgaataaggtacattaattttgattagttactaatta

SEQ ID NO: 97486 - DNA, 759 bp, Cannabis sativa
ttgctcgacataacgttgtaatagtctcctaaaaattatgactgagcccatctttctaatccaatgcctgaagaaataatgaaacgacaacatccattgcttttttcttctcaaattctctatgaactctgttttataatatgaatacgcacaagtgtaaatatgattcgtaaatttgtcagtctagaacttgctagctacgttcatagtaatgtggtggtagaatgcaccatggtgtgcatcagggaacatgagctccaaagtatgaaaaatgctttggtgccaatctgatacgatggctaagttctcaacatcaccaatcgcttctttcaattttctcatgaaataggtctaagagtcatgattgtcactgtcaactatcccaaaagaaatcgggagaatcggctatctaaatccaatgccatcgtgcttaacatgtgcccaccgtacctagtctttaggaatgatccatcaacacatacaacaggttgaaaaaacctaaatccacgtcaacaaggatccagtgaggaaaaataatacttgaagcgaccgttctctaatacaaaatctataatggtacctggatttttcaattgttgtatgtgcaagtaaccagataattttgtatacgaaggttcaggtaagccccaaactaagtgtagtgccttttctttgtacctccaagccttttcataactcatttggatcccattatttttgtacatgtcggtaacacccttacttacttaaaataagatg

SEQ ID NO: 97487 - DNA, 513 bp, Cannabis sativa
tttagtgtatctaccattattaatgctatagagcactttaaagtgtcattgttaggcagattttatatagtttaatttagaaaaatgctaaaaggtactattgggtgcttatcatctttctcattgttatactgttattagtataattaaatattgagtcttatataacttaagaaaatagattttaagaaatattactaattaattgtagggcgctacttataaaaggtcttagacaccatttataaaaggtgatgggcactattggtagtcgatagcaatgctataagtaatattaaaaattattaaatactaagaaagtgtattggacattaaagtgctaactaccatctaaatggatgtagtgtataatctagcacttcacgatggaccacatcccaatcaagtcaagaagatgtagtaagtacgacacaagtcgcgggaagaactctggacaaggcatcggcaaccttgctagtaatgttcgggcggtattgtatctcaaaatcaaat

SEQ ID NO: 97488 - DNA, 619 bp, Cannabis sativa
actattgagaaatagcatgcatgttcatatattttgatttaatagcaatgagctgtacacgtatttttctttagtcatgcttatatagtattttagatttggattatttcatagataaaataccctaaaatataaaaagtttacaaaaaaatttaaaattttaattggtttgtgggaaaattcctataatattcagaatttagtatcttactaaaattatcaacatttagtaccttactcaaatttgatgaatacgataaaattaaaaaaatttacaaaaactcgtcacatcaatttttttatttttaaacttaaaattttttatttataaaaatactttatcaataaaaacaataattttttttgttactttatagtttaatagttgtcttgaagttatttttagttgttttataatttatttatagttgatttataattatcgtgaagttaatttttcattattttttgctgagaaaagtatatatttttgtaatttttaaacttcaaaaaaaatattgttataaataaaaactttaaattataaaattataaataaaacataaaaaaaaaattatatttttgaaaattctcttaagaattttaacattaaatgagt

SEQ ID NO: 97489 - DNA, 702 bp, Cannabis sativa
ttgtggtgattattttaataaaaatgcaattggaaaactatggtgtaattaaatttaagtataattagagtttattacataatttaatatactttctgcataattgaaagtaattaaaagaaaatattattttcctgtataattattaattattttactaaattaaatattaaaaatacattcatctcatatctaaacacgttgtattttataataaagtgtaattagtacgtgtaaaaggcaccctataaaatgtcacatatatattgaatatattattggtctcactactctttctcctttattttgcaaatttgaagagtgaggtaagcaatttggttctcttcatatattataatattctatattattaatataaccacattaaatataatatttatttggattttacctttaaatttgacgtgtaataaattatgcattttaaattttttaagtcgttaaaattttttcttgaattattgagattgttagatttaaatttttttgtttaatttcattcaattttactaatatgttgattgtccatgtactaaattgtgctcctaaactttgatatttacaaaatcatgccccctaaactttaacatgtaccgaattgtatcccttaaaatttcatccacgtcagactttcttttagtaaaattggacaaaagttattaaatctaataatctcaatag

SEQ ID NO: 97490 - DNA, 2009 bp, Cannabis sativa
  modified_base (1688)..(1691): a, c, t, g, unknown or other
aataatttattttaattgcatagtttattataactacttcaattctaaatatagaaatttatcttttagaatatttttatatttaaattgtggatatcttaccatttttgttagtttaatagaatattttaagaatataagaatattatgtcaaatttaacggtgttaataggtttaattttataaatatatgtaaacataaatattatttattttaaattaatttaagataaacaatataaaatacaaacttttttccctaaacacaaacccaaaaattagtttgctaccattgagaactcaagcaccatctctaagactcgtgaaagaaaagagactacgaactcaaacactactccatgtcgtgaagccatctctggcataaccaacacatattcgacgatcgactcaatctaaccattgcgaagatctcaattttgcccatgttcctttagaggaagaggtcgacagcggggccaacctgaggatgttgacagtaaaaatctaaaaatggagatcgatgatgatggtgaggaggaggtcgacaataaaaatatgaaaataaagagttagatagaaaggtagaagtgacgaagatgacattttggttttttgttttttttatttccttcattgaggtgagaagtgagatttacaatgacatttttatttattattttgattttgatgaagaaaaaaaattaatgtggaaaaatatttttaaattaattttgtaatttattattttcaatatttttttagaattattttcaaacaaataaatatatgcattcaattttttgacatctaattaaatttttgacatgtgaataaatttgtggataaatagtataatgccaaaaaattataaatatttttcagaattttgtcatactaattttatattaatttaaatatgtataaatattaatatatttaattttgaaagtatgttcaatatataatattaatatatttattttaataaattaataattagttctttttaatttataaaattctaaaaatatacataacaagacaaaaattaaaaatataactaaatatagggggattgggatttcgaagtttgagagattttaatttggctcttttagggaagcagtattggcatttgttggttaatgctgattctttggttagtaggctttataaggctaaatattatgctactggtaacctgtattctgctgtattgggagacaattctagtttcatttggcgcaatattcttgaagcaaaagatccacgcctgtgctcaaagaacaattgctactggagaaaatgtatccattcttaatgatccttggcttccacataatttgaacaactatgttgtctcatgacaccttgctcttgtgaataagtcggtcagctgcctcttcaaagtcggtactcgcgcgtgggatgaggatgttgtgagggacctgtttgttgcccgtgatcaggaccttattttatctattcagcttagtgattcgaccgctactgatggttggagttggcgacttgagacttgtgggaattatttggtcaaaagtgcatataaattcttgcaagaatctaagggtgtttggagtcctgatcctaatactgatttttgaaagcggctttggtcattaaaaatttcatctaaggtcaataatttcttatggcgagctgcttcnnnngtgcttccaacttgttttcaactccaaaagcgtcatgttcctgtcaatgccaactgccctttgtgtaactctagtactgaaactattcaacatgcattggtggactgctcgtttgcaaaggctacttggcatcgtagcatagtggatgtcggggctggggctgcaacgttcagtagctggttgttggggattttcacaaggggacacgaagttgaaatggtggaagcgacgatggtgagttgggcaatttggcgtgcgcggaatgactttgtttggcaaaagaagagttggcttgcttcaaatattgttacatcagct

SEQ ID NO: 97491 - DNA, 637 bp, Cannabis sativa
  modified_base (331)..(333): a, c, t, g, unknown or other
gttgtacctcatgcatgtttggtttgattgttaatgattgttattgaattaaaatttcttcaaagtcaattcatacataatatatgtatcccgtcgatctgatattatgtatgtttttaataggttaccttatgtgtggtagacaatgttatagtgattgattatattgtccaagtgagagaatgttagaattatttatttgtggactaatataataccataatcacaatcattaattatgtccctattatttctcatacaaccataatgagatggttaagaactattaattatttagaggcacatgagagcacccatatgactataattnnnccattgagttatagtccaccatctattaatccttattaacccaataagcttacataaccctttagggttagatgggtatgtgagatatatgtatatattaaggatgcatagtgtgtgttacggtagatggttagacactaagtgggtttgctccagaattgtctccttattactcttcactctttagtatatttttagtgtattttagacttggatattcaacaatggctcaatatgaagggatgagcaatatgggaggtatgttttcttaactattaatgctctaaataaatgcttggatctt

SEQ ID NO: 97492 - DNA, 735 bp, Cannabis sativa
aagtgatctaaaaagatcgtaaaataaagagaaccacggtgaacttaaatctaagatgccacctaaattttttgttttttttactttcttcatatttatgtatagatttaaaaaataaaaatatctaaaaataatcacaaaaataaacgtgtctatattacctaattaatatatactataccatgataatatttttacaaacaccttgaatttagtaatgaaatacgagatttccagcctaagaaagaatttaaaaaatcattcgaagactatttttctcgtcgttgaacaattataccagattttattttttaaaagggaaaaatgtacgaggttttaacctgacaggctggcattagatttcaattatttattttagtttttttttggaacaattatttattttagtttaatttctgtttctctttctataagctaaacctattcgaatacagattctcaaaaaaaaaaaaaaaaagctattcgaattctccttaaaaaaaagactattcgaattctccttaaaaacaaagactattcgaattcgatagcttatagaacttttgataaaaaacaaaagctaatatagaactaaagtgccacgtcatcgaaagtctaatatattatgaaaaaggaaagaagagaagacccacaaaactcaatagttcactagtcactacccgccttctttaccagagcggtctctttttctctctctcctccactttctcagtc

SEQ ID NO: 97493 - DNA, 751 bp, Cannabis sativa
atagatatctgaacttgcagaagcagccgtgggcgatgaattgggaaccttattagagagcaaacacaaaacacattaacataacaatatcacagcttatcaaagaagtatactccatcagttttgttgtgtttggtcatcaagtgaggttgtttctctttaaacagtttctaactgttttaactaactgtcggttatagccaactctttctatatcatttggtactaatttttagagagatcattacaagtagagtgagctagttcattcagagagaaaagaagagcgaaagagtgttgtaattgaagcaaagcttcattgagagattgtgtccgagaatacatttgtgtacaacagcttgtaatcgattctttctagctcaataacaatctaaagccactagggctgttctgaccgaggagtaggcaggtgatactacaatcactctgttcgaacctcgtatgttcagttctacatgtgtttaagttttagttcacatctaattcttgatcaagttattgatcacaacaagtttcaaggaaaatgcaaaacatttaaacaatgcaatgtattgcccattaccttatcagtacttgtttctgatataaagacagaactgagagggatattgaaggcagaggcagcaacctgagcaattttagtgtgtaaaccttgtcccatttcaacacccccatgtgtaactaaaaccgttccatcggtgtaaacatgaacaagagcacctgcctttac

SEQ ID NO: 97494 - DNA, 2460 bp, Cannabis sativa
  modified_base (363)..(364): a, c, t, g, unknown or other
  modified_base (582)..(582): a, c, t, g, unknown or other
  modified_base (703)..(723): a, c, t, g, unknown or other
gaatacactaatcaagggattctgacagcttgccatatctgtgtgatctgatcccaaaattatagggatttcttcggtgactcacgatgcaaaagctaaaattgctaagttacggtgtgctcttcggattgttcactgcccggttaagaaggctttatccgagcgaatatatatggtgctctgttcagcatatctcttgtgagcaggtacataaagttgatttcacgtgtcaccatcgtatgatgacacgttagagtgtaaaaattgggataacacatcgagtagcgataaatttactttctacccatcaatgtattttattcttaaaacacttagttttctataaatgatattttagtaaannaatataattactgaaataagagctcttccattaactctactaagctaagctcgaaggaaatcattatttcacttctatgtctagatagaagctatagactccatatttatgattagcgctcccactcaattgtactatcatgttctgaagatgtatgtgttgcccgaaccaattggtaagctttaacgaacaatctaagaacataaataacactcttnagatcgaacctaaccatatcagaattaagatcctttgatctaagatcaatcaagtgatattgacttagaaagatacaacagtaattttataatatatttaccaagttcaatatcggtccannnnnnnnnnnnnnnnnnnnntccgatactagcatactttaccaatgccttggaaaggacataatacttatccaaggtgtaagtaaatttcatcgctgactatcacatcagtataaatccagtgcactgatgaatcatgggacattaacttttgaagcatataatcacaattaccttccactgtgttgacttcactgtaattgtgaataactatatgttattgatttaacagaaattgtatatcaaaccattagcatgaaaaattcatgtaaacataaatgacttctaatcttttattgataacaaataagattatattgaaatgcgttttatttagggtataaaatcccaacaaactcccacttccactattataaaacttgaagtgcatttcaatcaatctattgttttgatatccatatcaagtgtagtgtgtttgactcaacccaaataacaggaactgtaaggttgtggtaatcaactgctttcggtaccattacttcctttgtgttcataaaacattatgcaacatcaattttctatatgtattactcgtctagggatacataattctttactgtatgataagtcatctgaatatacaaaaaacccatatggaatagagatgaaaacagttaagaactttcttcagtttgaataactttctggtgcttttaaaaataactaagttattagcttcaccggtggaactaaattattatagaggggggtttttatatccttctagaataattcttccaccccaagagtaaccaccatatctgatattaagttttgagttggtgttgatgtaaggattctaatttatacctctatcatctaacatatagatcactttcagagattctttcttgattgtctccctaatattccttgtttgattacatcttcgatggctcccactcaacaataggagtatggttaaatacatacacaagtgtgcatttaacctcttaccattgatacttagggacctcttgttgtgacattttatcttagtctgaaacattaagttccttctaaactaagtcatcaacatagcattctagtattaacattaatgtaaaatacttgctcaagactaagtaataagtacatataccaaaaaatatttcataaggaccgagaattatgcctgagtctttcaaatagacattgtaaaatttcctatcttatcccataattctgataagttattaatatccatgtgaatggttaaaataatttttctttgtttaattttaaagtttctatcttgaacatagcatagtaggttatcactagtgtcagccaaataatgatgggctagacttttaaaatcctcccactaagaaaaggtactgtgattctatgtccaatgacttatactggtatcaagttactattgcaagaaacactggaacatgtacaggatcaaagaataagttctactagtttgctagtttatatattatattatgtccatgtctaatcaaatatgtgtgtcatagagattctatggtgtatttagtatagtcaagtgtttaaagaatttgaacgacatatatcaataacatcttccaccactaagtgctatagagattctgtagagttttgaatacagtctagagttcaatagatataaaagtctttgattttcatatattaataacttcttccacccctatcagatcaaaagatctttttattaaacaaaatcttaataattgctttagaatgaacaattattcataaaca

SEQ ID NO: 97495 - DNA, 628 bp, Cannabis sativa
cttcatactcagaaccaagaccaccaagaatataaagaaccagatcatcacctttaattgattggccagcagcagcaaggttatcagcatattgtttcatctttaggatgtaatcttcgattgacagggaccctttctttgtggtttgaagaagattttgaagttgcagtagtctggctcgagatctcgtggcaaatagttggccaaaggtatgccaaatctcagcagaagtggcacaatgaacgacatggccgagcatgtgttcagtgacagagttcattagccaatgcattaggaattggtcaagacgaagccattgatggaaagcagggttgggagaattacctgcaagaaatgctggtggttgaggatttgtgccaagaatgtagccatcaagttcataggcacgaacaacagcaagaaccagagatcgccagagagtgtaattggtgcgatctaatcggagattcaggggaaggaggtgattgttggggaggggaatttgagcttgtggttgttcgattcttgcatcagctggtggatcgatttgaactccaggaccattgccattatcgccattgtcttcttggtttgacatggctccgataccatgtaagaactctcaaat

SEQ ID NO: 97496 - DNA, 667 bp, Cannabis sativa
gtacgcctagttgcaccggggttttgtgctggcaagggtatttgagctctaagagcttaaggtatacctctctgaggtatttgacccccagtgtgtctttcttgcatacgtggaaactgttgggatttatgccctaaaagcaagtaattaattgaaaatattttagagaatatatggcatacaattataagagtataattataaaatatcaaaaaattccttattcatatggggaaggtataatcttgtaaggatgtacaagagaattaaaattatacgatatgaatagaataagttggtagtgtattaaagtaatgggaatatttaatatggaattgctaagtacagttttctatacactatacttctagtgtgtgtgatcatgactcggatcacatatgtagatggacatgtagtaaaggtactgtgtataatttgattatgcgtgactagaccaatgtgtaataaacatctttcattaatatgtcgtttaacatgaaagagttattcatatcacagtgatgatcattagtagatcagcctgaattctgagtatacatgagcttttatttgtgctcattgagttctttgattcacttgttaaagttgctcagagaagatgattctttcaacatctattttgggaacttaataacatgagtggctg

SEQ ID NO: 97497 - DNA, 997 bp, Cannabis sativa
ctggtccacaccgggttgggtcgccctctattctttgggcctggatgcattcattcttgtgggccttttaacgtgggccattttgcgttgttattttattgggtcgtttatttctaagtttgatttttaccccccaaacaataactttcttccgattgtccgtttgaagcgatttttttttaactttggtattttttttcgtgttctacgcatcccaaacagcctacgacggttttggccaatcatttatccaaaaactttcttttgtatactaaaatcatgttatgcacccctttcacccaattttttgtgttttattttgctattttatttaaaataaaccaataaaattctaatgttaagtattagaatcaatgtttatgatgtattttttaattttactacaataaaatgtgcaatactaatttctttttatatctcttctaatatttaaataaaatcatagtagctagtttatataaagattgtgttttggtatattggcaaagacttatcaatatatccttttggtcacaagtttaattcccaatagaccattttttgtattttttttagcctactatatctatcctatatattacatcaatattattctaaaattactctaagtatttaaggaatatctatatatatatatataaaatattcttataaaagtaagttaaagaaatcataccttatactaaaaagtatgtacttgacttccgaataaagtgacttccgataaaattataacaaccaagtttaagagaaactaaaatcaaatattatcctaattctaccaaaattttgacagcataacggctataattgaacgttttcgaaaaattcaaacttattaataacaacacaacacaactcaaaataatataaaataataatcacaacaacatttagcaatataaaagtttactacccatccgactgcaatacatgtattcacagaacctaattgactacggatgaatatttaaga

SEQ ID NO: 97498 - DNA, 739 bp, Cannabis sativa
tgaggggcctgtatagttagagctagtattacagaagctagcggaaggcctactccttgaagaggatttatggccctgtgttgtctgggaataaagagttgtctgtgcgctactccctattcaggatagataactagtatcctcacccaattacataaatggccattccaaactagtccttcgatttaatccttcaagtagtcacattcattcgtcatgtgtctaatatcatcgtggtattcacatcttttgtttgggtctcttttttgtcttccacctttgtacattggcggaggctttttgtaatggaccatattacatgtggccttataaacattctcacgaatattaatcaaactagtgtccttggagtatcttgattcttaagtctttctcttctttgcaattcattttaatgaaaaggagtcacgaagtgtagagggatagacagaatggaacccacacaagaagaagaagttgtgagcgaacatgggcgatccgtgacaatcctccatctagtttccttctcttctcttgatttcttatgctcttatctgtaattgtttaattatggatttaattatgagctaaactccctatttagagatgtgatgtatattgtttgagattatttcatggattaatattagttaattattctttttttccttgattgtgtgatttattcatctttgtgtttcatacatgtttaagtctgatcaccttatgcatgattcat

SEQ ID NO: 97499 - DNA, 984 bp, Cannabis sativa
  modified_base (41)..(57): a, c, t, g, unknown or other
cattgatattttttggtatttttttttttctagtgtaactnnnnnnnnnnnnnnnnnctcaattagaatataatttgcttggttccaagttctactgtatctaataatttttgttagtataactgaggttgtttaatgttgttaacttaatatatatataaatattatggaaaaaattaaaaaaataatcaattttcccccactgtttgtgaagaaatccaaaataagccagaaagggatcgatttttgtaaagaatattaagtctaagattgaacaatcaaatctccccttattgtgattcaaactccactcggaccactcccttgaaatttcctatcattctctacgattatgcatccccaaaatcctctttttcccaaaaggaccatgattagggcttcaagactgccagcgatggcgatgaccatatcccatcaccaactgcatcaacaaacagaggagcatccaaccacatcaataaatagaggagaaaaatcacactcccaatcagatcaacagggagaacaagttatttttcatgttattgatataatgatgagtcaatcaaaattatctttctagatataattcaaaagttgtatatctatgaatgcatgccttatacatagtagaatatacatagagttattataatgcatattaggcattatatgatgcattgatgtaataaccaaaatacttggttattattttctagtctaaaaatctcgatgtggatataatgattgcatagagtaatttagattcgtgaatagagtattattttttttaagaaatatgcaatatttgtgtaactctccaaaatgataaggaatatgagtattattatctcattttaaagtcaaatacagttgtatattggagaattagactatagtatttttagcagttaaatatagcataatgacccatatttttagccaagacattgatgaaaagttttacaaaatcattagaattat

SEQ ID NO: 97500 - DNA, 591 bp, Cannabis sativa
atgctctcttataaatataaatgtatatatttataaataaaaattcatggtgattttgtgtttctggttgtgttcttttcagcaaaacacacacacacaaaataagtttctttttgtttttgatattagatttaattaatcatgtatgtcaaattatttaactttatcatgagattaagttttggtagctattacatttcagttatcctgttattctctatcaatttgcttatttctgttaatgaaacattttaatattgtaaacactcataatttatggaacacttacactgaatttattataatccaatgaacactctcagtgtaacaggaaaaagaaaaaaaaatcagcattgatgagttgtcaaattataatatttgagattatttcataaaatttgtacttttttatgaattttttctagggattttttttttgttcttttactaaaatgcgaagtagtgttgtaaaaataatgttgttttgttagtgctgttacaaaaaaatgaatgtaatttttttttaacttaaaaatatttaataaaaatctattaagctaattagttaagaagaatataattagttaagaa

SEQ ID NO: 97501 - DNA, 545 bp, Cannabis sativa
aaaatttattaaacagaaaatatgattgtcaatcttcacttttttatttttttttatttagatttttttgtgcttttttattttttatttttaaaaatagcttaaacatacgtatataaagaaacatgtaattttttgttaaacatatttctttgttaaaataaaaactttagaatgctcttcatgtattttcttttatcagaacttatctttagagtataaaatacataaaattttcattttcactgacttgccatttccatcagctgcaccaccgcgacctgccacctcccctccaactacaacttcttttcaaccttagtgacagttgatgtggctgcaagagaagttgaggcaccaccagccactcgtatcaatgaagaaccataagaaaagaaagaagccaagaaaattggtatatacatataaaaaatctttttgcatctgtcatttatttattattgtgatttcatccttcatgtttgaacctaatatatcttgattgtatgctcacatcaagcctttactcacataccatttgatat

SEQ ID NO: 97502 - DNA, 759 bp, Cannabis sativa
  modified_base (44)..(67): a, c, t, g, unknown or other
tttacaaggttcggtagaactaagccacctacgtccttggtctnnnnnnnnnnnnnnnnnnnnnnnngttccaatatcgagcaaagttaacggtcctgactaacctttacaaccgggaaattttcaccaaggtgcttctaaacctcttacaatagtttcacactgtcgaggactattaacctctttctcagattgttgtagtgacaatctcattataaccgggttgtttatagtaccagtgccaacctcaccccaatcacaatatgaaatttgtttgaaattacaagcaaaatcactctagagttatgataatacaatggaaacctagtgtgataagcaataacactcaagatgaataaacacaaattttagctcaaagtgtgtgaaaagtgttttttggatttcaaacttggaagctcattaatctcacttagatatgttagatgtatgacataaatgctaagccaacttaattttttgagtaaaaatcgagtttatatagtgttggggtgaaatatagtagtttatagccgttggacgtgacaaacgagactggttagtcaatgggccaaaatttgaattcaaaagtgcagttaacctctttgaaaccggttaacctaattccaggcagtgggaaaagtctaatttttcgaattaaaacaaccataactctctactcgattatccaatttcaaaaattccaattttgttctctatggacatagctttgagtttcaatatagagccaagttaacgggc

SEQ ID NO: 97503 - DNA, 591 bp, Cannabis sativa
catccgaaactagcatactttgcatactttgccatttgccaatatttaatattttggaaagaacataacacttatgcaaggtgtaagtatatcatcactagctttgatccaatttatcttggctttctgttggagaaaggattggtaattaagctgtttttgtactagtagttgccttgcttcaagctcctctctctgtaaaacagaatttagagggtcatttctcaatgcattttggcaatgttccagctgttcctttgccctaatagcatcagttgcaacatcagaaaaaccatccttattgatctccctgcagaccttcttcatttccttcaatctgcacaccagttgatacatcattgtgccactatattagatttcccatatacctttcagctttgaaagaaagtccttatgagattgcgacatccaaaagtatcttaaaggcttcttccctgagtccatactaggatgtatagtcaataacccaggagagtgatcaaaggtaccctcatttaagtataatacttcagcagtctggtatgcatctaaccaagattgattagccaagactcgatcaatctttaaaaa

SEQ ID NO: 97504 - DNA, 503 bp, Cannabis sativa
ggctcttttctcttgaaaaaatggatgtgtcgcaattaactttcaactcacccaaagacggtttactctagagctcagaaccagccgatgcttggctagtagatgccgaaacatctccatttttcaactgagcaactttccaaagttcaaggtacgtaattgcagcagatacaactctttcaacaaaagcaatctttttattccagagcaagtcatttctagctccctaaacaccccataaaatcatagccaatttatcaatactatctcctgggtgagtattacaaaagctctcaaaccaggaaccaaattcagcatctccaatcgtgacagtaaaacccagcccccgctccaaacaagctataataaaaggacaagtaaccataatataaaatatggtctcaacatctctactacaaagaggacaagtattagtcacattaactcgcttagtttgaagtgaaacaagagtgggaaggcaattagagagagccctccaaaga

SEQ ID NO: 97505 - DNA, 1161 bp, Cannabis sativa
  modified_base (831)..(837): a, c, t, g, unknown or other
tcataattatactaaatagtaagtattattatacttaataacaatactttatagtcgtggcatagctaggtctgtgccgagtgtctacctagcttaagggtctaattttttttttcttttttaaaatacatatcttttttgttaattttgaaaaatataacatttgttctctaaatagaagtccaaaagtattttttttttcttatgacccattaaattttagagtcgatcctatttatatttttatatatattgttctctttattagaccatctctaatagatcgtgtatattttgagttaaatttagacaaaaatttactataaagttatatttggtccaatttttgtatttatactctttgtaaaaatcaatattaatattaatgttcaatgaaaatatacaatataattaattttatttatattattttaatatcttataactataaaaatatttttcattaataaataataaatgaggggtaaatatgtaattaaaaaatgtgtacttattgtggcctaaaatttaggccaagctaaaaattatgtcaaatttagcacaatttttaattcaggtcaaattcgacttttacattattattaaaattaagttttagcaaaatatttttaaaaataacaatacaccatatttataactcttcatacgtatgcactcgtaccttgacaaacaaggaaaagcaaaagaagctacaactgcaaacacttatataaatagagaaatgctaaacagtatcaacagtgtctagcatcttcttatgtgtcaatattactattggtcaaattaaatatcgggtcccatataatttannnnnnnaatttttagagagtatcgttagccaatcacaaagtaacatatctagggccggtttggcacaagttttggaaaaaactaaaagctgatttttgaaaaaaattgtgataaaaatgtgtttggtaagcagtcgaaaaatagtttgttgaagaatttttggagaagctgcagctaaaagctaaagctgctccaagcctccaatctaacttttagaataacttgttttgattaaaagactataataatttttttatactaaaatcatatttacttatttattatagagcaatttgcggcgaaacccccttacgttttaatttttataca

SEQ ID NO: 97506 - DNA, 868 bp, Cannabis sativa
caagcttactttaaccaatgccctcgttatcagaaggtagggctaacactggagttgtgattaacctctgtttcagctcctagaagcttgcttcacacctatccgtccatacaaaacactgattctttttagtaagctcggttaagggtgttgaaattatagagaacccttctacgaaccgactataataaccagccagacccaagaaacttctgactttcgtaactgttttcggtctcggaaaatccctgatggattctatcttccccagatccaccttgatcccgtctttgctaataatgtgcccaaggaaggacacctgagatagccaaaattcgcacttcttaaatttggcatacaacttatgttctcgaagctgttgtagaaccatctggagatgttactcatgctcctcttctgattgagagtacacaagaatatcgtcgataaacacaatagcaaagatatcaagaaaatccttgaatgctctattcatcagatccataaaagctgcgagagcattggttagtccaaatgacataaccagaaattcataatgtccatatctagtgcaaaaagccgactttggaatgtcctcctctcagattctcaactgatgatagcccgatccgagatcaatctttgagaagaccgtatttccctgaagttgatcgaaaagattgtcgatcctaggtgaaggatacttattcttgattgttagcttattcaattctctgtagttaatgcacatccgcaaagacccatctttcttcttgacaaacaatacaggagctccccagggtgacacactagttcgtgaaaaccctatgtccagcaacctctagagttgaatttttagttctttaag

SEQ ID NO: 97507 - DNA, 623 bp, Cannabis sativa
ggacttaggttttaaaccaaaaccgtatctactacaacttaatatggcaataccctaaactagcagggaattaaccaaccagaaacctgaaactagcgcgaatcgcaaagctaaaattttcaagagccctgttgcagaaaccggaaaccggttacccggttttccccaaaaaacccaaaaaattcaaagcttcaccaaaacgattccaaacttaaccaaactttccagacctgcatatgataccccaataaaaattttccaagcaacaaaataactacccaagctcaaaattgaaaaacaccattaaagctccaagtttgagttctaaaactcaaaacttgattaaacctaataacagtcattaaatcatgcttaattcaacatataaactataatctaactccataaacacaattcatacaccaataataatcacagcagctaataactcaatttcatgcaaaatccatttcttaaaattcaagaaaactagagaaggaattgctagaagcttaccttggcttggattcactaagaattgctagaaaacacaccaatttgatgaaggaaaacaaagaaccctagctggttcaatagggttcgaatgagagagagagagagag

SEQ ID NO: 97508 - DNA, 742 bp, Cannabis sativa
gctttattaatttgcttgaaaatagcttaggcatattggttttctcaatcatttgtttgttccacgaatggtttaagtgttccaagtaggttgtcaagacatttaggccaccccaacctgatttttttgtggattaactttgatctcatcatcgtgcccccttgcaattcaaagagatgacttttggatgaaatgcaatagcttctatactgaatatgcattcgtgtgttttaattttatctagattccatttagtttgatcagcattggaagaattttgtgatattgttctttcattcaatttgtaaagaatctgaatatgtttagcctaataaattaataaagtattgtgtgggattaggagataatagctagattagttttgctaatattatttcttttcatagtaaatttcataatctcttctaaaaacattaaaaaaagactagcacgattacaatatctactaatctgttcagttctttgaactgaatcccattgattgttcatacccactgtgggaatttatttgcatacatataatatagctctttcctaggcaaattttacagcctggacttgcggttttagagcaaaaaaaaaattacttgaatgtgtgtgttattatattttagttagccagccgccgtagttagggttttattttttttatctcactgtttctttctctctgtgcaggtggacttgggcgatttacggtttgttgccaaggataaggata

SEQ ID NO: 97509 - DNA, 616 bp, Cannabis sativa
atcaagaacatacaagcttcataataaacatgagattatattgttacaaggttataccttttggtttaaaaaaaggaagagccacatatcaacgtctcgtaaatgacatgtttgagcatcaaataggttaaaacatggaggtatatgtggacaatatgcttgtaaaatcaatcaaaagtatggatcacatgattgaccttgcataatgtttttcaatcttaaggaagtataacatgaaattaaacccgaataaatgctcttttagggtttcttttggaaagtttcttggtttcatagtaaatgcaaagggaatcaaagccaatctagaaaaaataagggctttactcgatatgccttctcctaagaagccaaaggaagttcaattctcaattgggaaaatggcagcattgaactgatttatctcaaagtcaactgataaatgtttgccattcttcaatatattgtgaggaaataaacgatttgagtagacgaaggaatgtaagagagtatttcaaaggacaaaggaacatttgtccacaccactaatacttttaaaaccagtaagtggagaggttctatatttatatttatcaatcttagagcatgtcttaaatgt

SEQ ID NO: 97510 - DNA, 890 bp, Cannabis sativa
ggtattgtgatgtctaacataattgattttcaaattaatgattcatggatcttagactcgggggcaacaagacatgtttgctctaatataaaattgttccaatgtgtatacaatgtcacacctacaagattacttctccctaatgggaattttatttttgtccatcaaagtggatctgttgctgtcacagataagattacattgcaaaatgttctctttgtgccagatttcaagtacaatataatatctgtaagttgcttgataaatgataatcatgtgaaggttaaattcaccattaatgagttcatattgcaggaccttgccaacaagaagaggattggcagaggtaattgtgcagatggtttatacattctggaccaaaaagctgctagttatcctattttcaatgtaacggctgaaacttggcatgctaggctgggacatctatccaataaatacttgaaattgttagaaaataatctcaaatgtaatacttctttgttgcataaagattcaccatgttacatttgtccaaaagctaagcaaaagaaactcccattttcaaaatagtggtaaattttgcttgcaaaatttttgatcttgtgcattgtgatatttggggtccttatcatgtaccttctcattccaattttagattctttctcactcttgtggatgaccactctcgatttacttggatttatcttttgaaacataagtctgatgctttaaatgttattcctcaattcttagcttatgttcaaactcaatttggttgcatgattaaaacctttagatctgacaatgctcccgagctaagttttaaagatcttttcttaaaaaatggaattttacatgattttacttgtgttgagactcctgaacagaat

SEQ ID NO: 97511 - DNA, 545 bp, Cannabis sativa
tatgtctaagaaatagactaatgggaagcaactatagcactctcttgataaattattattattaataatatggcatcactcaataaaggattaggccaactcatttattaatggtgtatatttgacacaaaactgctccaatagaacagttaaataggtaagtaattaaattataaatattttttttaacttttaatgttctggtcagaagttaaaacgaaaaaataaaaaacagcatttcagttctaaatttcaacactaaaatacaattgtactcaaacattatatatacatttcactatttcaaagaaagagatgtatattccttaattcttttcacaagtattttcttcttttttttttctgacaatttcacatgatgttctttgagaatacaaaatctttcaaaagtgatccttcaaattaaaataaagaataaaaaatagggagtaatttgcttttataatccatagtcaatccatctaacaatattacacttttcaatccacccaacaatattacagagaaaaaaaaaaaaaaaaaaa

SEQ ID NO: 97512 - DNA, 627 bp, Cannabis sativa
ttaaagttatgatcctattgtattatacgcgactatttttaaataagcaaaaaataattatgtagaaaaaagctctccaacaatatccaacatctcaagaatgtaaatattttcaaaatacttaaagtctatataattaatattttgatattcttcgtggttaagattcacaaatgatcaatttgactttaaattattattttaattaatattattctttttaggtctaatagcataggtctagtaaccaggtacagtatagcaaaacattacaatgaatatatatttgtaagtttactatagagctaataactcttaaaaaataaattaataaacggctaatgaaattatttgtatgacattattatgttttttttttttcaatatatatcaaaaattaaaattgatattggttgattttttttgtgtgaaaagtcgttccaaaaataaaattaaaaaatgaaaagaggcttagatatgtattagtgggatcgataatttgaatcactttattattatcttttctcaatccattttattagtgagtggattcaattcaaattccaaataattttattgtgattatagtaaaacgacaatgtcatttcaaaaacgacataacacatt

SEQ ID NO: 97513 - DNA, 1380 bp, Cannabis sativa
aacaaataaatatgaaaaaaagtttcaaatttcaacaatacaataatgagtgggtttggactggaccttcacatattggacctaaataaatataaaaattaatattttaataatatgcagtgcgtcgcgatttgaaccgcatattaataattcaaaaccgcaaactgtaccgcgccacaccgcgcggtttaggaaaaattcaaaccacgaccgcaccgcaaagaatttcaagccacatttttttttgcggtgcagacagtttgagcggtttgatgaacactcctattacttaatcacttatatcatcattttactgacaccgtgtcattgactaaaaatgaggtcaacggtaggtgaggcgcaattcaatttgtgaccgttgtccgtaggggtgcgtatcacttgatggtgactgctgggcgtgagctgcctgtttgttgtgggatgtcagaatcatggcgttggacaaaaagtgtgatcttcttttttgctgcgggcctttctaatgtttgacacatgagacagacccttagtttcttcgaattcttatttggggcatacaacgtatgattgtttccaaatagtcggtgctccgcaacaccctttcaactactctttctggatgacccctgagggtctctgcatgtatttccttgggataagttgagaaatacctttttttgtatctattaatcaaaaataccttcaaattatatttcaaatatactcacttttatgagtgagtttcccaatacaccctcactctctactttagtttagcacataatttgcattgatctaagggtataatgaagatattatctataaaagtgggtatattttaaaaaatatagaaatgaaggtaaaaattaaaacatgaagtaaagtgggtatacaatgtaattttctacatttccttggatatgtgataatttgaataagcctcaacctttcgcatctataggtttgacttaattgttgtgatagagtcgtggttgaactatatcttagtctggcttcgctcactgactgagccattgaattatttgggcttagtaaataggcccgtaagctaatgtggaatgctaagaatttggagtaagttgaaatatacctgtttcatcagttaactaaaactagcctcattttaagggatgcacacggggcagggaattggcggggagtgctcccctcgtccccatccccgttaaggattttaatccccatccccgtttattccccatcagggatggggcggagaatcccctaataggggcgaggatggggcggggaattccctaatagaaaaataaagtttataataaaatttttaatatacaaaaatattaaaatatataagaattaaaatattacacatta

SEQ ID NO: 97514 - DNA, 588 bp, Cannabis sativa
  modified_base (26)..(29): a, c, t, g, unknown or other
catggaactcggtgtttggctcagtnnnntcacaacttagtatgttagttttgtgggacggttatttagacattagtaatgttgggattggtccggaatttagaatttctcaaaatcccctttagtgccctttatgttattttagtatggaggggcaaattggtcattttgccccattgttattttgtgctttagtggactttatgttgtgaaattatgtgattttaattgctatttgttagctgaatataaagtttagttatacatgatatcttttatttcaaattggaaaaattagaaaagaaaacaaaacccaaatttcctctcaagtctctctctctttcggcctctctttgagcaacaaggaggtgttgttctccttggaatttcaagctgattttagcaagatttttcgtgttctcaagtgctttgtatgatccttgtaacattattttagttttcttggtttttaagaaaagttgagttttgcgcgcttgagaatttgtggctgtagttgttgctaggttttaattttattttctgtagtttaattaggtttcaatatgtggattcaagcaagtttttgtt

SEQ ID NO: 97515 - DNA, 520 bp, Cannabis sativa
atgtgaatctatgtttatttaaagcccaataagcatatttagtgttgaaatatccattcatagatcctttccaaaacatatccgtatatcggggaggaatatttttactctccacatcctcaggtcgaaaccaagaggagagtttctcatgatcccataaacacttatcgttcaagagaaaagaaactttgagagaaggctcaacatactcccatacttctagtcgtagtacgttctcatgcttttggtcgtagtacactcccatgcttctggttgaaatacacactctcatgcttctgatcgtagtatataatctcatgcatctagtcatagtacatactcctatgtatctagtcatagtacatactctcaatgcattaagttgtagtaactactctgccatgcatcaatcacgaaaaacacaaacgagcaactcgtaatacacatgactcaaaacatgtacccccaacttgtatgttataaaagaaatgcttggaaaggtgccaaagaaaatgagaag

SEQ ID NO: 97516 - DNA, 718 bp, Cannabis sativa
gaatgctccttcttttctgaagaacattgtaatggctgaggctatttcttaataaaattcctttcaaaaaaaaataaaataaaaaataactaaatcaaaatctaaaatttataacccacccaaatataattaatattacactattcatcgaaacaaatcctctaaactaaaacatattcatacaaagctgaagagtaaagaaaaaaaaaaagagcaaacaaattgatgcagtacttttctaaagctaataccaataatttttcataatcaagcaaatcaatttaaggagacacaattaattacatcaccatggctaatctacaccaagtcatttgaatcaatggcaaacattaacaccatcttgtgtccactctcaaagttactaatacttttatacaaccattaatttcttagtaaactagattcaaagtatgagtttttggagttagagaaatgaatctttaaggctttgttatactacacaactaccaattccatcactgcaaaacagctcaaatcccacataaagccaagctaatgcttcatattatataaaaattaaaaactcaacatacaaaatcaaagcttgatttgagccaataaacccaaaattgtacacctttccaaatgtatagaaaatacaatatatacatgattttggaaaattagtcacgtggctgttgtcccaactcaattcatcagtgacacgaagatgaat

SEQ ID NO: 97517 - DNA, 736 bp, Cannabis sativa
  modified_base (50)..(55): a, c, t, g, unknown or other
aattgaattgattatttggcattttatttgatatgtgataatctgaaatnnnnnnggcaatatttgagtgtgaaatggcatttatgcccttggaaatgaatatgtatattttatagccctaagggcaaaatggtcatttgaccattattgggttacattgaatttaatggatttttagagaaattgaaatgtattttctggtattatccctctctcacccgaactctctctctccctttaaccctttccattttcaaaatttaattgttgagaattgcttgaagttgggtgtgaattggagctttggaattgtggattcttgagcttggagctaggtaatttcttgctgagtttatataaagatttttagtgatttctcttgctgaattttagggtaaaaagcatattttaaattgttgagtttgtggggttgcatgttcttggtgtttggttttaatcttggtgaattgttcatggaattgcatgatttggtgggaatttatgttgttgatcttggaatatgagtataaggtatttttcttatagtggaaatatgttttaattgtggtattttttgcagctgggaatttggatatatttaggttgaagttcatgtgttgagctagaactttgttggtttaaatgcatgattttgaattgattgtgtaatttgaattttgagagttgttgtggttgttgtttgctctctgtggtgatgatttttatctgtaagaag

SEQ ID NO: 97518 - DNA, 521 bp, Cannabis sativa
gtaaaataatttccaacagccaaaacaatatggtgattctgaaagtgccatggctccataatgagagtcattttcttatctcctgggcacctgaaagtaaccataaagagaccagtgtgatgatcagagatggtaactgggtaacgtcctttccaatggccgcacattttgatgtgaaatgttttgtgattaatttccttggaggacagtacgcgagcaaagagtgtgatatcatcatttccagggtctcttaaattgtctgaagtcggaagttcaaggacatctctctcaagatcagtaagagagatagaaggccgattagaagaagttcctttatgcatgaattcggtcattagaagtacaaagaacagggataagtcgaaggagataggatgaatgaaacaagggaaatggaataggaagagataaagtcagaaggaaattgaaaaaaactggaagaaactggagaaacctagaaaaaaactgcaatgaaacagttgaaaaaaaaattagtgttgaaa

SEQ ID NO: 97519 - DNA, 3243 bp, Cannabis sativa
taatgaacataaccattagattctctagaagcttttgagaaattacaaccaacaaaacgattaactaaataaaaataatttgtcacaaagctgtcgatctcccaacgataaatgcttttgcttagggtcttgatcacaatttctgagacactctcaacaatcacaaattggtgagacttaagtaaagcagtactaagagccaacttaaaaattgaagcttcttcaagaaagggatctctgaacggcatcttattggttaccatctagaaaatttttgcgttatgatttctagaagcaataacaaccatcataacattaaaactaacagcaacatcacagtttatcttcagccaatcaaccgaagtaggggtctaacccaactattttggtttttcaacatccacgaacaaggtcaaagcatactctacaaaggtagacataataccattattacaaacataaatgtcaaccaatttattttcacagaccttgtcattatgatctctccaaatggtgtcaacgacaatagatgcaaaaaggaaggtgtcacgagtggacactccccttgaatgaaaactccaaaaaaaacttgacccagtcccaatatattcctccactttctttaatatgcattagaccccatggggaggttctccaaatgtgaccagcaaatctacaatggaacaaatgttccatggtttccacctcaagaccacataaagggcatggtcggtcctccacaaccatacgctcaccaaaaattcctcaaattggcagcgagtttgaaaagatactccaccaaaggagtttatgtctttctaaaaattttcaagttccacagtttatttcaaacaaaaaggcccatagtacagtgcggaggacactccaaagcttggattaaataggcaaattttgttgtaattttttgttgttctccttacactagatccaaccatcaacccccaccccagggagtttgccaagccttagaatattgagaacagtatcacgatcataaagatcttttaacttttacaaattccaatccccttctaaattaatcaggtctaccatggtattgcacccatctctacggaaccctcgcggttgaggacacttgttttggccatagggaacccatggatcctcccacatgttgatagaggttccacccctaatagctttgcatgcactttttgaaagaatctctttaattttgaccacattcttctaaaatcaggagtccgagttacggtaattgcatctcaaaaagggagaacccttcaagtatttagctttcagcacattgcactagagagacctccattcaattaacataaaccaaccccacttagccaagaaggctctattcatctctaacaattttctaaaatccacgcctcctcgagacattggcaaacaaatcttgtgccaagtttttttcatcacctttaggtggtactgacactattggtggtgcttaatagcaatgctaaaaaaaattattcatatattacctctctctacatttgttacaattgcttttcttcgactattgtcgttgactatttctataatcaacaatagctaaatataccttgggttgtgtacttagtatgtgtgatgacaaggttcgagctggaagtgagctcgagggagagttgatggcactaaccagaggtgcaaacatcattgatggtgagctcgtttcggcttgcccattgaacaagaaagtccccaattagaacatgttttttgctttacttaatctactatctattgtatttgttgtagactctctttgttctattatttggtctattcaagcatcttctatagagtgttataaaaatggtgtatacatatatattttagtttatactcataaaattgaacttcaatagtagtatataatgtggtttaaatttggcacatattaaaagtgccaaatttagcacaaaatataggataaatattattttagaccctatgttttgcaaaagttatagattggaccatctgttttgctaaatgacaaaataaactttatattttctaaaattgtacaaataagaccctgaattgattttttttgtcaaaataaaacttaataatgttcctacttagaggtgttatgacaaaattgtagttaaattttctacatctgttcgtgttaagaattgtcttcaagttagttatattaaaaaaaattatcgaaaaattgagctcaggattctatttgtaccatttctgaaaatacagggttcgttttgtcagttaacaaaatagatggtctaattgataacttttataaaacatagtgtctaaaatagtatttatcccaaaatataacatgagctaaattttatccataataaatattttttatttactcttttgctactcaatattattaataaccttttacattttatttatatatttaataggatttttatttatttttaatcaaaatttaatatttttgttctttttatacatatttttatcaaaaatgcattaattttaccataatacattagagtacaattataaaatttagatcaaatacaatattgatttattttttgaattaaatttaacacaaattttacgactctcattctcttgctaagtggagggggggtgtttgtaatccttgttttggctttttaagtttatgagaggtgaatttctatgtgatcacctagaaattcctatatgatcacctggaaataaaaatatgtacctaaaatatgccttctttcatagtattattattatgtatcagtggtgctcaacactttttataggtggcgtttcacaattgattagcgatattccttaaaaattattttcttaaattatataagaccaaatacttaattatactaatagcaataatagtaccttttagcaattttctttctttcatcacctagacaaaatgttttcctttatgtgattgtaaatgataaaaactatattccattagataaagaagaagaaaaatcaaaaaagcaaaagtgtaaaagttgttgattggctttaaaaaattagaaagagattgataccatctttgcttaaatgttatttaaggtacgggttcttttttctccattggtactataaagtctcaactcgactttaattggttgatcgaccaggctttatattagattcaatattgatggacgaaaatgatgtaatcaaatattggattaattttcatttgagcattgc

SEQ ID NO: 97520 - DNA, 541 bp, Cannabis sativa
taagatattatatatggatttttacacttttccagaataatttctccactgccagagtaatcaccatctcagacattaaattttgagttgatgcagatttaagggttcaaaaaatatcacccctatcatctaacatataggtcacttttaatctagagattctttctagactgtctccttatgttctcttgttggattacacttttgatggctcccactcaatagcagatgtctgatttaatgcatacacaaatgtatatttaacctcttaccattagtactaagggacatcttattatgacatttatcttttctggattctttaccttcaaggtattatttcagtttgtggatttcgattcttcgacctaaacttttgtatagacatcattttctctttttctttttttttttctaggaaagaaatctcgagtttctacaatggggaatctaaatcgttcatgaatttagaaaatgcaatcttccattacacattacgaaaccggaaaatgcttattcgagaaaatgaaataattttcta

SEQ ID NO: 97521 - DNA, 684 bp, Cannabis sativa
caagccttggtcataacagtgtctcaaactgagcaaagaatagcgaaactactaagagatttaagcttggaaagtagtttcttatataaaattatgtttcactcctcagtaagtgctaaaatttcacattcctttaagtttctcttctttgacaaattctccttcaaatatttcaagcaagttagaatttttttaagcgcctcggcaaataaattattgatgtgaatactgtaaaagacttctaaaatttagaaaattgcttgtcaagtgtcttcttttgaagccactaagagtataaaattttgatgtgatgataaatactcacttgtggctgcttcttgtcaagctccacaataactttttcttccaacttcatctcattctcaacattaacctttggctccgacatagacttcttcattggttcttccaactccctaccactcctcaaagtgatttcatactgctctttaggattcagctttgtagtactaaaaaaattgccttgaactcaatttgtcaactgaaaaatttgagtctctaactatgaatgtctcaatcataaattggctagattgagcatcaagttcattcataatataaattaccacacttatcattcttgaaagctactcccttgaaattctaaatctttcctttcgataccaaaccttataactcttg

SEQ ID NO: 97522 - DNA, 721 bp, Cannabis sativa
aaatccataagtgcggtagtaagaatgtaagtaggccgttgcctgacccggctcacttactaactgacaggttagtcttatagaatggacatctggtgtaatatggagagtctgagtaaagtggccagggatagtaacggttggagagaatggagtctgagttgtccccgtaatcaaggtgaaagcccttggagggcttttgacgggagtgatggttatccgtcacaggctccgttggatttggagcaaaggtttgcaaaaatggaagttgtgattcaacgacatgaagaagagattcagaggttgaaacaacaaaggtctcctgtagtatctttaccgcatatgccaatcatttttgattcggtattacctgcgaagcatggaatggctggtaatcaagtggaatcattgcatggaaagatttggaaccatgaatcttcagtctttcagggtgattcaaatatgaagagcacttcttgggctgaaagccctgagaaaattattccaagacctcaggagattatggcagaaggttaagatattacctgcctgatttcaaattatggtggaagtggtaggagctccatgattgagcggaagaggaaacctacgtcatcagcggtggatttaagacagaacaagcagttccgaaggtttcaaggcgaaggaggatgccagggttattcttaccctgagtgcccacgttgcatgaaacaccatc

SEQ ID NO: 97523 - DNA, 4419 bp, Cannabis sativa
acattaagaaagagagtagtaattagcattaaccattaggtaattaaatcaacatgattcttttccctaattttccatctttgattaaatctttttattgttgaattttattttgttgtatttcttaattttattgtcataaaattattagtttgccaaatagaaacataagtctaattttatggtatttagttcaattccctatgggatggacctcacatgtgtgagtactacttgattacgtgcacttgcgtattattcatattttttgtaatagtggcgtgtgacttttcatatagtcatgttcaaaaaaagtagcatttgttgaaacaaataatttattgtcttgatgactatacaaataggcaccacgagtctcatatggatatcttacaaatatacacacttcagtcttaggagcatgcttcctagacttacgtttaagaacatgagcaggacaaccaaaaatataaaaatgtttcaaagtggattttttcccattccataattccattggagtactgcttatgctcttcaagggtactacattcaaaatattggtagtcattagaagtgtgtatccccagaagtccagtggcactgatgagtaacacattatcgatctgacaatgactaacaaggttcagttttcttatttttgcaacatcgttctgctgaggtgttccagctgctgtaacttaggataagatccattcatccaggaaatactctttgaattcgaaatccaaatacttgtcaccatgatttgattgaagtgtatttaatgatttacctaatttcttttttagtcatagccttgaagtctttgaacattcaaaaagtttcaaacttcttggccatcaggtaagtatgaccgtatctagaataatcgttaataaaagtgacaaagtattcataactaactcgagcttcaatattaataggtttgcacagagtaatgtgtattagctcaagttgtcctttggcactattgccttctgcaaaaaaaaaaaaaattagtctttctttatattttgccttctagacaagattcgcatatcagaagagttccaacttttagttctctcaaaggaccatcctttgttaactgatttattctgtttaggccaatatggcgtaaacatggatgccacagatatgtttcatcatcactagaaatcttctgtctcttttttaattaaggcaatgctactataaacaattcattatttaaaattaattactcacttagcttgagcacataaagtccattactttgttttgtagaataaataggcgtaccattcttgaaaataataatatcattattaacaaaaccaatattaaaaaattgttcatgcaaaagatataaaaaaataatgttcctgatacattcatgattaaaataaaaattgttcaataaaaaattattattaaatttcaagcgaaattcgccaacacccttggtagagacttgtgctccatttgtcacgtgcatagtcacctccccatcgaccatctccctttacgatttaagtatatgcatagaagaacaaatagtggctctagaagcaacaatccataaggatttatcatctttctctaagttagcttcaagaatgaataaatcaaatttacctttcttaagctgaaagagatacttgttatagtttcttctagtgttccattatgccacaatagaaacactagcctttctcctttttgtctttggacttgagactagctttgttcttcttggccttgggtctttttgccttcgagcttgccactactgttgtccttactgttccactttcttttcttatcagaagaagaaggagagttggatttttcttcaacgatgtttgattccccttccttggacttaaccttgttaaggttttcaaatacggtcaactcattcaataattcagtcatgttgaactctaacttgttcatcacatagtttgtggtgaaagccttgaagcaaagagatagtgactcaaggatcatagacacttgagtcttctcatcaatgatagccttgtgtgtcgctgcctaatgaattagctcaactgtgcgtaatacataagatcgtacagggacacccttcttcatcttaatattcatgtagctacaaatagtattatgtcttgtttgattagactgtttcccaaacatggcctttagaaaatttattatttgagatgcattctctatatgttcatgcatcttacgcagaatatcgttcatggttacaatcacgaaacatttggccttgttgttagattgaattcaagcatcatatatgtcccgaatattctttagggcatcagcagtgggctccttaggacgctcctcagttaggaaaaatttgtgattctcacaaaccagcattaaatttatattcgatttccatttataaaaattatcaccattcaattttttaagtgctagtatagtaaggagatttggtatagtaaacatgacttaacataatgattaattgtcaatagtatatatcaatttggaattacaataaacgtgatggatgagcgcataaaatataacacacaaaattttgtttaagttattccacgataaaacgctttgataattgatcgccaccttagggttggtattgagtcaatttcattaagcttatgagaaaattctcatctttattattttaaaacctaaatatctcatatttccttttcaaaatataaagtgccaattattgaccaagctaacaattaactactatgaagcttagttgcactttgtgattgtaaggcattatttaagatttcatgacttaacttagtgtgctgccttaagggttggtgtcacactaaaatatatcacttcctctatcttagtcaagagatcaaccttgagcaacagtgtagacacatacttcctttgggggacgaaatctaagtcgtcttaaagccagtctatattccatttgtgttgaccaataatggaggtcgtaagttacattgacatatattccttctcccactcactattttaggttaatgtgtttgttttattatgttttagaattaatacatattgactactttaataattatgattaatttatttataataaaatgcttaaaatataaataaatttctcgtcataatcactaaatctgaattaactatttattaattcataatttaaaataattataaattaataggtaaatttttaattaccaacttaattctaaattaatcttatccaatttacatgcttttggtttcaaaaatggtaaacacataaatacataggacaatcctaatatatcatatttctactatgagatgcatgatgatgtaactgtgtgaatttttatgtatgacacatgttattcactactgcatgagcatattattaatcaataattaatgaaaatttatttaaaagtaataaataaacagtaattatgaattgggtaataattgagtatttttaattttacaacctttaaaattaaaaaataaattacaaaactaatatatatatcgcaacaagggcattttttataatttcgtaagatcgacgtaagcctccaaattaattaaaataattttcattaattattcttaaattgtgtttttaatataatatacattttaaacctttttaattaattaattcttaaacaactctttattcaacacagtataattaaaattaaaattttgttttaaaataataacatttattatttattttgagttaagataacttttgtcttaatttggttttaagtttgagtttgaatttcgaacctaaaattaactatatttgtttaataataatatgaatttaaaaaaataaatattctacaaaactttattattttgacttaattattaaaaataataaaattattttataatatattaagaaataattaggatagttattattttgaatttagaattgaaataataactatgatatttatttagaattcaaatctaaataaatatcttaaaataaatttaattatttatattaaataattagtagataatttatagagtatatactaaatatacactatatattatatatacattatgtatacataatatatgtatgctatatagctgaaatatacatacacttaaatagtcgggtaagagaaggattggccaccatagaccaccatggctggcggaactgaggagccaccatggccatggaggccatgaccgacctcgagtgtggtagtgggggaatgaccttgtcaaacccagccaagacccaaacgggtcgatgacaacgacagaaccccatgaccctaatgggtcgaaccctcttggcacgacgtcaaaaataagggtccatagctcaagtcagtggtgggaccaccgtggtgaggaccaaaggtc

SEQ ID NO: 97524 - DNA, 809 bp, Cannabis sativa
cttatcactttattacttgtgtgactacgtatacttgcatacataattttcacaactgaagaggacataccatggaggttcctgaacagaaagtcatagaacctcgtcatagtgggaaggtttctaggaactcaccctgttatgacttggatgacactagtgatgacgattcattgttagtttaaataaaaaatagatagtcctaattgagaactaagatttgaagccaagagaactatggtttaaccatgcatatgggttaaccaaaagttatcaaatacaaggacaagaagagaaattatgttagtaggtctattcaatggacttaagcaaacttctcattcttagtatcataggtttaagatcatcaaaactcatggcttgtggtatgcctggtaatttacttactctttcgcaagcatcttgcactaataagatgctaaagcactatctaatggctaattctaaaggaaatcacttgatttctaaacatagagtttacttatctaaggaacaacttaaactattctaaaaaagataaaaagtaagaaaataatttcttaagcatcaacaatgataggtcttgtgtatgcttcgttatgcaccagactagacacttgatgttgagagggagtcatgattaggtattagtttaattcagaataggaatattggaagacaatcaaattagtcttaagattaaacaggtgctatatgttagtctataaaccctttaggctacaccaactcaattttttagatttgcattaacgctaaaatggctacatttgggatgatgattactcttg

SEQ ID NO: 97525 - DNA, 568 bp, Cannabis sativa
ttgaaacaattaatatggtattagtgttattacatcaatttcttcattattatatacataaggattatatagtattgaaccaattattaaattattgttatttaaataggagtgctaattataattttttagtcaactttcacgctcaaaattaaatgttgaaatattttttttaaattttttttatagcattattcgttatagttacaatattattcctataattttttaaaaaattataaatagtttacaatgcctaaaacagagtttttgatattctattatatcacgcgcatttaaaaaatttaaatttatttttggcactgtaaactatttaaaaattttcaaaaatttataagaatgatattgtaaacataaagaacattattataaaaaattgaagaaaaaaaaatatttcaattcttcaagtacggagattgactaaaagattataataagaagttgatgttgcatgttcttaccttttattttaatgaattatctaaaacaataaattaaaaaaaaataatcatactaaagagatatagaaaacagaaaaaaaaaaaaa

SEQ ID NO: 97526 - DNA, 589 bp, Cannabis sativa
gatacctcaactgatcccttgcaaccacagccgcacacatactgtccaaccccactctgatatcgcaattcagcttcaaccaatcctgcgggggagggcgccacgcttccgtcgggtacggtatgggacaagggagcaagtgagcacgatgatcaaagaagtagcatccacgtaatattattttttcttaagatttttattaggttatagtgtccaacattttttaaacacgtttttcacaattggttaatgatattcttaaaagttatacttaatatttaattacattactaataatactttttaacaattctgtttttacttcatctaattctaggctggattttcgagtagactactctatagactactatagtttatatacaacttgtaataatttatatttgatttgtctggcaaatggtggacttttagtattaaccagctacataatataatgcaccagcctgttttagaatcccacgttttttaagaataattttataaaaatacaaaaataacaaaaaaattataaaattactatctgtacagaatttttaatattttttataattttatttacataaaa

SEQ ID NO: 97527 - DNA, 507 bp, Cannabis sativa
  modified_base (287)..(294): a, c, t, g, unknown or other
aaaaaaaaaaaaataaaaaaacagatctcataagcacaaactcaaacattagaaccccagtaaaacactaaaattcaaacattattgaaaacacatacaataaaattcgaatccagaacttaacacacacatcagaataataattaaataatgaataaagatttatgctactattttcgaattctgatatttattaccaacaagtttaatattattagtatttatgtcacaaattttttaatagtaaaattaaattttgatataattttactaagtaattattattnnnnnnnntacataatttattttttatatataatttaaaatattttatacatctgtcgcgaagcgtgggatgtttcatagtttatagtaagctaaacgctaatgaatgtcatttattttaaataaaatgtaagaaaattacattaaaacaatttaaaaaaaaaaattataaagtagggtcaaacccgaacaaagcgcggcttaattttcttgtataatatc

SEQ ID NO: 97528 - DNA, 1131 bp, Cannabis sativa
  modified_base (26)..(32): a, c, t, g, unknown or other
cataaaaggaaaaattattttgtcannnnnnntgccaaaaaaggactttacaattctgataaagttttgtctcttcatttttatttttgagaaaaatctcatttaactatcaaattgattaaactattcaaggaattatgcttatttagcattattataataaaatactatcaaaattgattaattttgagagaaatttaattcttgagcgtgagaattattgttttaatttttaatcatccaaaattttaagaataaattgagaactattatttttactagacattaactatgtataactgcaaaataattttagttaatagatattcttttataatcaaagtaccaaatataacattatataataatttattaaaattggagtacctaacgcacattacggagatatgacctataaaattagatataattaaaaaaaaataaaataaaatgaaaattaaaataaaaaaataaagaataggtataaaatataatttcttcaaaaaatttcctctttctatgtttggtttgtttctagaggtcattttttggtagtgtaaaaatttgaaatctagttaaataaaatttattttcaacatatatctctttattttaattagataatatataaatctaatacattcaaaaaaattaatataatttgttactattcaaatgtaaaaaaataaaagaaaatgcaaataattttatttaattaaaataaaatatattttttttttcttaccgtttagttagttataataataactaggttgatgttacgtgcaatgcacgtataattaattttttttttaattatatttaattaagtattgttaagtacaatacataacattttggttgcctttgaattagttcatgcaattaagaacaaaacttctgggcgtcaaggcattgtatctcttaagctagacatgagttaggcttttgatagagtagaatgacgtttccttgaagcggtaatgaggaaaatgggcttcgctaacggttgggttacacttattatgggctgtctttcaactaacagtttctcttttcttgtcaatggtgaagtcacgggacacttgattccaactaggggtttgagacaaggttgtcccttgtccccgt

SEQ ID NO: 97529 - DNA, 504 bp, Cannabis sativa
tttgcagggaagaaaaggccttgtccaggagtgctctttaggtattgtaagatcatgttagtggcattaaggtgaggaactcgtggttgttgcagacattgactaagatggttaactgcatatgtgatatcgggcctagtgattgtcaggtaaattaatttaccaatgaggcttcggtatgtagtgggatcaggtaagagagcccatttatctttgttgagtttgaggttgtactccgtgggagaggaagctggtttgtctcctaagtaccccgtatccttcaatagttgaagggtgaaagggcgttgagaaactgatatgtcttgtttagtccgagcaatttcgagaccaagaattaagatgattaccagtagctggccgaggcagtgatccattgatgaaggctgtcttattttttgcagcaagggccatggtgatgcctcttttccatgatttgtagttagtgccattgaggatggaggagaccaatacaaggcctggatg

SEQ ID NO: 97530 - DNA, 788 bp, Cannabis sativa
atgttcttgccactagaggtctggccaatacttctagggctggcgtgcgtgtttggcaagtcttggggttgtacaacaccctaagactacctgttgttgactttccctatctgggcttatccgacagcttcttttagttttatgaagttgtctactaatttgaggaactctttcatgttattggttgagatccttcaaatatctttccagaagtcagtcaacggaataatgccccccaatatggttgtataacggctctcttttattaggtctttgaccttgggggccttggccataaacctttggataaagtccttcaaaggttcaccttgtcattgtttgacctcaacaaggtcttccaactatgatggtattagtcttgaggacgagaattgagtgtagaagtaccattgttgagctgttttcgacaaagttactgggaagatctgacactagacatcaccagtaaccttatagagatcagtctgtatctcgaagtacttgatgtgtgctagagggtcttctcgcccggtatacattttccataccgtcatcttgaacttgggtaagggcagggcattgatgtacactaaaatggtgagccccttgacctatccagttcaaggtcaaatggtttcgggtcagccaagccctttatcatgtctcttatttgatccaactgtgcttgcacagaaggatctgatgctgcgagcctggtagattggcctttcttgattgggatgcagccctggattggtcaggaccttactggccatacccaaggaaag

SEQ ID NO: 97531 - DNA, 560 bp, Cannabis sativa
tgattgatttcagtgggtttctttaatctttttcggttgagtaaagataatagtgagaatttggtgatgagagatgttgaatttggttatgaagtaatatggaagaggtggtcacgattggtcttttctatcctttgagtttttttttatttgtagccttaaagttttgttttatgctcattagtgcttttgattgatttggggttctcttcttttattaatttttattttggtttgtgaaggtatggaagagaatttgcacagagacaactacagagctcaatcttcgtgctgaaaattggaaatatcttctgcggtgaacttaataaattaattttattatactttaataatatcatcggttattagctcttttaatttctaatatattgatgttttattattactattagctttattggttttaatatgcttgtttgtttattcactctcttcacatcagtactggtagaaaatttatcttctgttatggggttttaaatagttcaattgtatggatgaaggtttttccaattaatcttgctgaaatgatgcataca

SEQ ID NO: 97532 - DNA, 1809 bp, Cannabis sativa
cgatttcagctcattatggataatgataatatgaacttgagcaaaaggcgtaaaagacatcatcatcatcatcaacaatggtggatggaaatgatggtgaagacagaatttcgaaacttccctaattcagtgatcgttcacatcctatcctttctcaaaactgaaaacgtggttccgacatgcgttctttcaaagcgttggaaatttatctggtattcagtccccacaatctttttctccatgactggtctctgtagtagaatggacaccgcacagtatttggaatggcaacaggacccagaaaagttctacatttatgttgaaaaatatttggaacaccgtaagaaaggtatgtattttatagaaaattcaattttatctagttttaagcttgaaatgtttggttactataaaaaaagtaaggctgggattgtagataaatggttagcttttgcagttgagaataaagttaaggaaataaatcttagcataggcagagacaaagacaatggaggttgttgctactgcttacccaaaatacttgtcaatgcaacatatttgactattttggagttgtgtggagtaggattgaatacttctcattcatttaatttcccatcactaaaaactttgtcattggaatatgtttggctttcccatactgcaaaggaggatgtggtagttaagtttttgttgggttgtcattctcttgagaaattgcagttatgtagatatgaattcttgcatattgatggtaagcttcgactgggaagcttgagccttaagttcttggaattggaacatacaataaatgttgatgacataaaagttgaggccataaatcttgaatctttagtactaaggggtgcttcggtttgcaatataaatttctctgcttgcaagaaaattagaaatctcttgttagatgatactagtgatgaattcgagccattgttacacactcttcttgctaataattctcttcttgagaatttgactttgatcttccatcattcacatgagaaccatctcaaaatctcgggtaaagagttgaaaagtttcaattttacgagttcttactttggaccgtgcaatattacgattgaatcagccccgaaattagcatacttttgttacgaaggtcatatggatctaagcatatcaacagagccatctatttccttgagtggaaaaattgtgatacttgagggggagactgagtatgtggatgatcgctatgatgcggcctggtttactgatatgttgaattttcttttgaatctcaattgctcttggaatactattagcctacatgttgtggaatatgaggtaacttgtattatgtttttatttttatttgattttgtagccttattttaatgtcgtattgttaatctattcactctaaagtgatatgtgtttatatgtttccatgaaggctctcatttggccagaaaagttgaaaagggtatgtcgttctctattgcttaattggaaacatctcaaagttattaccaaatgtagtaatcctaaaagaatatcggatttgaaggactcgttgatgtggatttcaccttctttagaaacattgtctattaatgaaaaacatatattttagttgctttaaaacaaagtaactgctgattataagttcaagaatgattttttttctattagttttagattagaaaatggtatgtagtcccgtatgggatcgtgtttattttatcagtagctttgtactaatgatgaacttgactacatgagaatttatgcaactaatcgaagcagtttcccaagtaaattttt

SEQ ID NO: 97533 - DNA, 667 bp, Cannabis sativa
tacccgaccacccgaaactcgggttcggttacacatttcaaacattcgaaatccgaaaacccaaacccgaccacccgaaaacccgacccgtgtgcagccctaactggaacaacatacaattagcattaagcaataatctaaaagttacataagctatgtgaatactctcgtttcacatccaaacatatgtctattcacacttctcagattttgtattgagatcatagatcatgtataaggtggtcaatcaaacacatgtaataagcacaaatataaataaatcaccataatagagaaaggaagaacaatcaaataacattaatccatagaataatctccgtcaatatctatcaaatccctgaatagagaatttagctcataatcaaatccatgataaaactaaacacaaataaaaacataagaaatcaagataagagaaagaaactacatggaggattgtcgcggatcgcccatgctcgctccaagagccttcttcttgtgtttttagggttccatatggtctcccctctataattcccgacccctttcattaaatagagttttttagccaaaaaacgagaaaagacgaagttatacttgacttgtacgaagtcagcgccgcagcggccaatatccttgtcgcggcggttgtagaatagtgaaaaaa

SEQ ID NO: 97534 - DNA, 1798 bp, Cannabis sativa
gaattttttaaaaatttataagtactctaaaataattacaatatccgtgattataaaacaattaaattgaatttttttattaaatgacaaaatagataaaaaaaatctactaaaacaatcctataacagtctactaaaaaatttccaaaacaaattataaattaaattagatttgagattatactaacaaagttatactttaagtttaagcaatataaaaggtataaattaaatttgtattgaaagttttatagtgtaagcacatgttattacatgtgaaattaggattaattttatatagataatatatatttattggcaatgagttgagttacttgtattgtattccaataaatttcttttcaatgataaaacaaatgggaacaaagaataaagtggaaaatgaaacttattatgtaagcattaaaaatacaagatttaaaaaaatttagggaccccaaaaatggtgcactcttttcctattttttgtatttgataagtttgtaatctcatttttaatatatgatgatgtatattatattacttttttttattataattatttaaaacatttaacaaagtattaaaaaattcagaataaaagtgtataaaaaaaacacatgagcaacaacctttagttatacattgttaatatatataaaaaattaagattaaagaaaggaatgcatcattaacatagaattttccaatagtttcatttttgttttttacttaaccacaaatttaatgataaatgactatagtctataggtgacattttacaattttcaaaaactcaccatacttagtctaattgagccaaaatccatattaacaaaaaagcattatactaaattataatacactaatcatatcttccaagttttgtgagattggtagaataaaatcagaggaaataaaaaacaaagacacttttttttattagtacaagaaaagtgataaaaacaaatgaaaaatactacatgaccaccttctttatttaaaaggatacacaataaatcctactttaaattttctttttccctaattgaaatataaaataaaaataaaaataaatgcaatgactaatttaattatacaatctgaaaacaaatatggggttgtgtaaattgatgaaatttttatcatcagcttcttcttctagtgactgtaaatatatagattctcttggttcttcactcactccactctgtgttgcatactccattgccatctcataatccaccttcaataaccataactcatttagattttccattttatcaattctaaaagcgagaaaacaaccgaacattcttgttcgaaaactgagcttaccttttcaacatgttgagcaagtttttccctgagagtttctttagtaataatacgatctgaaactttatcgagtaattcagagtcttcgtcgtcatcagccacctttttcttctttgatgcgtgtgaatgcgccatttctttcaaaacctcgtatacagcactggtggcatccacaatgtacctgtcaattgataacgagattatcagagatcggtatttgaatgactcggtacacatttgagacgtgttggttgaactttacttgctcaaattccgttttctttcctgctgctctcgcgcttgtattttctttactatcttcgatttaagctgaatacaacactgctgaatagcagcctgaaagacaaagaaaataagaaatttcttaatttactaatgtgggtaatggatatcccgaaatttaagtgggtagtttataccttcacagctgtagctattt

SEQ ID NO: 97535 - DNA, 757 bp, Cannabis sativa
tatatacaaattgatcttgggtttattattaatttttctaacatgtggtatcagattgccaattgtatatgatttagaacctataatttatgtaacaactaatatgtatatgttaattttttacaatttcatattaatttcgttattattttttgttaaatttttcgttgtttaatcttaaatgtttaggagtcttattcatcataaaattctctttctattgatatcttatatgactaaaatcattgagtaaattaagagaattttaagattaaacttttagggtttatgtatttttttttatgaaattaattttaggttttttgattctattagttattgactaaaattgattgtgcaaattttattaccaactaatttacaatgtcctctacatgtttaattttcaaaattagatgagataaatatgttgcttggggttcttaaattttcggattacacaataagatttatttaatttcttgcatttatacccaaaattaacaccatagatctcttagaaattcaaacccgaacaaaacccctaagtttccagtcattttcgtgcatttttttggcagaaatttcatcccgatccgtatggatctgatccgggttgcacaaacccgttttacagccatggtggctgctagaggttgaagacaacctgctgggacgaagcccactcgcagctgccggagagtgagagagagtgaggtagttttgtgactctgttttcgacgattcttttttccag

SEQ ID NO: 97536 - DNA, 1039 bp, Cannabis sativa
aaagaaaataagagtgtgttagaaaaaaggaaaaataggaagaaaaaaaaataggatgccacttagactcttcttaggctttcctttatgtatatatattgattgaatagcaatgcacccctttattattttgatgagatgcgattggctagcgatattccgtaaaagctattatattaaattatatgggactcgatacttagttagactaataataatattgacacataagaaagtcctagacaccactgatgctctttagtatctctctattttgatggatactatgatccaatattatttaaaataaggaaccaattcaatcagagaacccaattgtgattttccgtggattcagttttgctaaaggtcactcacattgtgaatgtgctttatcacttaactacaagaagagattcaaccagagtaaattgcggcaaaattttttaaatttcgatacattagtaattagcttcaaaatttattttctgacaataaaactttctaaagtttgtgttctgttagtagtttatcatttacatctatttttaatcattaatgccatagtagactgttaataataaaaaaataaatagaaataacaaagtgtaaataggacacaaattttgaggattttgcggccaaaacatgagttttggaagctaattactaacaaagtaaaaaatttgagtattttactataatttactctattcaacaaaatatattttttatcgcgtgacgtattttaactcttaacttttatttaaagtaagctgcaacgttctttctatagatataaaatactgtaattgcctcaaataatattttattaacaaaatattcactcccttcgtcttctttctctttcattcgtattttttaaaaattggcgccaaaccctcccatactcgtactgttcttgaataatgcttagagatatcccaactataaatccatctcgcttttttgggaaaaagttgttagaaaagttctcattacaagagagaatatgaggattacaatcaaaatactcaaa

SEQ ID NO: 97537 - DNA, 1809 bp, Cannabis sativa
  modified_base (1384)..(1384): a, c, t, g, unknown or other
  modified_base (1758)..(1763): a, c, t, g, unknown or other
aatagaacattgacttgttgactaatactaatgaaactttcttataataataatgaaaaataaagaaataagacacatagacatataataagttataaattatgatgcaacctaactagtagagatgtacattttttcaataggatggggcgtgaaggaattcctcatttaaataaggaaaattgtttatttttgtataaggaaaattatatattatataattggaaaaaacaatagtaactaatttgaagctataaagccataaatgttagtttagtagtgcgggagggatgagaaaaaaggaagggtatgagttcgaactcaagactcttaaattattaattcattgtaatactattaggctatactaaaaaaaaaaattattttaaaaaatactttttttgtcatgatttatttgtcaaataaaactactaatatattttttaattatcaaataaatattaaaaaagaaaaaaacttatcaaataaatacgagaagtgtcaaaaaaatatcgaatctaatactactacaaatgttatattgatattgacttaattaagtatcagattttatatattttaataatttgataattattataaaaaattgataactatttagacgtgacttcttagtatttttgaacaggatgaatgtgattcaacagtggttgtaattgggttaacagtgctcaaggtaatattgttggatttaagaactttttaaaacatctttaaagtaattttttttttcaatatgctaaaatattactatacaccactttttttaacatttattagagatgtctaatatttggtatctcttaatttaattaagttaattaacaaaaattttactattttttttttttttggtgttaattgtaaatatagtagatttttaataattttttgaaaaaaatccaaataattaataatggccgaaatcaaacaaaattttaaaatttacaaaagatttattataagttataactacaaaattataattagaattaatttaggtagcgtttggtaatatttttatttttaaattttttaattacaaaaataaaagtaaaatttttgttttaaaattttgattttgaaaaataaaaatgtgttctataacaacttttgtttttcaattttaaaaataaaaaataaaagtgtgttctacgaatttcatttttatttttatttgtggatattaattaagtagggtcaaagtcaggtccaaggtcgggattggagacggatccaagttcggggttgagttcagtttctaaggtctaagttagggtcgtagtccaaaatattaattaaaaaaagtgtttaaaaaaatattgaaagttattattttatttttaaaatttagattcttaantaaaaaattgaaaagtaaaaacaattttatagaacatcattttagaaaatatttttcactgttttagttttaaaaataaaaactgattaaaaaagtattaataaaacaaacatacccttaaatattaaaaataatatgaaaaaaaaaaaaaatttggaggtgagtaggacggtattgaatgaccattgaatattttggctatgcttttcatttcaagtcaagtgatttgatgagtctcaacacaaaattaaaacaaagaatttgaaatggtcaatttaattaatctttaattattggttaattcttttattatgtgagtccttttttactaaaaataaattaaataacattttcaatatatatctttatatatnnnnnntgtctatctaacggcaattcttggtttaacgatttttttttttatt

SEQ ID NO: 97538 - DNA, 730 bp, Cannabis sativa
  modified_base (284)..(286): a, c, t, g, unknown or other
aactagagaagggtcctttagtggctggccattctagtgaatttttgcctaatattttattattattttaatccatataattcaaacctaagccctagttgaaacactataaaagaaacatgatgctctcatttcatccaacttaaccattgccttcaaccaaatcaaatctagttttctttgtcatacaactagtagatgagagagctcctttctatagtgattttgcatcctttattgttcttcacctatttgtcctatagtgatagagtgccatgcccacnnntagcaagtcaagtactcaatcatactgcggaaaacagtggtaaccaaacctgaaggagagaaagatatccaggtttagatcttgataatgctctgctccaatcaatgtaaggttttctaaactcttatgtgtttaatttcatcgtcttagagatattcatatttaagatgttaattctatatacttgttagtaaatctagatactggtaaaatattcccaataccttcctcagaactttgaagggactaatctaaaatatgactgtctctacctcctccataataaaagaggctagaagcttcatattatccaccatgattactctattttccacccaagaatgtaattcaaaaacaaaacttttacctttagattttgaggtaaataatgtattgaaatacccacaaatgatcctttcgaagacctctggcttcgtctaccac

SEQ ID NO: 97539 - DNA, 1100 bp, Cannabis sativa
  modified_base (60)..(68): a, c, t, g, unknown or other
  modified_base (282)..(293): a, c, t, g, unknown or other
  modified_base (376)..(378): a, c, t, g, unknown or other
  modified_base (582)..(583): a, c, t, g, unknown or other
  modified_base (637)..(644): a, c, t, g, unknown or other
taatgtgttatttggttcacatgtttatttcatgatcatttgtttgatttataaattcannnnnnnnnttatcacattgatattcttgattattgtggtgtcaacatagtcgaaagtaatcaagattatgtaattaaatgaattcttatgatttattagtacacaagatttcactgatatgataatctacaatataatttacttacaccttggataagtgctatgtcctttccagggaattggtaaagtaagcttagattggatgtatagagtatacatcgnnnnnnnnnnnnattgaacttggataagatataataaatttactataatgtctatctaattcaatatcttatagttgatcttagatcaaatgatnnnaatcctgagatggttaggttctaattcagttgtattatctatgttcttcaatttgttcgttaaagtcgaccaattagattctctcgtgacatatagattaaggacacaattattcaattgagtgggagcgctaatcatagatacataatatatatcttctataaatgcataaaagtgaaatgataatttctttcgagcttggcnnaatagagataaatggtggagtactcatttctgtaattatattagtttactgaannnnnnnntataggtagctaagtgtttaaaggataaaatactgttatacccaaaattcgacttcacttcggaaagtgacacgtgtcttgcagtggaatatgaaccacctgatataatgaaattatatcatttaatgcaaagaaaaagaataactcgttaaataaaggattaatagaaaatattcatagctcgctaactacatagtcttaagcgagacaaggataaaaggctattaaaacttatattaacaagacacatacctgcctcggagtacacaagcccaagtaaataattcatttattcaaaggagtgaatacaattatataaagcaacctatcgttacgaatagcgagacagccaatctgtataagtgctatgtcctttccagggcattggtaaagtaagcttagattggataagtgcaattattctgtattatcccacatgcatttaaatgaaacatg

SEQ ID NO: 97540 - DNA, 1080 bp, Cannabis sativa
tttatgaaagaacgaaatacatagacattgattgtcatcttataagagaaaaagtttaagggtttgatcaaaactgtccatgtttgcaccaaagatcaactagttgacaatatgaccaatgaactctttcctaactattttaaagctctcaaacacaagaatggattggttgatatatatcatccatcttgagggggagtgtcaagatagagttagctaggttaggtaggagttagttacagttagttgttagtgtagcattacaattagttttgtaacttgactcattgtacagtgagctatataagctcctcttttgtaccttttctaaattaatgaatacatagtattcattctgaagtttctctcttactcccgcaactaatatttaattatatgtggagtgaaatttatcaaactaaccatgtgaaatactaaaattttcaaaataaactctatttactctttgtaaatttatggtttttttcattcataatggtcgtttatagtcccacagtgtaattaacggtcgtttctctcattatacaagattattttgtcaaattttttgtaacgttattttgttaataaaatttttcataatggctatttttacaaaacattctgtacacgatgaataaatgtaatttttttttttttttttgaaagcattttatgaaaatctgcttgactaaagaaaaattataactgatatcaaatctacgtttaaaatagtttcacatatgtattaatcattttcataggcatcggtccagaagttccaaagatttatgatttatgtccatgccaaaggaatgattgttgatgatgaatatgtaatcttgggatcggcaaacatcaaccaaagatctttggatggttcaagagacacagaaattgctatgggtgcctaccaaccaacacatacatgggcagcaaccactaattctcatcctcgtggacaggtttgaaaatacttcactggttcccattcctcaattcaatgatatacaacaatatacctgatagttttacccaatttctatctttaatgattgcccatatttatatatgattctt

SEQ ID NO: 97541 - DNA, 519 bp, Cannabis sativa
aatggttttaagtgttaaatatacatctaattttgcaattttttttggcaggtatatacacttaggtacgctgctcttcctttttttttttttttcattttgtatgtacaagctagttttttttttacctaatcatccatttaccttctatatattatttttctttttatttatttatttattttattactttttcttttaatgacatgagatcaacatatctcttttatttcattgtaaaaaaaaacatgtctcttttattttattttatttatttttgaaaaattttataataattttcaacttcatgtactcatttctctttctttttctttttcttttttattttttttatgttttaaaacattaacttttactacaaaaataattgtttattttaagagttatattcattgtaattttttaaaaaaaaattattttaatatgtgaaaactatatattttttcatcatcactaaagaagataattagagaaatataacattttagtttcttttat

SEQ ID NO: 97542 - DNA, 1276 bp, Cannabis sativa
cataacggtaatgaccgtatcttaattcattcacaacaacggtgataaccgtgttcttccctcaatcataaacaattcacaaatgacaataatcttttctcgtcattacctcgattaccattgagtcacaacaaatacatattagtaatctcgatcaagatcgagtcacaacaaatacatatcgggatctcgatcgtaatagagaccatgacaatcatatcattaacaataaatagtgcttaatacttttcttacctcaagttctattttaggtatgttggccgacctgcttggagaacgatcgatcatctcgggccctatgtgataacgatgataaaccaataagtgtttatcccaaaacactacttaataactgtaaaggaacacctatggtttcctaccaagcctcgaggtaaaagttcaataaaatgaaacttatattttggctctaaaatatacaccatatcatagagctcgtcacaagctttgaaatggtatatagaacgtccaaaacggacacccgagtaaaaagttatggcctaaatacgaaatttaacttctctgaaaactaaccaaacggaattccggttggtacatctggaatttcggttctgaactgccaagaacacgatttttctcaactttaaactctccaaactaactccaaacctaaccaattgcaatgaaacttcacagaaaagttctacggtatcataataacattttctagttgatagaactcacaatcaaatcataacatgaaaaataccattagagttcaagctttgagttcaacaaactcaagcttgactctcaccttcactactgctccaaacctactggtttgaacatcaagaacacatctattttatcctagaatcataacaaaatcccgctaaacccacaacaactacaacacaaaaactcacactccaaaacctatagtttccatggaaaaacaaaggagaaataagctaaggtcattactttgatgttcccttccaactagagtcttctcctagctgcaacttatgatgaaaagggatgaaattagatagaaaatgctaatggcacttggtctcttggctggctttttcttgctcgagagaaggagaaggagaagtgagggtttgctttttttttttttatgcttaccaataaatatatatatataaactttatatataaaaaaacagcaacaacaacaatactagtaataataataaaaataataataataataaaaggataataataaaaggataatgataataat

SEQ ID NO: 97543 - DNA, 982 bp, Cannabis sativa
agatgcaataatatggttatgtcatggttagttaattcgctttctcaataaatttctcaaagtatcatgtactttgatttggccattgatatgtggaatgatcttgctgagagatttaacgaaggcaatggccctcgaatttttcaacttcaaactcaattgacccgattacaacaaggtgaccaatctccgtcatcctactttaccaaaatgaaatctctttgggatgagttgaaggaatttcagcctatcaccacttgcacttgtggtgctatgaaaatctttttggattactataaccagaatcaagttcttcaattcttgactggtcttaatgaatcctttgcctcggttcgagctcaaatcttgctcaataaacccatccccaacctttcctgtttgtttgccatgataattaaagaagagcgccaatgttctcctggctctactgaaaccattcctctagttgctgcttccagctcagtgcctaactatcctccaagagctaaaaaacctcgaccatcttgctctaactttggcaaaccaagtcacattagacaaatgctactttctacatgggtttcctcctgattatggagacaaaaaacgacaggaaaaagggaaagctaaagccaatcttgccagttcatctcaccctgatgtagttggccattcgattccctctgatcttccaacccaatgtcagcatttgatctctcttcatagccagcaactcaacaacaacacccattagatggtggaagtcatatccttatttttatccttcttgcatgggatagattctagctggttggaaaatagaatcttttcaaggctgcatttttccattccctaatccttgtagaaaatgaaccatctcgacatgagcttatagccctgcgggatcagttgaaatagggcaatcctagcctctttcaagaacttagcaaaataatcctagagtaggagatgagctccgaca

SEQ ID NO: 97544 - DNA, 939 bp, Cannabis sativa
tcaccattaacagagaaagatatagtagcagtggttaggcatttcatgatattagaaacaaacttaacagggaagttaaaatggtacataagactttgaagaaagtcccagtcaaccctatcaaaagctttggacatatcaagcttaagggtcgcccaaccaactttcccattcttcctattgttaatggcatgaactacctcattggcaagaagtatattatcaaagatgattcggcccgagataaaagcgctttgattcggggaaattattttatccaaaacaacctttagtcgatttgcaagaatttttgagataactttgtaaaaggtggtacaaagactaataggtctaaaatccttaagagaatgagcacgttgctttttagggataagaacaataagagaagagtttatcatggcaaagtccgcaccattattaaggcaatccaagatagccttagtaaaatcagatcccaaaactgaccagtttttctggtaaaactaagcattaaggccatcaagacccactactttatcaccagagatttgaaaaacaactctcctaacctcatccggagtaaagtcttgatcaagaaaactgacatcagactcctctaacccagagttaagataggaaaatatagtagaagcagcatccacatcactgccttgggaagagaagaggttttgaaaataatcagtggtaagagttacaatcccctcattagtattcacaacagagccatcctcagctttaagaaatttgatggtattcgttttcttcctaaaagaggcatgtttatgaaaaaattttgtatttctgtccccagcattcaaccatttaactgttaagatcgcttagttaatttggaaattagcagtgtttatgattaattatgaaattatttatagctacttaaataatttattatactgt

SEQ ID NO: 97545 - DNA, 806 bp, Cannabis sativa
tctttctatatcctttttatttcataacaacttatatgttttttaagcatcaacttgttagttgtgttacattgtttgtaatctcggcattgatagtttgaggtacttggactgtttgtgctcatattaaggacttaatgtttaatttctgtattttccattgtcatcatttaaacgtatatttacatatttacattcatgatttattaaattatatcaagccatcttataaaaagaaaagaaaaactatatcaaggccttagattccacgttatggaaaaattttgtaactgtttttagtaattgtgttgtaattcatttattcagccgctaattttatgcaggatggaaaaaccttgtacaatgaattggaagttgttgaaggaatgaagttagaccgggactacatctctccttatttcataacaaaccagaaaaccaaaaatgtgtaagtggttattatcttattgtgaaccgacgttttaatactatgaaattttgagttgtcagtgtgtgctagagtcatcctggatgttttattttcggtctgtttatcctcatgtagagttgtttctgtatattgacaggaattggaagatcgtctgattctcattcatgagaagaaaatctcaagcattaatgctgtggttaaggtcttacaacttatacatttcaatttcaaaatgttaatagtctaagattcaaatttccaaaaatttaaaaataaacccaataattaaacccaaaaaattaaacaattcttttttaaattaaactccggttaaatatgtttatataaatttaaa

SEQ ID NO: 97546 - DNA, 579 bp, Cannabis sativa
aataatctcaaataataattaataatattttttcttcaattatttattgtatcatttttaaataatatagaaaatacctaatataaaactaagtacacgtgcttcacacgtagctttcttctactatttataaatatatatatatatatatatatatatatgaatttatgaactcattttccacaatcatctttgaatgatctttgactaccacctctgagcatatgagacaaacaatatcaaataaatgatcaaagcatccaaagtcttaaagcctattttattcttattttttatttaaaagttatgttaatctataatgtatataatagagaatgatgaatatgaagaaaaataatattatcaaaagaaaattatatgaaatacataaaagacattgttatcattacttatagagaactatttagggcgtgagttataaaaatgaaaagccactatattaatcatatttatgaatgatttgataatatttttttttttatttataggtagttatttaggatgtgagttatcaaaaatgaaaagacattatattaatatcctattaatgaatgattt

SEQ ID NO: 97547 - DNA, 881 bp, Cannabis sativa
taagatcttggtaaaataaaattccaacaagaattaaggtcacttagcaaagaataaaatagtcagctacatattaaagttttagaatctttaatcaacggttagtgcagtgaactgatccccgttaattgatgcaagcaatattgattcggattgctgatgtagtatgacatctaagtgtacgtgttgtatataatagagattatatatgacatggaccgatatataactaagttttctttatcaaacatgtcctttactataaagacctaattcaaatcataaagatgatcaaatagtagattgacttgaatcttgagtaatcatgaactcccgttcatattattagtttttttgattcacttgttaaattttctcagagaagatgattcttaaaacttctgttttgggaatctaattatatggatagcttggaacatgttctacaattatggaatcttgactttcttaatagattgaaggttggttccctttaagttttaattttcgaactgaaaaagtgtgcacaaatttagactggatctcaattatactttcactagtgaattaacaatactaaagaataaaaaagtaatcagaagggtaaaaagataatttgacccaaactaattacgaatcggcacaaggagggctaatcactgtaattgatttatatcaatagacactacagtagaactgagtaaatataattctataattactaaaagtttaattctatatttatagtagtgtaatcatggaattaataaacatgattatatggttgatgaggttcaataaataatctagttcattggagcttagaattataggtccatggtccccggatcacaaccttgaaataatgtcaagggtcggga

SEQ ID NO: 97548 - DNA, 614 bp, Cannabis sativa
ttagaatgccttccacccggtgggggaatcacgccaaagaatactatttttcccacttgggccatttcttgggtcggtcccagatgggctctggacctccgccgcccattcccctggaccattcaacccacttgtcctccagctggtttctcccctcggacagctttccttgggatgacgaagccaacattgtagttcaagcctttgctatggctgaattagagagtcagggtaggattagttttattgctttcttgttgggcgcacgcctttcttatggttattctaatacttcgtttatttctttgttgcaacagccaagacaatggaagatcttctggctacccttgccgaggcctatagccctgacgcttctttgcctccggcctcatcccaaatggtgacgcccaggaggtcctcatctagtgccccttcaggcacaatagtcttgatagacgaggaaggggaagtcgaggaggatgagggcaagactgcgaccacccttgagcgcaagcggaaggtaaaatggttgagatcgagccttccaagcggccctggaggagggacactccggctgttagtactgactccgagattccttccgaagcggagga

SEQ ID NO: 97549 - DNA, 587 bp, Cannabis sativa
ctaatgaatcccagattcaataactcttgcaattgtatctttaattccttcaactcaactggagccgttcgatacggtgctttagatactagatccactcccaaaactaatacaataacaaattcaatttcccaagtaggtggcaatcctggcaagtcttctggaaagacatcaaggaactcacataccaatctcatatttccaggccctgatgtcaaaggttggctggtgtccattgcagtgactatgaatcccagacaacctctgctcatcaggtccttagcttccaacagtggtattctcggtatgtgtgccccctgaatcttacgcacgaacaccgctgggttagcactatcgggctcaaacaccaccatcttccttttgcaatcaatcgtagccccatacttagacagaaaatccattcctaggattatatcaaaatcagacagttgtaattcaatcaaattggcagtcaactcacaaccgtcaatccagaaagacaaagaccgaatccaactagtggatactaaatggtctcctgaggggaacagggttccaaaccccgaagcataaatatcacatggctt

SEQ ID NO: 97550 - DNA, 630 bp, Cannabis sativa
  modified_base (28)..(37): a, c, t, g, unknown or other
  modified_base (65)..(74): a, c, t, g, unknown or other
  modified_base (105)..(114): a, c, t, g, unknown or other
  modified_base (141)..(150): a, c, t, g, unknown or other
  modified_base (178)..(187): a, c, t, g, unknown or other
atatagtgtaattactagactgtgtaannnnnnnnnnactgtgtagttaccaccctagtaattannnnnnnnnngtgtagttaccaccctagtaattaccctacnnnnnnnnnnttaccaccctagtaattaccctacctnnnnnnnnnnaccaccctagtaattaccctacctagtnnnnnnnnnnttacttctaaacacacccttaatatattatattgtattttatagtattgcgttggttgtattatattatattagtattatttaatataatactaggtttgatattgacttatagtaataggttatgtaaaattataaattttttacaataaacttgaccctaatcctaaccacggcctagactcggatatggatctggactcggactcagacccaaacctgaacccatgtctcaaacccaaaacctggacccatatcttaaacacaaaacccaaattcgaacttgaggtttggggttcgaggttttggttcgggtctcgattcaagttcgggagcagtgttcgggtctaggtctaggttcgagtttgaggtatgagtccaaggtcaggtctgagtccgattccaggatccgaatctaatacaggttcgaatctaaagtctaag

SEQ ID NO: 97551 - DNA, 632 bp, Cannabis sativa
accaatgtatcatcctgatcaaaacaattaataataattattaaacatttacaacaagtcaacatatatattaaaaaatttgtaggtacgtaatagcatcacttttactctttttatgtaaacattttttctttttgatataataatagtttgcattataattagaattaattgcggcaaaactctcaatatttttattttacttgcagttaactcttaatactcaattttttgtggtaaaatacttgtattctgttagcaatttaagattttcatcaattttaagtgttaagtaccatgttggactatctatgtgtatatctacatagacacaatgtacacatgacacaatttaattggtccgtgtaaaaaattatttaaaaaattaaaaaattaaagcaaaattaatttgaaatttaaaaaaattgtaaattataaaaaaaacaattttttttcagttattaattaaaaaagaaaataaaataaaaatattaattgaaaattaatacaccaaattgaaaccctagtttcctattgtcctcgcctttctttctcactcaaactctctccaccttctccaccctatgcggcgccccctgtcatcttcatcataccacgtggtgagaaaccga

SEQ ID NO: 97552 - DNA, 815 bp, Cannabis sativa
catcattattaaaaaaataactttatatgtcatgagcctcataaagacaaaaaaaaaaaaaaaattagtaaaaaaaatgtgtaggcgtcaaagccttgaagagagttattaaagtatattagtatatgtgtcaacctattttaaaaaatcacaagtgttcaaaaaaaatcaccagtacaaaaataaatggcaatatatttgtaaataatttagttgtaacgtggtataattaatattttttttgagagattttttatattaattaaatagaaaaaacaaaacttaaaagttacctttattttaaatacaaatgattaatggtgtaactaaaaatattttttaaactttttaaataataataaaaaaaagtgagagagaatgtgtgtataagaaatagactaaaaaaattctaatggggcgtgttgaaaagatataaagaaaaagggcgaccacatgtataataaataaaaagactagtgtttaaaggtaatctgttctgtatggtatacgtgtctaaaacaaataaaaagggacacggtatttgaaacaataaaaaagttaacagtaattatgcaaataatttaatattttcgttgtcagtcgcaaataactcaaaatactatgtgccagcccattaaacatataatttttatttagctaaatatatatttcattttatttttttaaataataataatggatcttagatgtttgttataatatactaggtgattgttacgtgccaagccacgtagtgttagttttatttaatattttagttttttattttaattaataattaaaatagtataatt

SEQ ID NO: 97553 - DNA, 746 bp, Cannabis sativa
ttgatgagggcgagattagggttttttagcgtggattgcttgatgaggaagatggttgtgagttaaggcttatgaaggagtttatagatctcgaatgcaagaaaaagaagaaaggtatagggaaggatttgaaggacattgctgggacattttgggttgctgcatctggtttgagcaagaagttgaggaaatgggggcgaaaaccgaagggcaagaagctcaacaacgatgatgacaatgatggtggggttttaggggttgagagatgtagtgctatgtgtccataactagtggttcagagatgtagtgctacatctgctgggatggctgagaagatgtagggttttttttagttctcttaagaataagaagaaggaaaagaaaagaaaaacaataaaataaaataaaatatatttttttataattattttttaaaattaattttttataattttttaaatatttaaaattattttttaataattattattacgtggaccactaaaaagttgctacgtgtacataagtatatgcgtgagtaattcactgtggcacttaattgaggttttagacagaagtgtaaagagcaaaacagaatggggatttagtaggttttgccattaaaattttagtttttgtggttaagtgttaaaaaatataaagtttgggtggttttgtcgccaatatccttatttaaataaaaaaaatcatttcaaacttttaaaatatatattttaatataaaaa

SEQ ID NO: 97554 - DNA, 756 bp, Cannabis sativa
  modified_base (700)..(707): a, c, t, g, unknown or other
ttgtttttgttttttaccaaatgtcttgtacaggcataggttccctcaaagtgactgagtagacttatgactcttggtcacttgtttttcacaagtatattttttctgttcggggttttgggtacgacctgaccttttctacacactggatggtaaatttataacatgctaatgaacttgactcaatttgaatttaaataaacatctttattcatttattggtcggaaatatgtctgttaccgtagtaacttacatcaaagttattatgttgacttgatatgatctttaccttagcataaacaaaacaaatttcaaaaaatgaaaaattgtactttcaaagatggtcctctgacctgagtacttgatgattttatccgaacccttgggcgtggtccgcccagaaggccattcacttaagagcaaatgttcttttatttcgtacttgatatggtcatctgacctggtacttttactggtagtattttcttaagtgttccccgttccaataccttggtactaaaacgagttgcatcttttcatcatacttgcccaatttatatgcccctgattctagaacttcaaccgcttgatatatctagaataatcaacttggtaaaataatcaactccaaccactacgtactgcactccacatttgcctttgggtaactgtccaatcaggtcaattccccaaatggcnnnnnnnnaaggactttgcatctgagttagtttgttgggtggtgcccgaggtatctt

SEQ ID NO: 97555 - DNA, 641 bp, Cannabis sativa
atggatatatgttgatgaatgataaggtaggtgtgttgtttgagctagtggcattgatcaacactatcaatgagcaagataatcttcaaagattgaccaaccaaactctttttcttaaactaatgatcactttataagaaagaaaataacaaagaaaaatcactttttcattggttgtgggttcaaacaagctagatggtcaaacgctcaaagcttttgccaaactttgggatggacttgttgtttatagatagagaatatatagaaaatcaaatcacatcctaaggctaaaatctgaatataattaattttacacaaaccattattgtgagacccttgggcttccatgtccacaaagaaatcaattgtagttgctaccctcataatctttctccaaatctttcttcaagcaaaacttttgttacattcgctgcaaccaataaatcattcataggcctgtaagagattacgattagttctatttagaggtgaggaaaactgatcaatctcttttgtctatttgtattgttctactaaaatcaaagttttaggaattaaataaaccccgcaaagaaaaaaaaccaatgaaactaaataacttccactcattcttaattatataatcataggccataaaagtt

SEQ ID NO: 97556 - DNA, 1097 bp, Cannabis sativa
atccatgtatggtttttctcgagagcatcaatctcggtatccatagcattgttccaaattttgaatttggaagcttgtttgtaagatgttggctcagggattaagctaatggataatattgcagcacgaaattctggggagaatttgtggtatgacaaataattgatcagagggtgattggtgctatgcttggttgtgacagagtcacattggtaatctgttaaataagcaggttttttaggtgcacggccggatttggtagtgcatggttgtgtagtttgcttattttgattttgttgttggcactgattgaagtcagtgttggaatgttcaggaattgaactatcttcttgagtcgaagtaggctcagtaagaataggggaagtgtcgtgtgtttgagatgaacaagtctcagtatgatgtggaaaaaactgatatatagtgtgagtgttagtgaccgaaccaaagggaaaaatattttcataaaagagaacatctcttgaatgaaatatttgtttagtttgaaggtctagtagagtgtaggccttcatatttggaggataaccaataaatgcacaggctctagctcgaggagagaacttggtggatgtgctaacatgggatgcgtatgcaagacaaccgaagtttcgaagatggttgtattgggggagtttgttgtgtaataattgataagaagtttggtcttttagaagaatggatggtgttctatttaataaatagacagcagtagagatcatgaaagaccaatattgtaggggtaagtttgattgaaaagcaagggctcgggcaacattcaaaatatgctggtgtttcctctctaccacatcattttgctgtggtcttcctacacaggaagtgtgatgtatagtcccttgagatgcataaaaggaagtgagtgtgagttctttagcattatcggttcttattgctttgatattggtcttaaactgagtatgtatgagttggaaaaaactctgtattgccaatattgcatctgattttgtttttaaaaaatataaccaagtgtgtcttgagtgatcatccactatggttaagaagtatttataaccttcaat

SEQ ID NO: 97557 - DNA, 1362 bp, Cannabis sativa
  modified_base (844)..(853): a, c, t, g, unknown or other
  modified_base (1110)..(1115): a, c, t, g, unknown or other
  modified_base (1160)..(1160): a, c, t, g, unknown or other
cgagaaacaacaaataaaaaaaaaatgagagaagatattagtcaagaaaaagaaaaaaaaatgaaatatatattagtcaagaaacaagaatagaaaaaaaatgaaagaaaaagatgaaattgaaaggattagagtttaagagtttttgttgggtgtaatatgtcttagctgtaactatatttgttaattaatagaaatattatttcttgataaaaaaattattaatttagtttgttaaatgacaaaataaatccgtattttataaaatagtacaaataggattttaaactcaattttttattttttttaatataaccaattaggaacttttgtaaaatttaagattcaaaataatatttatcattaaaatatgtaatactaatttatacacatacacacgttataaaataaacaataaatagtgattttctacatgtgaaaaaaaatactatttattgcttttaaaaaaatgtaaaataactcactaatatatgccattttttaatcattctcttctctatttgaaataaaatctcattttgaaggagctagtatgagtgctctataatatttgatcaagtgatacttttggggtgaaagtcacaataatccaaatttggagatcaaaaataaaatacgaaattttatttgcaccccataaaataataattaaactttattattaaaaaaataaattaaaataatatttacaaattacagttaatatttttgtaaaattttattttcatttattttatgttaattttaagagtaatttgcggcataaatacttaagttcaacttctagttgcaaataaatacctaagtttaatttttggcagtnnnnnnnnnnaagttatatttttggaactttgtaagtacataaccgttaaatatttagtcattaaatccacgtgtaaatgattgttaatttataataatagtgaaactttctcaaaaaaaaaaaaaaaatccacgtgtcatttttttattagtatatttgaattaacttttttaaataataaaaatttaatgacttagaccaatcaggaattaccacgtacttacagaagtttcaaaattataatttaggtattattaccgctaaannnnnnacttaggtatttatttgcaattggaagttaaatttaagtatttangccgcaaattactctaattttaatgcttattttaattttatttttatattcttttttttttaaaccaggtatatttattttttatttatttttttaaaattttatataattggtaggtatatttttaaaaaatatgagttgaaagaaaaaaaaattaaaaaaatttagttcaattaaaaatataaaataaaattattaaaat

SEQ ID NO: 97558 - DNA, 727 bp, Cannabis sativa
ttttttttttttttaattttgtgtgttttttttttttttttttttttttttttttttatcttaaacttccctacacatttcccacttttttgttggaattcttctataaatattgtttttcctcattaacaatggttgttacccgatcttcctcccctgttgccaaaaagtccccaaaataacctaaaaaaacacgagcatcaatggacaagaagagtttgaaagataatcctcctagccatacttccccagttcctgctaaaagaaaactaggtgttggtacttcgaagagcactaaatcaaaataccctcaatctgtgttggagaactccgactctgattttgagttggagacagagttccaaagtctcccaactctgataagattttttttctattgttgattatattttccatttctcttttttttttgcatgttttttttgttagtcctcctattttatagttttctgtttgtttgactctgcgtcttgctgtttttttggttttattttgttaactcttagggaaagggtaaataccaagtgaagattgttcaatcaactgatctgtttgaagatataattgagaaaagggttgttgaggtgtgtcatttcattattttagttgaaatatttttttatgcttgttttttatgttctttattattttttttttgttgttttagtagtattttcttatgtttttataggattgggaatccaag

SEQ ID NO: 97559 - DNA, 556 bp, Cannabis sativa
  modified_base (44)..(44): a, c, t, g, unknown or other
ccagccattgattttgtagaatcctctggaatagttcgcagtcncgggctactcctcggactagccatagattttgtagaatcctctggaaaggttcgcagtctcgggctactcgtctggccagccattgattttgtatactcctctggaatagttcgcagtctcgggctactcctcggactagccatagattttgtagaatcttccgaaatgtttcgcagtctcgggctactcctcggactagccattgattttgtagaatcttctggtatagttcgcagtctcgggctactcctcggactagccattgattttgtagaatcttctggaatagttcgcagtgtggagctactcctcggggcagccattgtttttgattctacaaagcaaaaacagcaagggcatgaatcatagagacagagagagaaagaagcgtagcaaaggaaaatggttaaagaaattacatgcaatccaataagttaggggatcatctggccggaaggcctggccaggtgtgggaatgggatgggattgttgataaataaaatctagggtt

SEQ ID NO: 97560 - DNA, 599 bp, Cannabis sativa
cagccgctgccttgagagaggtataattgtagtcccaattggttttcaagatttagaatgtgacttaaggaagctatagagaacaagtgaggaaattcacagtgaatggaatgtgattaattgggttttggagtacatttttcagttttcaatctttgtgtgattttcatttatggttgaaaatgcttttgtaaaatttttaatttagtaatgatcttatttatttgcagtcttgagtacaactttatagcataaactgttataagcatttagcttagttttgtttggaggcatttctaacatgaacaattagagatgaacacaacttttttgtattttctcaggtgctcacttagacaaacagtattatgcatgttcaggtttggttgcagatgaagtgtgtaatttagaaccgaattttgaaggtcatttgtctcctattcctgtgaacatgaacgtggaatccgatatggcaaaaagaatgaacccaactcataaacccattaatggaagtgtactggagaataatctaacacaatttaagcaaggagaggatcaacaatctgttcctgaggtgctggtaaatttgcaatgtcttg

SEQ ID NO: 97561 - DNA, 592 bp, Cannabis sativa
  modified_base (117)..(117): a, c, t, g, unknown or other
tatcggtccagttcgatgtatactatacatatctgatcctagcatactttgtcaatcccctaaaaaagaaataacacttatcaaaggtaagtaagctttatcgctgattatcatgtnagtctaaatccagtgtactaacaaattatgtgacataaactttgaaacatataatcatgattatattactgtgttgacaatactataatcatgaataattatatgttcgggatttaacagaatttatacattaaacttataatcaaggaagaaattatgtaaaccatgcaacataaaataatttgtgatcttttattaattagtaaatctgatcacattgaaatgagtttatttagggcataaaatctcaacaacatgtatatatacattcatgtatatacacatatttacacatacacatatatcaacagatttaaaataaaaataataaaaattaaagtttaatttatatgtatacatatttatacacacatatatacttgaaattatacctacgtttaaataaaaatataaataaataatttaaaaattaaaaattgaaaataccttatgcagtggggctgcggtggtggac

SEQ ID NO: 97562 - DNA, 556 bp, Cannabis sativa
taaaaatgcaaaaaaatgcaaaaaaacaaaaaaacaaaaaaacaaaaaaaactattttgaggtgtaaaaatgaaaaatgccctttagtgatgagtatttataattttataattctccaaataattaaattaaaaaatgtaaaatgtgatactaaacaaacaaccttttcacttttcaataacctgtgcatatagttacacttggtccattaagcgttgcctcaatcgaataccattgcgtgttatgtattattctcttggacttgagacctcatatttactcacaagcacattctctcagccataagaaagattatcccaaagaatctctcttctcactcttttgtacgtttgaaaaataaataatagcattaaaagaaaaaagaacacttatcagtgatacctgtcctcaatcgaataacataaagaaaaagaaacttggtctggtctcccatggaaacgacatgttagtgatttgggccttggggttgcacaaggggcccattttctggcccagctatagacaatgacggctggttgactagccgttacaactt

SEQ ID NO: 97563 - DNA, 5878 bp, Cannabis sativa
tgatgagcacctgctatcaattcaaacaatttccaatatactaacagcaataaaacagtagtcacagagattcaattcacagtaggagctattattgaatactaatcaaggaaataagcttccacacaaggtagagagctaaggcagctctcacctaatgcagaagagatagttttctcttacaaaatgcataaccgaaaaacacaatcctttcccatacaaaaggtagctcactactaaagacaattaccaaattaccccctcctaagccaatttaccttgcttaccccttctagcataagtaaacttaataggaggcctcacattcgtatcaaaacattaaactagtcagttaaaacatacaagagatggtataagcatatatgatagtatgatacaacaaacagtatgccacagtatctttggtctcctttatgcattttacaaaactaacaaaacacattacagatcttaacaaagtttgcattgaattaaaaaaatgacaggcagaacatagagacagtagaaaggagtaacaactcagacatgcaatataagtgcctataaagaataataactaatgcccagtcgccttttcttttttttttttccaactttttttttttgcaacaaaaatttatagtaaataaaattttttttgaaccttccactgaaatatttgattgagaacatctggttcacaaactgcttttgcatcttcaatactttgtcctgaatccaaaatctttaaagcaattcgaatagcctgcaagtatatcaagactcttaaagtaaaaaaaatttgggagtacaatatgtttttagattcaccatcatcttaacatctgtagccacaattcattttctgtcagtaaatacctcaacagaaccctccacttttcctattgtaatgcctatgtccagtgagctttcagagaatattccatttgtagcctgtagcctctgttttcttatgaactcttctcgattgaaggaagaagtggattctttcattaggtccaaaattctgtagatccaagaagacaagaaaaggaattatcgctccaactattgctaaatgaaaatttacataagcataaaatattctgaaagtaaactttcaatcatgcaactatggaacaaggtaatcaccgcttttctatttcagcttgagctgaaggacatggcctctttgtatttttaatgacattttcttctgtagcaccttttacaattccactggctgcattcctcttagacttcactgggtgtgtttctagactaactgatgaattattcttcatgcatgacttgccttcaacttttgaaaagaaactaagagatgatccaacattgacctttgcagattttcttacttcatcagttctttttctctttcttaacgaatcaaaatctggtctaacacatcttttctttatagtttgggtagaatcacctacactagcactacaaacccccttttctgcccgttgcaacatgtttaatttttttgttgcaaaagtttcaaatacattacttcttgttgacaacattggcattaccctctctttccttgaatgcatctccaaattcggtgccttttcttgtccactaacatcagggaattttacatggtctctagtaggagttccaagttcacttaaaatctcatgatccctggtcaacataattgaatatccatacaccatcaatgtgaaatatggccaaaattaattttaacttacataaatcagctccaatttacttacatgcaatatatcaaaatccgtttgggtagtaaaccatcccaagctctctgagcaatgtttttttcatagttatattcgaaagaaatactcctgaaaagtgaaacagaaaaagtcaataacaagatgtcattctttctcaaagtaactaacattctaaacaaaaagaagggtaggtttcatagtgcctgggtaggcatttcctgtgatatgcctttggacagcgccgacacagagcaaactgcaactccatgacttttttatcttcaccttgatgacaaacaaaacacttatgagcaggacaggtaaatgattcccccgcagcaatactgagacgaagttcttcagtttggcatctattaactggttggagcatttttgcaacacattctggatgatagaagtgaccacaagtagcagaaatacaagggaagaccttaaattcaacagaaaaccaagtttagaattgcagtcaacaaatattgcttcttattcttggttgtgaaaaagaaaaactgaaatccagtaagcaactggagatggtagtcgaatgatttaattaacagtatgcaatgaacaactcataatgacatacatcaggaaagtataatcaagacaataataaaaatagatagaatttaaataaactttctgcagtattattgattagtgagctagctattgatgccaatttttctgtttccttcaatcagcaattttttatgttcccaaaatgttaaactaactattgttaaaattagtacaggtgctacaacatcttataaaaatcttagaaatttcagaatttggtgacaccggaaaatacattagaaaaggttattctattctattttctgcaaaagattaagtacatatcattctgcactcctactgtacactccaaatccattataaacaacaactcattttcattgatttccaattttgatgccacatcagcttccaaagttttgaattcactaaaatatgaaaaagtaaaaactgaacatgacacttcactaggattaatgggagttgatgcaagagatagatatgtaatttttatcagaggttggtctttctagggcagaggggtcccatgattcataagaaatgggggaaacatttcctcagagaaaggaactctgtttcttatgcttctcttttcctgatttttcttctctcttctgggtaagttggtttcctattccttaattttaatatactttctttctcagcagaaagggaaaagttgaaattttacaataatgttttgtggtcctacactttgaaaaaaagtttctgtaatttgaattcaggtcataatatgcatcattcagttgccgatatacttatttggttaacccactttataaaaggtggtagcacctttgacaagcacattagtgccagaaaagtagtgcttcgggcaactaagagaaaagtataccttgcaactagatgaagtatctgaggagcccaagtttccacaaataaagcattggtgctgctggtacttacaatttgcacacaaaaatgttggaattgcctgcatatgtttaagcactgttactagcgcaagcacttgtaaactggagtcataaaagtgaaagataaaagcattttgaatgcattgattgaaaccatatggaaaacttacgttaacttgagaatcattatatccaagagaagggcaattttcgccaccaggagcatctctggttgcatgaaaggatcgcatgcacctcccttgacagctgtatgaaacttgcaattaaatctaagaagaaaactaaatgtggagaagaaaaaattatggttgatgttgagtcacccgaaggctgaatcaggcaatataacaatactttcaggaatctaaacaaagatcacaggaaaaaaaatcctgtaagaagatgctgcaaataaaaacaatgcaagattaaacatgataaatcacctcagtatttgaccaccattgtcacagattgcgcaaacatgatcatataatccactatctccatcaaaacattcaccatcgtcaccaatgatatcgtcatccatatcaactatgagctttgatttatttcttatttgctcgtcctgctaaatcaaacattgggttcaccgatatagagcgaaaaggtttttccatataatatacaaaacaccaaaataatccccgagaactaacctccggaaaagctccatttttactcgggtttgcaatataggtatgcagatcatgctacatagtcagaacaagaaattataagctaattccttatgataacattattacaaacttttacacaagttaagccaattaactagaataattaaggtagatagcaatgcatgcatcaccagcaccaaatgaaagaccaaggaaaaaaaaaacagaagtatttcccgtgaaataggtggttcttcagaataatactcatccgaactaaatgcttttgagcttgatatctacagtcataataattcaatgacagtacggcctaatctcattggatcagtaacacgttaatatcattctcagcttttaatgaaagggaaatctaactaaaacaggtatagtaaacagctaaacagctaacctcaattttggctaaatctttgtcccttttgacaacttcaccgataaataaaaagttggcaaacagatcattctcacaaggtttaacctcaaatgagctgcaagaaccacgggcttataagaacaagtaaaaaagcacagagaaaatcacataaaccgtataaaacgcagacctaagaactttaagcaagtagttccaaacaaatttcctggatgcagcgggattcttcttcagaaaatgaagccaatgaatggtgaccagcattgtcctgatcgtattttcaaaacacttccttggcctttggagcactatccagttcttgtccttggaaagcacataaatctcaggttgcaaaaaagagaggtcaaacctccaagccacaaccctcttgtaaattttttgaagaccatcatcaacactggcaagcaagaaaacctctttatctgactcaaccagactctcatttggactccattggagtggcaacgtagtaaacgaaacaagctcttccttatcattaacaaagaggtaatctgtgacacagtttggcaatatctcaccctcttcatctgaggacgccattgacaactataaagcatacagagaaatataaagaacccgaaatcataaaactaatgaaacagttaatcaaagaaaaccctaaaatcaaacaagaaataaacaataataataataatactaaaagttttgatcaggtagtcctctaactatacccatgtctacaacaatgtcaaaacttcttcaaaatagattaaataaacacaactatttacaagagctcctaaaaatctcattaatcacctgaactaactagcaactctcaaaaacataatattaactcttggactttcttcttaatggtgacaaactacacaaagccattagactataaacttatatatagttttctactttccattacaacaaacattccattacatttccatttctattttctctgtaaccaaacaaaatggtagaagaacacagaaaaggaaaaaagaagaggttgagataatgaacacattaccaggaggagaagagaagtcagaggaaaatgcaacgaaaaagcaccagagtggtggttaactgttgttgatatatatatatttatatcatacaatgagagtgaatagtaatagtgaggagggagtgggtgtgatcagattgatgattgtggaagaagacatgaatttatttgtatagagaaagagagcgtagcttctagccattctccatgatcgcacggaatgatgtaataatgggaacaaagaccagagtcacgcgagtgtagtttaaccgttttgggcatttcttattttaaaaatataaattattattttctcattttccccaaaactgaactgtcataaatgcgggtagcatttcaatcctatcgtacaacagtcactgaagcatactacctccatttttcatttttgttttaaaagtccgaagtttgattgagatgttaaaagcatctataaa

SEQ ID NO: 97564 - DNA, 1642 bp, Cannabis sativa
cacatagagatattatctctcaaacctccatgatcgagctgtttagaacaccatgaataccatggttcttcaccaccaaaagtctccaactttggctctcaacactcttctctcaattcactctctctctcacgtgaactctctcttccttacaaattacattacaattggtgtttaaataggttagaaaatggctcacaaaatcgagccactaaccacttggacaaagccaacaaacttaacaactttaactaacttttctaaccaacttccaagaatgaaaagttaaaaccaaaactgattttctatgaattactaaccacaaactccaccttaattcatagaaaactagtaaagcaaaatgcttgggggagtgaacctgaacaactaaacaggtccaagtttgagcaagtccatgaaatacctgaacttgctcactggcagcatctttgttcctggatcagcagtgttctcatctgagggaactttctccaattcaatctctcctaattctatcttgtcctcgatccaaaacattctaatatgaatgtgcttggatctctcatggtaaacagggttcttgctcaagtgaattgctgattggctgtttgaaaacattgagactttttctttcaacatgccgatttcttgcaggatgcccttgatccatgttgcttccttgaaagcttctgtgattgtcatgaactcagattttttagtggacaaagcaactacatgttgcagctgtgatttccagtttatacaacatgaatttaattggaaacagtagctagtgattgattttctggtgtccttgtttgatgcataatcagcattaataaagccttctaacttcagtgtgttgctagtcttctcaaacttcaaaccataatttgaggttgtctttcgataccttaaaagccatttcaaaccagtctaatggttcttcactaggattggacataaacctgctcaaagtgttgacagcatatgcaaatgccaggccttgtgcttatcattgcatatatacatgacactcccaatggctttgcactgtcgtgaatacaaaatgaccagctaaaggaacttgagtctcttttccatcctccatattgaaattcttaatgacgaccttttcaatgtatgactgttgtgtcaacagtagcttcttctctttcctgtctctcctgatttctatgcctaggatttttctagcaactcccatgtctttcatctcaacctcactgttttagacatactttagtttgcttatttggttttgatcctttcccatcgtaagcaagtcatcaacatagatatgtaggaaagttgcaacttgtgagttcagatttgtgaaatacaagcaagtgtcttgttatttggttttaattattattgttattggacacatgtacggtgcccaacacattcgataggtagcactttacgattggctaacaatattccctaaaaattattttcttaagttatatgagacccgctacttaattacactattaacggtatgacaccaaggaggatactagaaactagtgatgacttttagtaaacaaatgtataggaaccaatactatacaattaattctcattctcatcaaattaacatgcctacgattggtta

SEQ ID NO: 97565 - DNA, 691 bp, Cannabis sativa
aaagtccttccatggtccaacatctgccgggtgtcacatcaccctatcatcttttgatttaccagtgtggtgccataccatgtattttgttgtatgccttgaactatatagtctcttcaatcacggagttaacggaaagtaacacatcacattatgagacactttttttgctcctaaattttgtgaagttatctatctactactgccacaaactcatgaatctttatttgcatgttcattgtaaaataaacagcaaatatatttgcacacatgaattgactcatactccaaccctaacttcgttaatcttttcttagcctcatagtaatttgatagaattttatttttcttcggaaaagcaagttttaacaactttagtaattcatcaaatatgttgttaagaatatttcctctaacttttaactacaataactttgccaaaatgttaagagaagatatccaatcacaaccaggatacaacttggcctcaatctccttaaataactcatcgtgtcattgatttacatcaggattattatcaattttgaattgacggttgaaagaagtcatcaaccattacaatcaccttgtcaatttcatggtcatcatcaacgtcatcatggtcattaactgttagaaattattttactaggatttaaatttactaacaagtatgtttattaacacccta

SEQ ID NO: 97566 - DNA, 513 bp, Cannabis sativa
atatttgatgattgtatgaaaatttcaatttatgatgataaatatttttttatttcattttgaaaatatattttttttttttttggaaagtagaggaaaaatttataaatttagtcttttagagaactcaatttgtattttttatgaaatagttatgattttttgaatttagatgaaaatatctaattttgggagcaacacgtgtgcacgcggatgaggttcactcggccaacatgcttcttcaaacaagtgcctgaccggggatactcggacaaggccctgtatgaagggctgctcatgctgagctccctcagccaacagaggctgcacacagccttttccctcgcccattacccttcatgcgcgtgggatgcatacccctgtgcccaattttgtttttgtcatatcttttgattcaaaaattattttttagttaaacaaaattgataatatcctaaccataaaatatcttattttcaattttgtttatttttgttatatttaatttattaa

SEQ ID NO: 97567 - DNA, 916 bp, Cannabis sativa
atgtcagatgatgtatcaacttattacggtggtgacagtagtagtatggatccaccagaccctagtagggtaccgtcgacatgtgagtcagctccaccgccaagaaggaccttaatgttgaacaacgaaagcaggatgcaggaaaactattaccactaacacttgatgaagtgacaggcaaagtgtttggcacgaagaaccaagcttttgtacgtcaactgggtattgaagtcacaatcttattgccaggacactacttgaattttaaagatgtacatcaacactttaaagactaagttgtacaaaaatgataaaacaaattaacaagtttaatattgtagatttttaattttaatgaatataaaattctttaacaagtactatttatttgtagtatttgtacgatattgatggtcatccagagcttgaaaaggtgatgcaaactctctaccatgagatgaagagaatgtattctgagagaaagaatatcaggcacagtcactttctagaacattattctggggatccaaataatttgaaaagtgttatcaatgttgtacctgatcactactctacagagagttggaagcaaattgttgaattattttttagcccaaaatttattgcgtgatctaatcaaaacaagaaaaatagaaaggaaatgatatatatgtccacgcaaggcataaagttgatggcagcgactcgtaatgaatttgtaagtaatattattaactttctattagtaaatttttttacacattacacaaactaaccttacttttgaactgaacatccctaaagactatgcaatttatgcttggaaaaatagccaccttaaaaaaggaacagacacttaggttagcgagacatgccgagaactacatgtaattaagtttcaaattttcattttata

SEQ ID NO: 97568 - DNA, 519 bp, Cannabis sativa
tatactaacatagaaatatccactattatataaagaaaaacagaggaataaaacaaaagctataataatcaaaagaaaaatctaagtcttgaaaagttgcagcatttaaaactcatatatttataaataatgaattgagaaaaaataaatactaatctatatttaccttgcaaagaagatgatctaacacttaatctttttccttttcaaaagagatgatttaacacttcctcaatccaaaaaaaaaaaagtcaatctagaataacgataaattcatctctctttatatctctttttctatctataaatatatttttatataaaagataacaaagaccaaaatatgttaatacatcaatagtcaaatatgtcaatatatatatttatatgctgaaagatattaagatgttacaaaactgaaaggttgtgagttatataagttataactgcacacaacacattaaaagaaaaatataaataatattatttccgttatgtatcacttacccaatgtaaccg

SEQ ID NO: 97569 - DNA, 837 bp, Cannabis sativa
cccgtacaaacctgacattctaaaatgcccaactattttctcctgctaaatctaagacactccatcctatctatatgactcaaaatggccaaatcgttgcattccactattaccagacataaagcatgaatttacatatagcatatataatactcctggaattcaaatatatctctataattgagaaaatatttttctaaggcctatttcttataataagtcctaatttatactaaaaaccttattaccataaaatattaattaaattctctaattatctacaaattttaatgatttaactatgcagtcattacatgtgaagtcttcatcaagttcataaatattttggattggatgatcgataaaaattacaaaaagaatcaagtaacccttgatagacatgaagaggtaattttttttttactcatagtgtaaatttaatatatgtaaaagtatttttgaatataacatgcttcctttttatatttttatttgggccataaaaactaatagtatgatgtatgtagtgttgtgtactagaccaaacatttgcgatgaagttaaagtagtgagaaggtataagttaaacccgggaccacaacattggactgcagtcaagaacatcttaaaatatttgaagaggaaaaggaatttatatgtttagttctataggggtggagatctcaacccgtaagactacaccaactcagacttgcttgcgtcgatgatagaaagtctacgtctaggatggtgtttactctttctggtaaaattgtgatttgagaaaagcattaagtagtctgcaatcttatatatattcttttatggaggccaagt

SEQ ID NO: 97570 - DNA, 789 bp, Cannabis sativa
tgaaattagacaaaagtcctgaaacttaacaatctcaatagttcggaaaaaaattttaacgaccaaaaaaataagaagcacaatttagtacatgtcaaaattgaatgaaaaaaattactaattaccgaaaaatatattttatagcataatcattgatcaaataaaggaggtataccatatatagcactcactatacatacagctacaaagtaagtaacctatatagatcataccattatgagcaaaagacagggagcaataatggatccaaattacttgcaatttagttattgagtcatgacgagttagatttatgacttggtttgcaatattaatgtatcacgtgcagtattattttatatataaaaaactatttaggtatgctatatggttcgtcatagcactttaaatatagcttcaaagtataacctataggtcacaacattttgagtagaagattgagagtaataatggatcaaatttcatcagataaaaaagaaggttatagtactgaaagtaaacctcatgctgtatgcattccttacccaagtcaaagccacatcaaggcaatgcttaaatttgcaaagctacttcacaacaagggtttctacataacctttgtcaacactgagttcaaccacaatcgcttcctcaagaactcctccacaatttcctcctcaccgagcttccagttcgagacgattcccgatggccttccgccctcggatcaaggacaggattcgacacaagacatcccttctcttagtgattccactcgaaagaactttt

SEQ ID NO: 97571 - DNA, 1420 bp, Cannabis sativa
aaatttatggaaatccataaagcaaccaacgaaacaacttaaattacaacacccacatagcaaccatcagagcaaccaaaaccataaaaataaaattaaaatatggtacataaaattattctcctataaattaatcaaaataaactattattataataaatatagcttcatacagttacaacacctcacatccgtcatcatcttaaatatgtgcaattcaccaaaacaaaaataaaacattatatatttattgtaatacatagaacgatcaaattcaagtagtgaatgaggatattgtctcttcatctaaggatcgtgttacacataaagaagggatacatgaacttgatccaattaatgtagtggaggcatgagattttagtacgttctctaactcaatggctatttctttcatcgcaggtcgattctttccagccaaactcaaacatctataagcaagattagcaacacccttcaatgattcaaaattacatccttccttaattattgcaggatcgacaatttcaagaagattgtttgcctccatacactcaatgaagtaagtcactacactcatactaccttttcttgaacttgtccgagataccggcttttgaccagataatagttcaacaataacgacaccaaaactataaacatcactcttctcagtaaattggtttgaacgaaaatattcaggatccatataaccaaatgttccagatactaaagttgttaaatgtgtctgattttctgataatgacctcgaagttccgaaatctgcaacttttgctcgatacttttcatctaaaagtatgtttgtagatttaatatctcgatgataaataggaacagaagcagcagagtgcaaatagaaaagagctcctgaaacttctgtagcaattcgtaagcgcatttcccatgtaagttgaaactcttcatttgggtcatggagataatgataaagtgttccattgggtatgaattcgtaaactagaagaggaacctctgtctctaagcaacaacctaataatttgaccacattcctgtgattgatttgtgaaagaatgaaaacttcattaataaattctgtgacttgacccttgtttcctaatttagatttctttacagcaacaatttttccatcttctaacattcctttgtagacagttccttggcctccttggcctaaaactctgtttgcattgtaatgatctgtagctttttctaactcctttgagttgaacagtttggttttatgatcaacattgatagtttgttgttgtaataacagtcccccatttaatttaaagaactttttcctacgtttggtgtcttctcttctctttattaacttgtataagactaatccactaaatgctgaaagtaatgctccaattccactgctaactcctgcatg

SEQ ID NO: 97572 - DNA, 793 bp, Cannabis sativa
  modified_base (277)..(277): a, c, t, g, unknown or other
attattgattgtgtattgattattatataggaaggattaaataacttgaatatactgtacatttctagctacaattattaatgagtagaaaataaaattgctaggggttttttggcggtaataatacctaagctataagtttgaaacatttataagtaactaactgttaagtgttaagtaaattaccacgtgcccatttctaattgatcaaagttattaaatttgttttttaaaaaaattaatttaaatatactaataagaaaatgacacgtggatnatgacttaacatttaacggttgggtacctacagagtttcaaaaatattacttaggtattattagcaccaaaaataaaacttaggtatttatttgcaactggaagttaaacttaggtatttatgttgctaattactcttttttttatcaaattttattttgtagatgttttgcagaccattttgtatatgagttggcgtacagttttttagtgctacgtgttgaatctctacctctttcagtgtgaagtttgaagacgtatagctttattgtctaaatttcatagggtagttttgtctcatgttgctagcttactttagcagttcatagtttgacaaaacatgtcatttggttatataatgagctatcagaacgatcagccagaaccttctcacgaaaataagaatggaaggcaatcattaactgatgaacgagaaatttttcataaaaatgaggagaatcttgggacttagcctggagaacaaaggtcaccagcgaggaatcaccaacgttcttcc

SEQ ID NO: 97573 - DNA, 815 bp, Cannabis sativa
tctggttgattatcagtgttgagtgggtggacgatcatgaactgggtttgctgggcaccaatttgttcgggggtgtttcattttttattgttctgatttttattattatgtttaattattttgtggttattttatttttttctaataattaatagtgattattcactaccttattagattaataggatttgttattattatcctgcttagagaaacaacttttgtttcctattggtttgttggtatatcatcaatggatccaaattgatttggtaatgaggtattgtctctctctctctctctctttgggtgttaggagatcttcatatttttattggtttttgttatgtgattcaatctctcttgatagagcactagtgttatttatcttatttatgatttaaataatagggttttatgtctcaatttttattgagatcattggttaatagtcatttatggttgtattaattttattttggcatatttaattaacaaaatgattttattatacataattaatattttggttgaggtgtaatatttattcctttcatattttacaattatttattgagttaacatctatctacaaaattaaaaaaaaaaagcatgggtgaaggtcattaaaatcatttagcctaagccaaacaaaatataggtatacaagtctgtgtgaaggcagacagtaatttgctttctgaccaaggccttcgtcttctccttctctgaacaagcatgttggcaactcagatctcctcatcttcctcttcgaacttccagagtagtgatgagtctcttaactccttttccca

SEQ ID NO: 97574 - DNA, 1201 bp, Cannabis sativa
ataaacgcgggtaaactataaaagtctttcctaaaatttcacagcaaaacttttgggggggaaaatgttatacccaatttttgagaaattaaagaagttaactttaagactttaactaagaagcaaaagacgaaatagaggctaaactcgactagagtactaaatgtcaccttgtttgagtgccacatggtggaaaaaatgccatatacggccactgacctgaaatagtgtcagtggttgcatacctagggtttcacccaagacgactttcttaaatatttcatgtaaaatcaagtcaaaatcaagactctagataggtcatttcaaatcctaactcgaggaagaattccaacaagacactaattgacttaacctatttagaataatgaagtataaaggacaaggcaacaccatcacggctagaagataagtgccatttgtgaccaaggcactccaagatgtcaatggtcgcatagggatagataaatgaggtttgtgtcagtagggcaagacatttggccaattctcgcgtgaaacttgaaggaaaacaagtcaaatatgaaaccaaggcctaacccttggttactggtcgcatatgatgagtaaaatggagatggaatacaaccatgactcttcctagagtcattggttgcacacttcgaggtaggttagcacttcatgtgaccaatgactccttctaatgtagtgcttgcatgaaataaagaagaaatggattacgacaagcgatattgaatttcacaaagccaatggttatatgttactaaaatcaagccccttggaagttattttgggggagaataaaaggccatatgtgaccactaccaaatgtgcggtggtcagtgctcgtgtggctcaactaagggaggcttccatagaaattttggaagcttaaaaccctacaagtgtaaacgaacttccaagatattgtgaagtaaattccaagttatagtgcaagatgaagtacatgactagtgaccactcaaagatagaagcttctagagtaatttcaaaggcacaaataactccgtaagtcaagatagatatttattttatataatctatttctcttcattagattgtaaatgtgaagcattatagagtgcatgtaactatcgttgggttttgtgccctaaataaaacccataatcagatttactaataaagatcataaataaaattt

SEQ ID NO: 97575 - DNA, 618 bp, Cannabis sativa
gagattttaagagcatatcgtcaacatatacctccatggtcttccctaacaagtctacaaaaatcatgttaactaatctctgatatgttgctcctgcatttatcaagccaaaaggcattaccttataatagtacaaaccttgatcagtaatgaaggaggtgtgctcctgatctggctcatacatcgagatttgattatatcccgagtatgcatccatgaagctaagaagtttatgacctacggtagcttcaacaagttggtcaatgcttggtaaaggaaagttgactttgggacaagctttatttttcaaatcagtaaaatcgatgcatgtgtgccatgagctgttgggttttggtacaagaacaaaattggctaaccagttcgggtaaaatgactcctttatgaagccgcatgctaacagatgatccacctcttccttaagcgcttggtacctcgcggggtccattttgcggcgcttttgtcgtactcctcgcacttcagggtcaatgttcaaccggtgacacatgacctctgacaatattccgaccatgtctgaatatttccacgccaaaacatccagattctgtttgagaaaagtgacaagcttttctcgctgct

SEQ ID NO: 97576 - DNA, 1681 bp, Cannabis sativa
ggttcgggaatggttggtattggaacgggaaaaggcaaggcaagggttgatgggattgtgttgattggttgttgcagtggaggtgtggacgaggtgttggccggagctttacgcttacgagatttggatttgcatggcgcaatctcacaacaataagctcgaaaatatctgctacacaattcacaactcaacaaatcatcattagccaaaatcaatcacatcaagttcaacaacatatcaactcattttagtgacaataacaaccattcaacttgaatatccaccactagaatcaaaatcaaagttcaccacaattagcccttggatattcaatcttctaaacactgtaaattctcaaaatgcaatatcccaacactaaaattatcatcattaatcaaaaatggacagcactttcaacattattgtcacaatattttaaagcagaattatatcccaacaatatcacaaaccaaaataagagagaacgatctcaccacaacaaaaatccaatgaatgcaatgccgaagtcggcactgagatagtgtgtaaagtacaggggcggcttgtgaaaactcctcctattgtggcttgggtgctaggcggctgtggggtttcgggcatctgggttcgggggtgtgtggtggtcgggttttggtgtaaacggagaaaggggggggtcagttttctgggtttcgcagagatgcaatggaggttgaaggagaagtctgaggtgggtcgggtctgaggttaggttcggctgtggggttcgaaagaggtttggtcgagttttgctagggtggaggtggtttctgactggggtggtcgggtctgtgatggcggcgatggatgcttgggtttgaggataggctgacggcgatggctggggtggaggtcgaaggtggaggctggggacgaaggtgaagaagatggggctgggggaagtcgggttagggtaattttttttatgtaataatagtatatattaaaataaaaataatattaataaataattttttttctttttttttttataataatagtaataatatatataagtaaaatatgagtaatatgtaatagatggacctttcatcgcgtaatgtgagtgatattacacatgctgtagcaaaatttccacaaaagttcagcaaaaatcttgctgagtgctctttgaacaggtatcacttttgctaaaattttgctagaaaaatgctgcagcaggcggaggttctccacatgaacgaaaatttctaatgtgcttcacagaaatgctgcagcaaaattccataaaaaatttagcaaaatctctaaacttccaaatcacctctaaggcttcaaattgtgttccaaaaccacctgaaacatcaaaccaagtgtaaaatccacccaaaatcttaaaataaaaatgaacaaaaataaaataaaataaaataaaaataaaaataaaggaaaatgttgaaaaatatatatattttttttcttcttttttttttcttttctttcatatttttctatatttttttttcttttcctttttttttttctctttgtttttttttctttctttttcttttttcaaaaatatttacaataattgttcttcttccaacattggattgcctaaaaatagaattgacaattcgaacacaaggcaacccaaccaccttccgcttcatgcatc

SEQ ID NO: 97577 - DNA, 929 bp, Cannabis sativa
aaaaaaaaaaagttaaaaaaattgtatatggggtaattccccaattataggagaattatgtaaaaatcgctgccataaggacttttataaagcttcagtattttgtgtaataagcgattttttttttaattttattttttttcataaatatatttttatttttttcagaaatatattacctattatactatatacactattttgatattataagattttattatttctattattaatgtaataatttatttaacttttaaaaaataaatgctttccaaaaaacttttaaaaataaatgatcattttagctgtcactaactcaaaaaggaaaagagaaaaaaaaactgaaagtatgaagttgtaacaacaaattccatgaaaaaaataatgtagcagtacaaaaagttaaatcaagttgtcaaaataaagtaaaaaaaatcgtaatacaaaaacatattgaggagttgttattgttttgtatattgcaattaggtcattgttttgttatttttctgttgttttgcagttatcattttgttgttttatagttgttttcatgttatttgctaagttattttagagttagtttttagttgtttttttaaaaaaatttattttgctaaaacacatatttttgaaaacttaatacagtaaaaatgtatataaaagtgatgaaaaataagtatttttgtaaaattcccttagtagtatgagagctcatatatgttatcctatcttaaattataccaaatatctttttgtcacatcatgtcgtattacactctacaaatagcactaataaaaagaaaaagaacattgttatcgtgcaccttaaggtgcctaacacctcacctagggtcggccctaggctaaggtgggctaggcctgtgcctagggcctacctatcttagggacccaaataaaaaaaa

SEQ ID NO: 97578 - DNA, 976 bp, Cannabis sativa
atactctatttgtgacttaggttagctttaggggcgacatttgttgcccttaatagtactaaaaaatcattcctagctgacacaagtcacctctaaaagaatttttaagactgacaatagttacagtgcctaatagttacccttaatattaatattcaatttaacttttaatttttaataattttaatattaaaaatattgaaaatatcaaatttaatttttatttttacaataataataaaactaaaatcacaatatgacacactaatcattttgttttggtattatatatgcagctgattgtttgtatgactataaaatataaattttagtaggagtagacatgatttatctaatttaattataaaaaatttgatagttggattctaattaaattgaattggttattagatgtcaatctaaaaatattcaattaaaactcaatatctaattcaattacatttaatatatattaaatgattatttatatttatttgtatctatactaacggtttattttttttattattttattttaaatttgtaatatttagttgtttcacatatttattttcataatattttgttttattttattattttatagtgttgatttacttatttcaaatttttagttgcattaaaatttttatatgcattaaaattaaaattccatttaatttattaataattcttttgaaaaattaattatatatattatattaaaaatttcgaaataaacaatatacattacatttttctcaaataatgtttatactattatttaatcatattttaaaaaattaattaaattatacatacacaacttgccaaattactacaacaattttcacattttctctcatcttccactcaatttctcaaatttccaattaatttcctgaagttaataacaattttaatctcagacaattgatcgacaattactatagagacattcgatgaggtgcgctat

SEQ ID NO: 97579 - DNA, 607 bp, Cannabis sativa
tttcaacctcgtggtgaacagcaagctcgattccgtcgtgcttctcaacgctgacagccatccttactgattcatcttcgtccctaccatctccggctttcaccctttctcttccgaccgcctcggctgtccccctgccttctgcaccataaccctcatcggcccccgtgtctacctcatcgccagccaccttgttgtggtcgaaatcttggtaccaacaagtattaaagtacccttggaacctataactcaagtcattcagcttgaacaacctcagttcaaccttgctgtcttcgtattccacgatcaatgactccggtatgaacccattttcgtctcccaccaactgaagtctcacgtgagaaagtaaggaagcttcagcagactccttatccacatccaaaagtccaccacaacactcacctattttcctgaaggtcttcatgttccataggctcaaaggcagtccgtatataccaatccatgagtctctgcattcgactttaatgccttccttttgagcttcccagctccattgagagagagagacaaccgtctgtgcacctggaactctcaatcgtttaataaggattaaagcatctctttc

SEQ ID NO: 97580 - DNA, 622 bp, Cannabis sativa
tgactctaaaagcataaagtgacatatgatgatggattctaaaacggtttagtgacccacactgaagtttcactaaatactgtctttccagtcacccacattagtgacgcacaatgaagggtcactaaatattttgagtccctcaacacgagtcattgaaatctattttctggggcaagaggtccaatctgcatcaagaaaaaagtaaagcttaaaagaggtatcaggttggatgaatagaccaagatgtaaaagataactgacaaaaagagaagataatactttttcaaaattttcaatgactaacaattaaaagagaattcaatgcaaggaatatgaaggctttagtcacattcaatctaaatgtgaaaacactttgaaaatgaacaaaagttttataatgttacttgatgatgattcaaaaagtaatgatcaagatgattaatttacaaaatgttgctttaacttgtgttgttcctaacttcttttgtgattcacgggtgaaaaaaagaatggtatgtctaaataatttcattaaggaagaatattattctgatgaatttgaaatatgtgaggagtttgaggctgagtcttacaaggttatgtatgaaaagtggatata

SEQ ID NO: 97581 - DNA, 999 bp, Cannabis sativa
gtatttttattgtttttgtgcatttgtgaaattaacccaattaataaattaactaatccttttctatagttaataacaataaaattattcctttaaaaattaatggaagaaactatatataagaagtggaatgttgcatgttgtgcaatgatgatgtttgagtgaaaaataataatatcaaactttattataaattcaaaccaaaaagtcaaacaaatccattgtcacatttacataaatggatcttcatgatcaaaaatccaccaagtaactttttaaagacaaaaagaggctatgattctaattatcccaatttattatgaattttaatattaattggatcaatatgtcaaacacataacataattataaaatctatttatgtctcctttaagcttagcaataatccatatttttcctttgttcaaagtggccgacattccatttttgaagatatcttcatgattttaagaagaataaatgattcaataattaataattaaaagaataatattattccttgctatacatattatattgaagagtaatattcttctatataactacacattttaatttgtaagattgaagaagttgtttatgtgtgtatgagtatgttattagaaattagagaatattaatattcaatttatcaaattagtttgctcacattataaaaatttatcctaaacaaatttatgcttattataagcattcttttagacattaatgatgtccacactccttaagaattgttaataattttttacactaattattaaattaaaacatttaaaattcaatatttacttatattaatagtggaatactactcataatgatattaactttaaattactaggagtgaacattttcacccagaaactcactcactcggtaaattcaactgactcgaaccaacaaaacttgtgaaaattaggttttgaaaaatactagacagatttgggctcaactcaatacgggtcatgttccagttct

SEQ ID NO: 97582 - DNA, 758 bp, Cannabis sativa
  modified_base (73)..(82): a, c, t, g, unknown or other
aaatttttttaattaagtaacataactgataatgcatatattgtaatttattatattcttaaccaaaactcannnnnnnnnntttgagtgtgtctatatataggttagattcgtatatttgatatatataaaagttttttattcccaaaccttacaaaaaatatggtgtgtgaatcactttatcataactaaaacggaaaacaatcaatttcttattacaaccattttaatttaaaatataaaataaataataataaaattaaaaatatttataatattttaaatttaaattgctttttatataatatctacataatttttctttttgttttaatttaaaattaaatcaatgaatttaaaaatatgattaaaaatatcaataatattttaaattaaaactaaaatttttgttatataaatatctatataatttttatttttaaatatataataatattataaaattaataaagaataatctgttaagtaatatgatattaagttaacgtagaaactcaaaaaatattgttaaactaagaattccgttacatagtcatattttatatggaataaatatatttattcttacatgaaaaacagaataaaaatcacattgtataaattaataactttataatatatagtgtggtgcggtttgaaccgcaatgattaaattcaaaccgcaaattgcaccgcattatgcggtttggaaaaaatacaaaccgcaaccatactgtaaaagattttaaattttaggg

SEQ ID NO: 97583 - DNA, 733 bp, Cannabis sativa
tgttgcggattagaaaacctgatcaagattatcataataaagattcaaggacaacaatcacaatgacagcaataacaaacaattagaaaagcagaaataagaaatttaacaagagatgagtttaatcaagttgaatgaatcaaatatgtcataacattgcaatgaaatctgagagagaaagaatacaacttgaaatcaccaatcccgaatacaagaattacaattaaagctcacactgagagaagtcactttaggagtgaacaatctctttttacatccctcaattcactcaagaactagctataatttcaacaatgatcatggtgatttcctctctttttctctggtttctctcttcactacagaagctctctctctcaatctgggacacttctaacttagacttgtgatggtagttgttctctagccgtgtctcgattgagttggggagaggaggtatttatagttatgacattttggacaagtcattaaccataggctgagctgtcaaaaacagttaatacagttggcttttcaaagtggttaaaagaccaacaatacattaattaaatataattgtaaaataattttaattaacaaatatttttttaattatcaaagtatcaaatataatagagcattttttatttttacacttcacaacatttttttttttacatttttacagaattctacataaaaatccctattgcaactagcggagcaacctaaa

SEQ ID NO: 97584 - DNA, 524 bp, Cannabis sativa
aaaatattctttgaacgtaaaaatataattattttacaaaaaatagtgctttatgtaattattccttaaaagaatgattagagaaatcttatctttcttcaaatcttcatagaaagcctttctttataggagttgtttgaacatctcaaaaaaattaactagttgtccaataagtttcactaaccaattactacacaattaaaaaataaaaatcatagtttatcctctaatttccccgaattatcattattccataatcttttaatattagttgtgcgtacatttaatattatcattatcatagtttcattatttttgcattatctaattattattatttttttgaaataaaggaatattaatttctattaataaaaggcacaaagtcagcagatcaaaagatcaatacaaaattcaaaactaaagaccaagaggagactcggtcacgaaattttagcattatctaaaaaaagaacaatgtatacgagtaaaagaatgggctaattcattgaaggatttctctt

SEQ ID NO: 97585 - DNA, 879 bp, Cannabis sativa
aattgttgttagtttagttaccatggtctggtaaggtttcaccaacccgtgaaagagacgagtcgggcccgtccttgacccgacaatgaatacgtgtcagatggtgataggatagagacatgcaaagtggcgtgggcagctgagagagccaaaattgatagtgacaagggtcaaaactcaaaagccaaggaaatagtagagtgagtagagaggttgaatagtaaggaaggaaggaaagaaagaagataaatttgttgtatttgtaatagtcagaattttgggcagcaaaattattctcttttgacacagacacaacactatttagtttcaatttttggtttgcatgcccccaaacccaattcctacttcttcttgccttgctcgccctcataatcctatctctgtggccccatctacacaattagacaatgactcttcacttccacattaccatataataaactcaatctaaaatatcaagcttagttttgttggtccaatcaactaagatattattattactacttccaccttctatgatggaatgataattaagtcaattgttaatgtgtaatttgttgataaatttttataataggataaactcatattgtggattcttttttttttgttcccaagtgcaagcagaagcagaagcacgagctcacactctttattattttctttctttcatgcccatgctatgctgctaccaaatcccactcttgagacaatgctgacctcttgaaaacccaaaagttgatgagtttttattttccttttggtttaaaggaatcttctcaaatttcaaaagaacagtcctttgatgatttcacattcagtttcaactcaaaaatcattgatggggacaaggccaaa

SEQ ID NO: 97586 - DNA, 698 bp, Cannabis sativa
gggaaaatgagaggggtatttatactgtggaaatggaaaggcttcaaaacgacgccgtttggattgttgaattctgtttttttttaagctaagcctcccaaacggctactactagtagggacacgtgtcattcttgctccttctagtaagcatttctttttcttgtttagcactattaggaggtgttactctataattaattagtaatattctataatctttattaaagtaaaataattgagacttgatattacacatcacaaagataataggcatcatacttgtcctttaacttttttttttttttaagaaatgttaaaagatactactagtgtctagcacactactacatgttaatatcgctattagtataattaaataaggaaatttgaaattatatgcttaataaatccagaaattggtcccctaaactaatactatgcataatttgtaaaataggataactttttctaaaacccaattttaccccccatttacagtacctgcaatcgggcccatcgaaccccccaaatcccatcggaccagacacctatcggacccatatcgggtcgagcatcggacccatcaggcccttgctatttgaaggcaacagggaccatcggacccctatcggtccgagcatcggacccatcagaccccttgctatttgaaaacaaaagggaccatcggacccatcg

SEQ ID NO: 97587 - DNA, 630 bp, Cannabis sativa
  modified_base (31)..(68): a, c, t, g, unknown or other
atgcaacataaaatattatttctgatctttnnnnnnnnnnnnnnnnnnnnnnnnnnnnnnnnnnnnnntttagggcataaaatccaacagtgagatggcaaggtgggatgagcggcattcttcggtgctggcagggtgatcgcgggcgtatcacgcgcgcggatgggggctttgagaccgagtgcctggtgctcacgagcacccactcgacagccttgaatcccgattttacaaaattcataacttcaccaatttttattggtagagttaggctttctctctctagctttctttcagctctttgagctgttgctatggcgaagacgagggcgacgaagcagggcaagccaaggactccggcgaagaagaagaaaaagcgtgggcctggttcctcttcggaagtgaagaaaaccaagtctatggatgaggttttagggattgaaccgatcatcttctcggaagattctaaatctggtaacgaggaacagggtactgaacatgattatgagactcaaagagggcaagaggatgcaggaagggacagtataaggcaggatttcgctcaactggtggaaatgaagcaatttcgagaggctcagcaactctcagcagctgaggttgcaagaggta

SEQ ID NO: 97588 - DNA, 599 bp, Cannabis sativa
tacattttttaattaattaaaatgctcaatggattcaaaatttcttattggccccgccacttgggttgtaactaaatgccaatttagcaggagacatatgcgtatgcgtgtggaatttacacttgattaggtcttttaattattagcagaaattattgtggaaacaccctctattatatatccatcaatttctctgcttccataatcatatatatttgaaaaaattattagcagaagaaaaaaacaaaaaagacatttgattaggtccccatgtgtttagattcttatgagtatatctaaataatattagacagttgcactccattcttgtatatagattaacttaatgcctgttcgggaactattttattttttgttctttttttttaaaaaaaattttactgaataataaaaccttatcgtttcttcatatttttgattaattaattaaaaaattaattttttaatagttaccgaacaatactttagtttaagctatagtatgatgaaatgaaatgctgtatctctttctaatttggatacaatgaaataacggagaaacgatctaacagcctacattttggaatggaaatatttta

SEQ ID NO: 97589 - DNA, 1847 bp, Cannabis sativa
aaaaatatatattaatacagagaaaaaatgtataatagagttgggtgaagctttgagcttacgtgtttgacgagagagagagagaaatgcggctgtcactgtgtggagtcggacgacagagattagggcgattaggttatatattcagctttatatttattttttccccatattatacgcatttaggattttattttattttattttatttttttttgaagaatttaaaaaattattttatttttgaaataatttaaactttttgaaagaaaatataatagattcgccatgaattagagaatagagattcatattggttggtgacatttactatccacttaaattgaggatattttctttccttgttagattgagttaagctcaataattttcctaatatgtatcaaaatagatcctcatttgtaatgttagctgttgttaatatcgaatttttcatagttacttggcatgattcacgttgtgtgttaacagatacagtaatattaagtaagaacgagttataatttggttgtgtcgtagaatgtgggtaatcatttggagtcattttatgagcagtttaggaaacagaatcctccaattttttagggtggtcctaacttgctgaaggtgaagcaatggatgagcacgatcacttctatctttgattttatgagggtggaaggtaataatagtatgtgtgtgtgatctttatgttatgggaagatgcgagaatttgatgagagattgtgtcccaaggtcatgaccttaataccatgacttgagatacattcaaggctttgttttatgagaatattataataaatctatttgtgctgcaaaagcggatgagttcgtacagttgatctaaggtaacatgtcggcgaccgagtatgccaccaagtttggtcgcttagctaagtttttctttgatgagatggccactgaagccttgagaaaggcaaagttcattcgaggttttgaagaacatattgctcaagatgtgattgtaactgtcaatcaacctaaggttgtgcgatcatatgctcaagttgtagaatcgattcttattgctgaaggagctaaggatcagatttaaaagaaaagtaacatcaaggcattttaaaacccatttcgaacaaatcttaatagaggaacaacaaatgatcctcaaagggcaataaatgttattataaacttatgctttcttaatgtattcaccaaattttttatcggaagatttttagttgatagtaattgatatgtgtaatttgttacatgttcatttagattagagatctatcattcttcgtgcttctttgatacttcaacactggcgacttattggtattttagttaaaggtgccattagtatttttattcttatttttgtaaacaatattgtttgtctatcttgttgattctgctcttttgagtgatatatcatcgactattgtctaatttgtctattaattttatttttctctcaaaagaaaataaaaaataaaatcaatggccgagatctttcatcctttaccatgcgtatggactagattaagcaacatagtaatgcacaaaagttatacgttattcattgtaaccaattccataaaattaataacatactttttaaattattgacaaatattaccttacttgcaagtataaagactctgattcgtggttttagaagaatgtggtgaaaggcaaaactattttaaggaaaagtgcttgtaaaatgatcgtggatagaaagtgttgacttcgcttttagtcaacgacaatgagtctttttaataaccgataaacgatatgtcgtaatgagaatatatataagaaagcaataataa

SEQ ID NO: 97590 - DNA, 702 bp, Cannabis sativa
atcgttggaagacacccttgacaagctcgccacaccagatttttcattttcgggggaagcttcagcgcccaaaatttcttccaaaaaccttcaactgctgctgtatcttgagcattctccccaagcaaatcctgaactattttatatgcactcttcactgtaaaagagcctgagacttcgccaatccaggtgagtttatcttgcccgtgaagatgttgtataggaatctgaaaaatgagctgttggtcacgctgttcaaacaggtcagccaccaattcttcatcccatcccgatccattaatctccatcaggttgcaaaccgaggcaccaactaatgcagggtgttgagatgagacaaaagggtcctgggcatcgggtaaccatggtgcacccagtaccggaatagaagtgccatctcccacagtccaacaaacacctttagtcaccaattgacgagcttcaagaacactacgctagacgtaactggggttattgccaatatctgctgagaaaaaagagccccgaggataataccttgccttaaagatctttgaaacaagcgtatcaggttgtgtaataagcctccaaccttgttttcccaacaacgccaagttgaaacttcttaagttatgaaagcccatacctcctttagttttgtgtttacaaagtttcttctaagacatccaatggatacctttggga

SEQ ID NO: 97591 - DNA, 652 bp, Cannabis sativa
ttattttatagccgtttcaaaaaagaaaacaatattatttgatagggtttttttttttttatttttacattttaaagttttctttttttatatttacagagtaatctaaaccacagtccaaatccacataacaattcatataaaaactatcggaacaacacgtaaaaataaagattaaaattataaaaaatgataatatggtaattctcctattttatattttctgcacattgttttttatatttatattatgtggtctatatgttgtttttatggactttcgtacaaatgtaattaaagaaaaaaattgtaagaaaaataaatcatagtccctaaaaatatttggaaaataccattttagattcaaaaagaaatcatttgtgtctttatcccaagatttagaacttgttgacccattcaacaaagttcatactcttttgtggatttggaaattagatccaatatggttcaaaaaaaaatcccatatcctcattttttggggtttaaagttgaagaggaaataattatcaaaaaaaaaaagttgaagatgaaatttttggcatgaatatttattttgttgcttaaaaaatacctaaattttaaaaataaggcaaaaatattcaaatagtgtatttatgctactcttgttggt

SEQ ID NO: 97592 - DNA, 817 bp, Cannabis sativa
ccctaatctacatactacactattattgtactcaccatcataccctatcgagcattcacaaaaaaattagcaaactttatcatggcatagattttaagcaacaacttaaacattatcgtacccccatcgtaccattatcaactattgtaccactatcataccctattgaacctttatccccaacctccagattacactactattgtatcaaccatcgtaccctatcgtatcctgtctagcattcacaaagaaaaaacaataaaaaaccacaaatcgaactttaaaataataatataaatcatcaaactgactaataacaatgacattcaaataaagtcacttacccattaattttcttcaccatgaaccaatgcaaaatgtgacgaaaatggtgtttctcctccaagtactccctaaaatgtacctcgagtggcgaaggagaacgaggatgacgaggaagttgatggcgagagttgggtttctctcgatgggaaattaagaaggaaatatagagaaagagagaaattgagttagagagaagttttcaatgacaagagtacatatttttgagattgaaatgaaaatgagaactaatttcatatggtttcaatctgaatttatttttaaattattagcaagcatgaaaaattaaatttcccaaatactaagcataagtttggcatcataattaaaaaaatatttttcgtttttaaaaatagaaaattattttttgaaaagagttaggcatgcctggtcttgttttttgaaaagagttttctaaaaacaaaattacaaaaaatatgacttttaatgataa

SEQ ID NO: 97593 - DNA, 1053 bp, Cannabis sativa
caaaaaataacgccaaacaagccatattattttcaaaaaacaattttttgtttttaaaaacaaaaaatagttttttagttatgatgccaaacatgcactaagtttccatcaatatgccagttgtcttgatagaataaggctgacatcccatcaattcctggactaccatctccattcattattttctgagcttcaaaaacatcctcagcagtaaaatctttcaagagaaaagcattatgctcagctgtaacagttgttggaatgacattaagaacatgttgcaaggcccaatggtcttcattttgagcttggaagaggttttcaaaatatgatgcaaccaaaccggacaagtcatctttcgaagtgtagacagtaccattgtcatctgttaaagatctgatcttgttgttggtgtatcttgctgaagctttcgcatgaaaaaacttggtattcctatcaccatggattgcagccaatcatttcgtgcacgttgctgccagtattgttcttcgtttgcaagcaattcatctagaatggcctctgctttctgaacttgctgagcatgtgaattggatggtgctgaagtgttcgaaaaagggcagtaacatcagcttgagcagaagaaattttttgtttaaggcttccaaatttatcacgatgccaagatctaagatcagtagcacaatcagagaggtttcgattcaacacatcaatgagattgccctgagaaagattccagcagtgtgaaataatgtcagagcattcaatttcctaaatctacattttttcaaatctgaagcgtgattgatacttgacagcattactgatggattgcaaatttatgacactgaggattgctctatggtctaatccatagtagtccagatgggaaacttgtggcaagttcaaactatcattccaaactttattgataaaaacccagtcaagacgctctttcaaagcttgtggattccttctatttttagtccaagtgaatgctgaacccgtgtatggaagctcaagaagagagcaaagatcaatagttgttcgaaa

SEQ ID NO: 97594 - DNA, 825 bp, Cannabis sativa
aaccttgtttatgcatgtatgaaaagagttggagttaatttggttgaatttgagtatgtttatgcttgaatctttgttgtagtgtttctactgatttcgatttgagttcctgctgaatttcttaggttcaagagcatgaaaaaattaaattgttcttggagttgcatgttaagtgttttggtgttcaatcttgatagatttgagtatgatttgcatttttatgttgtgaattatattgttaagttttgattgagtttctagagtattttctagattagagtacatgttttattggctattttattgctcggaaatattggagttaggttggtttgaagctctagtttaagagcttgagttttgttaatttcgagcaatctgatttttgaggtttattgttggaattgatgcatgaaatatgtgtttttgaccctctaatatatactagcaactctattttgtgattctgagagatatgtatgtttggggtgagtttgggtgagttttggtacttattttcgaagcagaaaattgggagcttgtttggatgtattttcaggttttcagtttttaaaagtgagaatagaaaacaattttttgtcattttaaaaatttaatggtgtttggcacaaatttttaaaaactatttttagatttttttcctataccatgacattaacccatccggggccaagtttgggtatagtttcaggtctaggatccgagtatgtgagcaaaagataaaatataatatctaagacaaaaaaattgtttttgaaaattgaaaacaacattttgatgttttctgttttctagttttttaaa

SEQ ID NO: 97595 - DNA, 553 bp, Cannabis sativa
gtgcagtatattagtttatggctactttctcatgctttctaagcaaccaaacagccattaaaaccaaaatactccgagaaagtaaagaaaagaagaaaataagtacctgctgcttccgagactcttcgtccagtgccttcctacgttgttcctcctcctcctcttcttcttcttccatcttcttcttcctttgcatctccatggcctcgagccaggccttctctctctcctcgaactccttcctctccctggcggacctctctgcctcttcatgctccatcaaactgatcctcttctgctcttctggatcgttaagccacgcctctacttcctcccgctccttcatagctacctcttttcttatctgcttcctcttcatcttcttcaaggccttcctcttctccttcctattcattccattctccaaagctaagccctcaaattctggctgcatttctctttcttcttcctccaacccttcggctttcgctatggctgttacttcttctgccattgtttccttcggtcccttcccaaagcccaagccaaaatc

SEQ ID NO: 97596 - DNA, 789 bp, Cannabis sativa
ttaccttttttaaggtaaaaaaaagagaataatttatttttaaggagaattacatgtgtgtatatatatatatatatatattaagttattgttatgtgcgtgtatatttagttatattattaattttatttttattatgtgtatttgtaaaattttataaattaaagaaaataacttattgttaatttttttaaaatttttttgaagaattttttttttattatttttatacttcaaaataattttttttttgtacttttacaaaaattcacatagaaacacacatagcaatcaatgtaggaacttgaatcgcaatcaaaatccacatagcaacccacatagaaaccacaagagcaactcaaattgtaaatttgaaaaaaaaaaataatatattagtaccacaagcaagggcggacgtagttactacaatataggaccatggcccccctagaatatatatgcttaattagatttatatatgcaaactaaatttttttgataattattgtatgaaattttttaaaaaagtcaaactaaaatttataaatattaacttctttcaatctatatgtatttactttatttatttatttattttatatgaaaaatttatttgtttttttttctttaaagcatttatttcttttttaataatattgattggcttagtaagacatacttttttttttatttatttattctttaataatatatattgatttgcttagtaagacataccatttttttttgaggtaccactttaaatttttttaattgtgtataaagtga

SEQ ID NO: 97597 - DNA, 1436 bp, Cannabis sativa
aagtgatttatgtctctcaatttcgattacttggttttttttctctttattatgcttattcaatcttacaaactacacacggctttcatcaaagactgataatctttaaacctatgtttgaaatcaaatgacatatatattgaatttctgtaattgagtactttcccagttatttatagggaggagggctttgagatgtatcaagtttgtcattgtttaaagtatgttagagttctataatttcttgtagtagtactagtattgaacaatagattgctgatataatttctacattaacatagtctttgaaatgtaaaagcaattttggtattaatactttggctgtaattgaaagttaaagttgctaatttatgtatgtactgcttaggtaatgtgagatctccattggatttgtccgaggaggaatggaacaacgttatcaaaacaaacttgactgggacttggttggtgtcaaagtatgtctgtatacaaatgcgtgataaaggtcatggaggatcagtcattaacatttcttctattgctggtcttagtcgtgggcagttgcctggtgctgctgcctatgcttcttccaaggctggtgtgaacacgttgactaaggtaatgtcctgtaacttaacgttctatataaataaataaaaaatgactactaaatgaataacaaatgacttttgttgacttgctgtgcattcttggcagcagatgatattttgggtatatataaaaacatttctttgtctgtgctgcttattaagcgttgactgtttcttgtgaaatcatagcaagtatgaattattattattattattttgagggaatgatgaaagtgagctgccacttgagaagcagggtagcttaagtgggttgggttgaagtcccactaaataaaatcttataaaaatataagtgggctgatattacatacactgtaatgattaccttagtaccgaaagaaaagaatgacttgtgttgaacctcactaatagagtaatgcatgagaaatgactgacaggttatggcggttgaattgggcgtacacaagatcagagtaaatgcaatctcaccagggcttttcaagtcagagataacacagggactgatgaagaaagattggctgtccaatgttgctgaaaaaactgtccctttaagaacatacggcacctccgatccagcgttgacatcgctagttcggtatttgattcatgattcttcagtatatgtttctggaaatgtatttattgtagatgctggtgctactctgcctggcgtccctattttctcatccctctaagtagttgcagtgccaggtatatctgtgtctatgtaattttttgtcagtcttgaatacaataaagctatttatatctttgtaaaagctcccaacaatagaagatgttgtattacttgttaagacataa

SEQ ID NO: 97598 - DNA, 1867 bp, Cannabis sativa
  modified_base (952)..(958): a, c, t, g, unknown or other
atgaatttaagaaatgggaacatacaagggacacgaggatgatgatgatgatgatgatgatgaagatatgggctggtatggttaccttctaggtttgggttttcttgaaagagaaagacggagggcttcgagagaggtaggcggaggagaagtcgaaatcggtagaggcagatggaggagaagtcgaattcgaagtcacaaaatgcagaatgaatctgaacagtagggcttcgatgcgtgggtgtattacaatttgggtctgtggaatccttttgtaattataaatgtatcagttaaaaaagatctaatataaaatatccgactatttataagtgacgctaatagtctattacatttttaaaaattttcctatatcccgtcggttgtctctatagtgtcttaggtacaaacgacgcaaaacacatatttttagtgtcttttgaaaactgacagctcaattgattgggacactattcatgtcggtcaaccatgtgaatagtagtgttgaccgacgaaaataccccttttcgtagtagtgccaggaaggaggaagaagatggcgaggtcatggaagaagaagaaaatttgtctaagtctcccagtatgtagacttggttatttatttatctttcttttcttttctttttttaagaaaatggccctttggccaagacaatggtttgcccctggtggcacttttttttgtaaagacaaatttgcaaagctggacgaccaactttgcttttttaatgcctcatacttttaagtttaaactttaatatgtttatgtttgcttgcgtttcactcacaatttaaacaatcacatgcataaagtttattagggatttccattgctcatattttcctctaacgctaagtagttaattacctactttatgcgtgagaaacttatctgctcgaccctcaatctgcgagccatcattgattccannnnnnnatcataaaaaatgatcttattttaagaaaactcaaatatatttttaacgaacttgtcatcttgtgtatatttgtattgcttacattagtagttaaatcttctacccacatgtttggtttaagtattttttcaagacactttgatgtctcgtttaatacttttccttagcgcaagccgttattattcagctttatgcgctaattataacttttgattttcctttctcgtcagataggttttaaaccaaaaattacagttgtttgatccctttctcatcaaaaacgattgatcaaggcgttataactattcgacccctctttcatcaaaaaggtttggtcaaggagttataaaaatttgacccctctttcgtcaaaaagagtgggtcgaggcccttttttttaaaagtgttgggtttgcattgtactatgtatttccagattgattctagttgatcatacatatatgcccctcaagtaattttaaagggtttacactttataattacttgttgaaagaaatgattattttattcacaactgaagttcaaaatatttcatcagcaatgtgactcacaatcattaatctcataagaacttccccaattcaatcgtttattttatcaatcttttagaagcatttggttttgataaaacgagttttgattttcagtgtcaatccctaacatatttccacaatcgtttcaatatccagggtcaacccctgacatatcccagggttccaggtgaactaatcctggttttagttgtttgtctttgactgctactggttgacgactagctttccacgtggcagcttgatatggcaaccatagttggcagatttctactcacgtcgcaattcttttacaaaattgctttaccgaattaactaccccttgtattcttgtga

SEQ ID NO: 97599 - DNA, 768 bp, Cannabis sativa
aaggatgcggattttaacttcatccttgataacctggtgtcaaaactccatgggtggaaattaaaatcgttatcaaaggctggtcgtgctacgttgattaaatcggtagggcttgctttgcctgtttacacgatgcagacgacaaagctttctaaaaagcttgcatctaagattgatggaatggtgagggacttttggtggggctgtgaacaaggtaatagaggcatctatcttagagcctgggaccagttgtgccttcccaagtcccgtgggggccttggctttagaaagactgtggagatgaaccaggctttgatggccaagtggggttgggccctgcttactgaggaacagtcattgtgctgtaatgttctcagatctaagtaccttaagggtaaacagttttttgactgtgaggttaagagctccgattcttggttttggagaaatgtggtgcgatcaaaagaaattttaagaaaaggggcgtgcaagctaatatccgatgggagagagacaagtatttgggatgacccttgggttatccatggtacggatttttaccctaagtccaattatcgtcaacagcggggcttggaaaaagtgtcggatttacttttaccagacggaaattgggacacactaaagcttcgcaacctttttgaccaggaaactgtgagtaacatcttaagaggcggtaatccgagtggccagggaagggatagatgggtctggacaaaagaatcaaatggtctgttttcaaccaagtct

SEQ ID NO: 97600 - DNA, 795 bp, Cannabis sativa
  modified_base (754)..(770): a, c, t, g, unknown or other
gaagtggattcccaccaaaccaatgtcacatgcccatgaggaagcacacttggtcccaagtgaaggtgaagggaaagagcaagaagtctaagctcaaagtgaagaggaagtgcctccaataccccaagctcctcacttcaaccttgaagaagcttttgctaaccttaccacctccatgacttccaatttcaacaacttgagaggtgcaattaacaaccaattttcaactcttcaacatgagatgacaaccatacggagtgatattgccacattgaggggagacatgtagcaagggtttgacaacatgcaagaggacatggcacaatggagggcatacatggatcgttttggacctccaccaaattattttccttgcatttttattatcttttttcatttttactcatgttttcctttttttttttgttgtttgtgtgctaaggcttagtgccttttgactttttttattgttggatgttattttttagtattgttggatgttatttttgttagttttgttggatgttatgagtttgattttttttttttttaactatgcatggtatgtgttgctttatttttctctttattttgtaaattccttgccaccctttttgatgaatcaaaagggagagaaattatgtatgattattttttgacataacctcaatttcttttttttttggatatctaatcttttaatcttaagtacaacattgagggggagtttacaaaatcatgcaaggtaaaattnnnnnnnnnnnnnnnnnttgcacacattaagggggagctaat

SEQ ID NO: 97601 - DNA, 545 bp, Cannabis sativa
  modified_base (491)..(500): a, c, t, g, unknown or other
ttcactttgaacttttggcaaaaagaataaccaacctatgagcataaattacaatgagagaatgaacaaggtaaggatgcaactcaatagtaagaaaagccaggaataactcatccaacaaaatttcctggaattgtttaatctgtcagcgctcaacgccttataaacactacccgccatatctacgaaaagcttaacaactgccaacaatgaaaaaattaaacataaaagaaatatcacgatattcttatcatctatcgatatatgcttctcttgcaccttttctacctcgtatcttcaattgaatcccacttattagaacatccatatgaataagtctaacaatttgtttcattctcttctcctaatttttagcataattggttatttttgaatgttaactgaatgtgtgttttttttaataaaataatattatgttaacgcatgtgttttttttaataaatttttgttaaaaaaataatataaattannnnnnnnnnttctgttaaagttaacggaggaaataaaacaacatcgttaaacca

SEQ ID NO: 97602 - DNA, 838 bp, Cannabis sativa
tggattggacaaattagcctgtctaatccaatccagtcctgcgtaccaaacgggcccttgatgtcttatttaagtgttacattctttgatgaaaaatgcttttagaaatcaaagagtttagattggaaaatttatgagattctttctttctcttgatgttctccttgttctaatcaaaataactcaatgttgattctaagatgagcaatgttgctaagaatgaatggtaaaatggattaatggttcaacaaataacattttcttgaaattcttatcattcaagattttcacattcagctaataatgccaatgcctcttaacagaatctgaatgactatatatgattattcatgttgtattataacatttatatatataatgtatccaaaatacaaaaactataaattaaaacattttatggagctattacacagaaattatctgcataataattctagtccttttttatagtttatagatgttatggctaaacatattgaacataaagaacaaaaactatatatactatttttggagggattgtgagaacccactcttgttggtcactaaaatttactcaagaatttatctttttactaattactcaatctttcctaattcataacttaatggaaacttaattactcaatgtttaataaaacagatggtaacttgttcgagcttacacaacagtcatcacactagacctgtagtctccaaaaacaagagcacaaagcagctgaaatggctaagaaaacgaaatatgtttaccaaacgcaattcatagtcgaaatcagtgacagtgatacggacggatgaagcatgattttttggtgtc

SEQ ID NO: 97603 - DNA, 3258 bp, Cannabis sativa
ggccaaatgaggttaccggaaagaggaaggaagtgtttgagggtgagagataaggagtgtttgagccttggaacaatgtctgaatggaaaaacagagttgtatctctatttggatcctctaagtttggaaactcatagaagaagattcgttgaattggttgcatccttagccagattaggtccaaacaagtaagagggagagagtttggagaggaggaagaggtagttgccatactagcaggcgagggaactaccttgcacacttctataattttcacctttgccatcttttgtaacagatagatcaagaaagaaagagaagtatttttgtaaacagttttatagtttggcctagttttattttatataaagaccttaccaatatatatatatataacgattatgtatataataaagattaaataatatgagaaatggcaaaagtgtgttcttattggtcataataattaaattatcatgtctttaattaatacaataaatatatatatatatatatatatatctagaacgtgttagactagtacaattaatataataatttgaccaataccagctaataataatattctggacaacattgttcaaaaattaatatgtggacaacaagatcgatgactagtttaattttcttcacctactgactgtgagacactaaaatcttatggatcatgtgtaatgtgtaagttgtcaatttgacgaatgttattataactttctttacgtacttttcttatttattattattattattattatttttgtaaaagacatctatgttgactttcaatatcgattttccttgatagtagctagattcatatatataattttttatagttgatgaagtgataataatttcactctggtgtgtatcacatgaaaataatacatatctaattacactactataaaattgaactttagaggcagtgtttgagggttttgagcattagttttgataaaattcgctactgatattattccatacgacgcgagaggaaataaaaagcaaagctatagggagaaaaataatcgacgacataaaaaggaccctatgacattgattatcatgaaataaccaatactataggaccctatatatgtcatcggttattatacaataaacgatgtcataggactctcaggagtcagttattatagatttcgtatgattttttttttttttttcaaatttacaagtgttttaacataattttttttttccaatttttattaaaaatttatatatttttttcatatatattattttattattaatataattaaattaaatataaattatatatactaagtataaataaaaattaaactgaaaaagttaaataaatgtatatttacattattcaacgtgtttatatattagctatctttttattaatattttaaattttatattatgtgtttgtatttttgtagtatattagtgttgacaatgagaactcgtcaactaatttattggtcaaaaaattaaattatactgtaagctcagatctaagacgaaaagaaagatgaaatatgaattcaaattgctatatcaaaatggagagaatatgataacctttctattgttctcaaggttaagttacacgaatgattttctaaccccctctcatatctgagaaaggtgtatttataggctctaatggcctgaggtacacagtggccccaagggaacaaggtgtcgctttcatgctacacgttgtaggtgcaggaggtggccttgcacctcgtatctttgtcttgtgtcaggtagtccccggttgcaggagtactatggtccccagttgcaggagtgtgtccacagttgcaggagtgtggtccccagttgtaggattgaggttgcagagtaccattggtcaggtcctcagacctttaaggtgtattatatatcttcgctactcgtaccttcttggttttagagtttgtagaaagtgtggttgtacgtctctccgttgcatgccttatcctttgatttcttctccaacgtcattcttctcgatatgtattcaaatttcaccttcactcctcttcacacaaacaacatactcgacactttgtaacggtttcacgctaacgggcttgcatgtacacacatgcatgcatgcgtgcattaatacatttgcataaatattttgctaatagttattttgtctgattgaaatcttcgtctgatgtaaccttcggctaaccattcagcaaccacccagaaacttttgtctgattgaaaccttcgtctgatgcaaccacacaatcactaccctgcaactatcgtctgattatgtaagtgatagtgtaagtggtattttggtaattaaaattacataaaatgtataaatgttcacaccttatgaatgtatttttgtaaaaaaaaaagtgtcaatttatattttctatgtaataattctttaactttttatgtcatatatatatatttaaattctaatttatttatttccataatattgtatatatcccaaaagactatcataattaaaagaaacaatttagttaatttctatatacattagggacacactatttttttacgtttttacattgaaagaatttattttaatatttttacggtgttctataaaaataatatcaaaacaataataaaactacataaaagtattagaaaaataacatcaaaataaaaataaaaaatagcatacgaataataaaaaattgacgataaattaacaagagtacaacataaaaatatatcaaaagattgtatttgttgtaaataaaatcataaaaattataaaaataacgtgtatttttatatatatatatatatttttttgtatttataaataatccctatatattatcaagaaaaaattaactaaactttaaatcaaataaattttctctactgacatttgggtactcttttggttagttacttttaaagtaatagaaagatacaacataaatattaatgccatcttcgaacgtatttggaaagagcggaacaaccggattcacaacgcaattgaaactcctcctactgctattatttcctagatcaataggaggctcacggagatggatgagctccgctctcccgacggcatggccttttccaaatcgctcccaccccctcctggatggactacttgcaacgctgatgttactatcaatgatcaggcccggccctgggcataggcgggctagacctgtgcctagggcccacccagcccaggggcc

SEQ ID NO: 97604 - DNA, 508 bp, Cannabis sativa
aaaaaaaaaaaaaaaaagaggctacaacctgtacatccttccacctagaccaacaatctgtatcttccactacagcctatcaattcctaatctcaaatgtttacgtataagaagcaaatgtataagccagataccaaggtacatacaaagctttcactacataaacttcttattatgtacatcagccatgcaatattatccaactaagtccccataataaaatataattccattttactttgcctggataaatctaggcaaagaaaatcccttaaatcatcaaccatcaaaattttttaatatttacaacactatagcagaaaaccaccataactaaaaatgtaggtacccacatatatctgatcgtttgggagtttttaaaagctaaatcgagaaatatatctgaaattaaacttaagattaaaaataatgttttgagtattaaaatcattgtttatgaaaaaaaaataagaccttcaaacattttcctacttattcactacatatt

SEQ ID NO: 97605 - DNA, 778 bp, Cannabis sativa
acaatacttaaaatacttaacaaatacttaaaatactacgttagtatttctttcaaccacattacacaatacttaacaaatatgtcatgtttgtgaacagttgagcgaaaattgtgaggcatgaaatgaatatgatagtaataatttagaaacaaaagtactcctaataaaccattttatattcatttattttattaaataggcatggttatactatatactctcacccactctaactctaattatcaaacaatacttataattaaaaataataagattacaaagtgtgcccgagtggggttattgtgctctgtagcagttagtctgcttcttaaccgtttgctcccttgttcttcgtcttcttcgcctctactaccatgatatccgataaccaccatactcttccaccaaaagctcctcacgtcttccattccccctaacttaactgctactctgttttttttatatattctcctgaccaaagcatcttttccttattcctcagatttttattccctcttactgactggcttttgtttatggaatctctaattggtgaaatgtcttcaaaaatcgttttatctgaaaaagaaagggctgctcatgtcctcactgagtctgatcttcaagttgcacacactaatcctcaattttttcttgttgcctgttgtctctctaatgcctttaacccaaaaacttttataactcgaatgggggagttttggtctaagaaatgtcgatttgaggttactgtttctgagatgcactctgaacttta

SEQ ID NO: 97606 - DNA, 535 bp, Cannabis sativa
cacatcaatatctaatatttttatagaatagtatatacttctctttgagattcaaacaaccatgcatattataaataataatgacctataactatttaaaaataaaaatcatgtacgtacccgtgccctaattgctaaaacttataaataatataattttatatatttttatgtgaaaattataatttataaaactcaaactttaattcaaatagaaacaaaatttcatcatcatatttttcgtacagtttcagactctaataaattatactacaaattaatttacagttttcttctccaatatattaagttaactaataatatttacttattaattatatattagacaaatatttcaataatatatatatatatatattattttcagggtcggatttttttttcttttttttttttttgttgtaatgcattatgcatgcccattcagatattggaaacgttaattaagaaattaattatatgattttattgatcatgaccctatagagctataataaggctaaataattcgtat

SEQ ID NO: 97607 - DNA, 505 bp, Cannabis sativa
taaaagactctaaagctttgatgacttgtctatttttgactaatgtttttaaaacaactaattaaagtatatattttgaatgcatataacattataaatatataaatatataaatttttaaatttttttaataatttttatcaataactttataaataatacaaaataattaaaaacaaaacttaattaaaactttgctataaaattaaaaattatatttatatagaatgatgaaacacataattctccacttcccctccccaaaattgaaaaggggtaagttgaaaaataccacttttattaatcaatcaattaaatatacttctaattttatatttaattgaaacatacatctttttatatatattgtactcaaagtactctgacataagtgagtcacataaagtttatcttgaagtgacaggggtaaaattagtacaatgttaaaaaaaaagtaaaaataatagactttaaaaaagatggtaaaaataaaagcggacaatat

SEQ ID NO: 97608 - DNA, 585 bp, Cannabis sativa
tttgtttcggggattggataagttgatgatcgagttttgttatcatgacataggacccaggatcgtcgagcatggttccactcaggtcggcccgcacactcgatactggtttgaggtaagaaaagccttatgcactgctaagcatattggtaagaaacgattattatcatttgtgactcagttatgatcgaggtaataatgaggaacaattattatcgtttgtgactcgattataatcgaggtaatgatgtggaatgattactatcatttgtgactcgattatgatcgaggaatagacacggtcattaccgttattgagaatgaatcaagatacgatcattaccgttatgagtaattactcttgaaaccgcagataggtttcttacttatcgtttgctatattgggcaacgatagtgacatacacagctcgtggctaatgagtggtaagggtgctttatgaagtactgaggttatgtgattatgatgatgagtgattaaagtgcttcatgaagcactaatattatgtgattatgtgattatgtaatgaataaataattgtttattctgatgatgaagttgttaat

SEQ ID NO: 97609 - DNA, 810 bp, Cannabis sativa
ctaaataaaataataccaaatatagaaaataaactatttaaaagtataaatatttatatatatatatatataaaaccattatactagatttaaaattatttttacttcctctgaattagttatttaatttagaggtgtgtataaatgatcattaaatattagatgttcaattataatgagattaaattgaatatattttttaatatttaattaaattctagatattagatgtagtgtctaaaaatccaatacttctaatatctaatcgaactaattaatattctcatttaatttaattgagtaatttgattttatattattatacataaaataaatatatgtatatatgaaaattaacattaaaattttacattttttttttctagttagatggatctaatccaatctaataaatgctagatgtaaaatattgaatgactaaaataaattaaatcgaatagaataataaaatttaatttttttttttttgacaaagtgattaaaatcactcatgaatcactctaaattaaatcggatcgaataataaaatttaatatttagtatataattgaatcatatttagattagcataaaactattaaatataatccaataaatattttattttaatctcaataataataattactaatagatcttagcatagatatatatataatttgtcattattcgatttgatacttttccttcctttttttaaaaaaaaaaaataaatttattcctctttctagtgtttatttcatgtaaaaagataatcatcatttcatcatattcaaatatacaataaac

SEQ ID NO: 97610 - DNA, 558 bp, Cannabis sativa
gtgatggcatctacctcgtgcataccagctaccttcttcgtttgccttctttcagtttgccattgttaattattcatggccatttcttcgagcaaatcataggcctcttctacactttttctcataaatgccccaccagttgcggcatctataatcgttctggtgttaccaatcatcctgttgtagaagttatgaaccaacatccacttttcaatcccatgatgtggacatttcctgattagatccgtgaagctctcccaagcctcatggagagattcattgtctagctaatagaaaatattaatttctcctcgcaatagtccatgttgcaataaagtttggtggcaaggagatcaaccagcttttggctcgctccctcagcgagaatgggaatagtctcaaacggatggcatcatcactgactctgtttaccttgaaagtctgaaataactccatgaaattggacaagtgcaaattagggtcttcagaggggagtccaccaaaccagactgtagactgcaccatttggagtatggctggctttatctcaaagttatt

SEQ ID NO: 97611 - DNA, 1713 bp, Cannabis sativa
catcggaccccatcagaccttgccgaaaatcactgatttgagattctaaaacctaaatttatccctaaatctaacaaaatctatcttcaacactaaaatcacaaacaaaatcaataaaacaataaaaaatggtggtggtgcttcggtagtggtgtgccgtgggtatcgtgggtcggtggtggtgcgtcgtgggtcggtgggggagcgccgtgggctggtgggtctcctccgtgcgggtgtggccgacatttgggatgatttggggttttggctggggttgggacggctgggttgggacgactaggtttaggtttggacgaacatagagaatagagggaagaagagagaatgtgtgtgggattttgagaggggtagttttggaatttaggtgaagcgggcatattctaacaattatctatcgtttaagttttcctaaccaattaacccttaaatcatacataaaaaatcaaattttccttactttatgtcatgggacgatataaataaaaaaaatagaatactaaaagatactagtgcttagtacaattctaatgtattatattattattagtataattaagtacctattagatttcacataaaaaaaatatagctaaccattcttaaggcgctacttcaagtgcctaacaacactgaagaaaaaaaaatacttaaaattttagaattgtcaaaaattagaaattcaattaaacacaaaaaatatgcataataatgcaaagttcagttataatatttgaaaagaggaatgttggagcccacaaagtaagatttaaggtatgattcaaaacgtaaggattgtgcaaaggagaagtaacttttatgctttaaaaaaaaaaagaaaaaaaaggaaaatcttccctaagaaatatcaaaagagcacaactttttatgctttgtgatacattatgtaaaagaataacttttctttctttgattatcgtaacccaacattctcatctttggaaagtattggaaagttatggcatataagggttcaaaataaataaactaaagtaaaagtttaaagatggaacttaaataaaggaaaaggattaagaaaatcataaataagcatctcttctttaaaccttaaagatgtttctactttagaatcataaaaaagatcattatcttcacagctttaaattaaaatccctaaagcataagaagggaatttgtcgcttatggcttttcaaaagatgaagggtgttttcggaattatcactctttcaactctaattatttatttagatatttatattctctaatacttttcatgcttctctttaatttgttactttgtttttttttcccctatattattatttatatcttaaaaaggaagaagcctccttattgttagaccacttttcttttcactgtttttccttttttacatgaggattgtatttttttttttttttctgtttttatccacaatctgagacacttttcttataaacacacacacacacactattactatatgcacttaattagttttactcaattatttgctcaatatgaaactgccaacacacgattggcataaatagtcatgatcccatacaattggttcttttctatttaattaagttttattaatagtaacttttggcaaaactattttcaaattcactggcatttcccaacaatcaaataataatgatttttatctctcaaatctttttc

SEQ ID NO: 97612 - DNA, 649 bp, Cannabis sativa
gagtatagactggcctcgagatgattttatttttgtccccttaaggaaggtatgtgtctatattgttgctcaagattgatctcttgactaagataagaggaagtgatgaattttagtgtgatatcgacccttaggcgacacactaagttaagtcatgaaatttgaaataatattattaatttgaaaaaattgatatttaagtttaaatgttaaaaaacaatatttttattttgatatttggatttgaaattggaaaaattcgaaatttgtggaaaaatcccaaaaatttgaattttgggtgaagatgcacctgtgcccacaaccaggctgcaagcagccatgatccgtgcgcggagcaagggtttgcagcctccccagtcgagaaaactcggtcagctgtagggtgtccatgcgtgcggaacaacgtctggcgtgtctgaaccgagtgcactctgagccttcagacaagatttgtttgagctctgcgtgcagacaaggcttcttgtcgagttcttggtgtgcgtgagcaccttctcgacaccacctgcaccctattttcaaagtttatatctctttcaaattttatcggaatcaagttccgtaaaaactaaaattgcttaatttttcacaagaaatccaaataaattat

SEQ ID NO: 97613 - DNA, 635 bp, Cannabis sativa
aaaatataatatatttgtaaataaaattaatcttcatatatattacatattattataataagtgataaattctaccctacattctttattcaatcacaaaaaattataattatcatgtgtataattattctaaaataatttgtattgttatacatactatatttgttttcatataataactgcatgcatgagcctttactactagttcaattatatgctcccatctcaatgctattaattaactaaccacttgtattttttagcttttaaaaaatccctataaatatctaaccaagtggatcaaaatttactaaatataaacaagagttttattttcttagatagaaccacattaaggcaccctgattagagatattaattttatattaataaaaaaaaaatcaatattattatgatgtttttcctgagtagtattagtattcatggagtctaaattctgaccatctatcctaattaactgtaaatatattaaacaatataatacaatgtacggtggtatacaagtacatttggacaaaaagacatatagcttgatctttgttttttcaaccatctttatactttcattggcacaaacaaaaagtgaaatacataaattaataataataataata

SEQ ID NO: 97614 - DNA, 737 bp, Cannabis sativa
cacaatttatagctccctcctccccttttattatcaacgccacaattctttgactcgtggactaaggagttgaatgttgttcgagattcaacatcatctcgaacattctggagggtttcgctcacgtaacatacacctaatatatctaaaaggtttaagtctcttttgtgtatctgcgtattcgagctaggtttcccgccttatttggggaccaaagaactaacaattactatgcaaatacacaaaagagacttgaacctcttagactttgcgggagcaaactacatacctgactttttgagctacccctcttgcgtgaaatcgcaattctgttttaagtaaccgatatcttggagtagctctcaccatcaccaatcaaaatacctctaataaacaatgcaggagaagtcttccctacagatatcctgattattgaataggttaacatttgcaactgagaacaaaagatcagatagagaaactttacatgacattaatgaaaacaaaaaaatattggatttttagcttttcccaccttagaaagaggcacccctttgtgatttctaagtcactttcgaagactagccttggttcaatttgataccaccaatttttagtgttgatatgttatactaaacttgaagatagcacaagacaatgcagaaaccagttaaccgaaattgagttaaacatgcaaaatggtaattgacaccttttgattcaaagtacaaatactt

SEQ ID NO: 97615 - DNA, 974 bp, Cannabis sativa
ttacaatttttttatgctttgtagattctcaaatgttgaaggaatctcgccactaactccacaactggaaaaactactatcaaatgaacaaggaaaattagcaagtgaatcaagatggatattgggaccaattgagttgaataggaaaattagcaagtgaatcaagatggatattgggaccaattgagttgaataggaaatctcaatgaatcaattgttaccaccaacttacaacaattctaatttggtcaaattccctagttctgggggcagcggaccagagaatttgtttgatagaatgtacctatatacaaaattattccaatatttaatgtcaataataatgtacctatatacaaaattatttcatcaagaataacttacaatgatgatagctgagaaagtagtcccaattcctttgggacctctcctgacaatgcattcatactcaagtccctagtagtaatcccaaagagaatatatataaagaaatgaacaacttaagagaaatattttgaacaaatatcatactaagtcttgttaattagttccaagctcaaattttaagtttgtaggcttacaagtattgcaagttagtgaggtttccaattgatggagaaagagaaccagtcaagaaattgtagcccaaactcctacaacacaaagtgtaaatgaattaaagttgtaaagaggtgaaggtgatgataagcattgaaaggtcagaagaataagcacatacagataggagagaaaggtcagactccatagctcttctggaatctcaccaataacatccattttataaaccttcctgcattgtgattataaccaaaactaaatcataaatcaaagttggatcacatatcactttaatggatgcaatctattagattttttttttttagcaatttaggtggcgtttggtaacacttttttaattagttttttgttttttaaaattagaaaaataaaaa

SEQ ID NO: 97616 - DNA, 652 bp, Cannabis sativa
atatatattttaaattttaaatttcaataatttaatatttaaaaaaaaaacaataattacattttattttgttacaattttaaaaaattaataatacattacattttagtcacattaaatttgcattttgctattgaattacaataaacaaaattaattaaataagattacattaaacaaaatcaatgcttccatcagcattgtacttgattttgtatacccatttacaaccaatgacatggtgatgagggggtaatgaaacaatgatccaagtgtgattgtcttctaaggctttgatctcagttgacatggcaccatcccaagcaggtatcccacgaccctgataaaaaaattcaggctcatagtggctagtagctaacacaagagcacgaaaattgtggggacagcctggtatagttgataattttagaaataacatggttggtgacaggtgaggggttctaatgttgaacattattggcagacaaaaggcagtgataatcttgaagataagatggccttttcgtttgtctaccaaacctattaaaagaagcagactcagcgcgatgctgagtgggcaaaggtgaaacagcctcatgatgtgtaacagcaggatgcacaatatcagtattgagattagtatgtacaacat

SEQ ID NO: 97617 - DNA, 1750 bp, Cannabis sativa
  modified_base (1679)..(1711): a, c, t, g, unknown or other
tagcattgatgcccttatgcatattaccagtcacaaaaaagtcagaaactgcatcataaaagtcatctctaacagatttccaatactgcttaaagaagagaaccgacataccatgaggaccaggagccttatggttacccatggcaaaaagagttcttctaatttcatcatgagtagggcacttgagtaactcctcctggtcatctaacgagattctttcatgaaaaaactgtctgcaattaagagcctgaccatcattggacccagtaaaaattcctttaaagaaattaacgaactcttgaccaattaactctcgattagagatctaaacatcatctttattcaatatgctctcaatggaatttctccttcttctaatagtagccgagagaaaaaagaacttagaacatttatccccttctttaagccacaaaatcccaaccctttgtttctagtataaatctttcctttctcaagattcattcagagagcaatggataagacattcagtattccaatcacaggagctagattgtaaactctgcaaaaaattaagctttttctcaagctcttttatgatcatgtaagtttaccgaattgagttctattccaatgaagaagagcaacccgagtcgctcctaatttcttgtaaacgcgggtaggagcccaagagtgattaactaagttccaggcatgatcaaccaccaacttacttctttcatccctcgtccaaccttcttcaaacttaaaacatcttttaaatctagcatccaaaccacctgtaagaagacacagtggtctatgatcagagttacttgtcttggaaaacaaagaacatctcttggaaataaattgggtcaggctccattaactagacctttgttaagagtagatttaacatggttcatcccagaacggtggttatcccacgtcatcttgtcaccctgaataggaaaattaataaggcctcgagaatcaaccagattagaaatgaatgggataaattggtacctttcggtggacccttcacgctccgaatcactaagaacaaaatttgtatctcccagaatcaaccaatgtccacataacttatccctagttttcataaatttggtccaaaattttttcttagcatggaaataaggagggccatacacacaagagagaagccaaggatgggaaggggggtccaagtaaacaaggccagaaatatgattacgagaagtagaaatacctctaaactaaagccatccttctaggtcaaaataatgcctccaatagcactaataggcggtacataaatattaaaataaaagtggagggatttaagtgtatgtaccagaggagttgcatcaacttttagttcggtcaggaagacaaaatcaggagagcgcgatctgattagggacttcaattccaaaattgtagaggtctaccttaaccctctacagttccaagcaatgcctctcatggctccaatggaggagatatggcattctcctccacaggtgtacaagagtgaacaaacacactagagccagaatcttcaatcaaaaaagagccaaccatcaggctcttcataacaccatcaatgcgactcagtgaaattgagtaatcatcagagggttcttcaatggcaaccttagactcgtgatgctactgttgggttttgtgccctnnnnnnnnnnnnnnnnnnnnnnnnnnnnnnnnnttattaatatagattagaaataatatttaatgttgcatg

SEQ ID NO: 97618 - DNA, 521 bp, Cannabis sativa
tggatctctggacgaggggctattagccaagaattcactgaatattttaagggtattttcgctggatctgatcctggtgtggatttcaactatgctcacttgtttcaacagaaaatctcccaggaagattcggacgcccttgttagctgccctagttctgaggaaattaaaagagctctttttgcaatgtccaaccataaggccccgggccctgatggaatgtctgtgttattctataaacactactgggattctgttggagctgatttctgtgatgcggtgtttgatttctttacttcagggaatatgcatagaggcattaatgccacgaatgttgttcttatccctaaggtccgaaatcctactcgaaccaaccattttagacccatctctctgtgtaatgtggtgtacaaagtaatttccaagatcatcgcgaacaggataaagcctttacttccttccctcatatgtccaactcaagctgcctttgttcccgaaaggaatatccatgataataatgt

SEQ ID NO: 97619 - DNA, 1843 bp, Cannabis sativa
tgtcaacagagatttacctgcagccgtggatggggccagcgaaagacgatcatcaagaagataatcatcatcaacaccatagagaagttgacaattacgtgattaacaaggaagaacacaacaacaacaacaacaacaacaacgacaacagtaataacatcattattaacacaaacaacaacaacaacaatactactagtaatggaacttatactatgcagaataatattatggtggaagatgaagctgacagtaaggtgaaattagcaaagctaagtgagcttaaggatattaacgttaatgagggttcctctccctggttgcaggtagggattggttcaacgattgatgttgttggagttggcccgtaattaaaagtgaggacttttctccatttttcacttctcctttccattttttttttaaaatatattaagaaactgtataattagagtacttaatatagttcatataattgctacaagaaaaaatttatatgtatacagttcatatataattaaatactttattattaattcttgttaatttaaattattgtaaatgttggttgggacaacgggcccaatctgatcatccaaacttataccagtcatcaatgtattcttaataaaagaaaaaaaaaacaaattgtatttatttgattctttatataagggtgatccatacaaacatattatacataatatttaatacatcttggtgttcttgagcgatatgagttcaacccatatattatatatagaaatgttaaaaagtacttgtgatttatgcctaatacttttttaaatgtcaatatcaagtaagtatcggttatagatactttaatttaaagagatattactaatcaattacaaatggacatgtctaaaagtgctagagataagttatgtgtaataacaatgttctattatatattatacaacatatattgcggtattaattatttgggtaataattagtaaaatgtgtgttttcttaatttaattctattattaactaggaaattaagtcgcgtttacttttataaattttttatatattttttattttacttattgagttatataatctaaattataacattttgatgtattgtattataaacaaagtaatagtattaaaattagaaatgcataatttgctattttaaaaatatatagaaagatagtgatattgtttgtgacaatttgtgacaaatactaaaaatagtgaaattaacatataaattatttctatgttcacatcttggcttcaacaatgtggaggtctaatcagattgtcaacatgttatccatgtccagcagaagagaaacttgttcgtggctgagtttagcctaatttttaaagatatttatgctatttgtaaccatgttaatgtttctaagtgtctctttataatcgttctgcaaactctttagctatcaatctttttaaacttgtactgtctttagatatggcaagagtgtggtggctgggtttaccatgtgttctttgataattggtgttaaaatcctcttttgttttaattttatacgcttaactcctaatctttttgggtggaaaaaccctcttaacttcactttttttttttttttgcaaatttgagtcgccaataaaatctcgccgttcaatactaactggattaccactgtgtacacatgtgtatacgtgacatatttttattggcttcgaagttttactatcacgtgtaaacaggtgtgcaatcccagttaacatttgaaagtaaaatttaactggcaacttaaatcaatatatataaaggaaagttttaagagagttgaggtggctttctataaagata

SEQ ID NO: 97620 - DNA, 1848 bp, Cannabis sativa
ccagtaccccgcccggagatccaacttagtgaagtatgacgcctttgtcagcctatctaacaagtctaccgcatttggcaccgaatacttgttctttactgtgactttgttcaaagccctataatccacacacattcgcaacgatccatctgatttattttggaacaataccggagcaccttatggagctttagagagcaccatgtatcctgattccaccatcccgtacaattgttttctgagttcttccaattctgaaggacccatcttgtacggcacctttgctggcggaacagctcccggtataagctcaatcttgtgatcaatcgccctcctaggagggagttctttcggcaactcgtctagcatggtgtcggcaaactcctccaacaatccaaccactttgtcgggtacctctacccattgatctggttttatctctatcaaggcagccacatacgcttggttgcctttcttcttaatagagttcccaaattgggtcactgattctaacacaacgtccttctctttatcttgacttgaggagattgcttcaacaaagcatgggcagtcctccacacaaatcatgacccctctcaaatggggtgcaaccattgccttggctgcactcagaaattctacaccaagaatcatgtcaaaatcatccaacgggaccaccatgagtttggattgagaatcccatgccccaaccttcaacattaccgtagaaaacccttgaatcatttttcctctgagtttactgccttcaaccgagttgaacttccgatcaattccagaccaagtctagttgcttctttttgcgccacaaaattatttgttgcccccgagtcaaccatggccgtgacttctctcccattgacaaatgctttcacatacatcaagcctttgaacaaacttgatttctccgtagtgatcgcattgagaagttgtaagggattcatcctagaagttgtttcttgctcgctgccgcttcttctgtcttgtccgatcagggcatttaacttctccctactaggacattccctcgccatgtgaggaccattgcagatgaaacaccccacacctttcttggcattcggctgtgatcctttctggttattcccaccagcaccatctttcttcttgccatcataactttgcccacccttggacgaggaaggcttctgattatgtttcttttcaccagtggatttctttgaattatcaccctatgacagattcgaattatatctgtaatccaccaatttctcagcagccacaatcaccgagggtaaatccgttattgcttgcctcctcaatgcagcttgtgcccatggctgcaatcacgacaagaagttgaatatcttgtcctcctcggagatgttctttatatccagcaacaaagaacgatattctttcacatactctctcaccgaaccagtgtgcttgagtttctttagggactcacgagcgatccatgttgcatggaaggaactgatccttcaactccttcttcaacacttcccaagtctcgatattgggccttcccgatcatgtatcttcctccattcgagtgcgccaccataattcggcatcaccctgaagatacatgcttgtaatggtcactctatctgcatctagaattctcgatgccttgaagtattgcttgacgtcccaaaggaaattctctaattccttcgagtttcgactaccattgaaggctttcagttcagggacttagaagatgattcagttccttgggacggatttgctatcgcccttttaattactgctacatccgcatcgagagccataaatctctcctcacagaatttgacaggtccgata

SEQ ID NO: 97621 - DNA, 780 bp, Cannabis sativa
tccttcttcttcttcttctttcaccctctgctaaaaaaaaccctaatctaaacctaaaacacatttctttcaccctctctcttaccggaccccaagcccgtaaccccggccgctcctctccaaaccaggtattcatctttcatcttcttcttcacttcaagattcatgtattgaaacttctgttggtaatccacaagtgcaaatcccatcctggcaagaagaagcttaagctttttcatcccattatcactccaagttttcaatttagttgccatatacgatgaacaaagcattgaatcaaacaaattctattcttgtaacaagataagtctaggctcatcttcgtaagcaattatagaatcaaaccctccttcgcttcctcgacccacgaccaactaattcttatctatttttattttattttccagatctaggtggagagggagggcattttcagatttgccccaagttttctagcaagagaaggagcggtggaggcgttgcgagagaaggctttagatctggggttggatgaatgtgaagtgttttcagatttggggttctcaaatttggtttgatttttttttgtttttttttttgtgtgtgtgatttaggtataaaaaatagggtacggtagtggcgttggtgagcagtggtggtttcggtagtagtgggtggtggctgtagatggtaggtagtggtggtttcggtggatgttggtggtggtggatgtcgatggtatgaagaagatgaagaagaagaagaaaaagaagaaggagg

SEQ ID NO: 97622 - DNA, 949 bp, Cannabis sativa
tttgtgatattttatcttagtctagaaacaataagttccttttagactaggtctcactatagcattctagtattatcattaatgtaaaatacttgcttaagattatgtaatcactagagataccataaaatatttcataaggaccggtaattgtgcctaagtctttcgaataaatattgtaaaatttcctatcttatcctcataattctgataagttattactatccatatgaatggttagattaactttcttttgttttattttaaagttcttttcttgaacatatcataataggttatcactagtgtcatccaaataataataatgggctagaattttaattaaaatcttcccactaagataaggtactgtgattctatgtccaaggacttataatggcatctattactattgtaacatacatattggaacactatacaagatcaagaatatgttctactagtttgctagtttgtttattgtattatatctatgtctaattgaaatatgcgtggtatagagattctgtggtgttatgaagatgatctagagttcaaggtaagacttgtttgaactacatatatcaataacttcttccatccctatgtgttataaagattctgtggtgttttaaatataatctagagttcaaagtaaaagatctttgaactccatatatatatcaataacccttccatatagagattctatggtgttttgaatataatagagttcaatgtaaaagatctttgaactccatatatcaataacttcttccacccctatcagatcacaagatctttttattaaacaaaatcttaataattgtttaagaaatgataattattcataaaacattgaatttaaattctattgtttatgttgtaacatctcctcttcaagcctccattgagtccttacacccgcagaataatggctcttatacaa

SEQ ID NO: 97623 - DNA, 530 bp, Cannabis sativa
tctatttattattaacatttcatgtcaattttttctatgttattttttaaaaacaaaaaataattagcttagttttttttactatgtattttttgttcaattataacatttgtttacattgaacttcttggtatagtttgttatttatttaaaataaagttggttttttttaagttatttatttatttttttaaataaatgaaaatattaattgcccattccagaggatacatttctttcttagatatataacttcaagaaacatcactgcccattgcccaatgtagaatttgtaaagaacttttacgtggtaagatattcaaaggcacagaaagattacagcaagtaatgtaggtcgaaatatctcttatctcttggtttaacggacaaataagttatcatgatttaagctaatgtagattttagtgaatgacgccaagtcattatgcgactaaaacaattcattaatagagaatgggaaagtcttttgtactaagaatggcttgtagttgatccatttgatctttttt

SEQ ID NO: 97624 - DNA, 505 bp, Cannabis sativa
ccaattatgcaggatgcatgggtgataagaaatccacatcaggcttcattttcatgatggcttgaagagctgtttcgtggaaaagtgtcaaatagacactcacagcgtcctcaacaatggaggcagagtatatggcatgttatgaggctacatgtcaagcaatatggttgcggaacttcatttcagcattgggtgttatggactctatctcgaggctgctgaaatagtattgtgataattctgcagcgatagctctctctaaaaatgttagaagtacttcatgctctaaagacattgacataaagtactattttgttaaagagaaagttatagagtctcttatttcaattgaatacacgcctagtactggcatgttagtagacccactaacgaaaggcatacccgtatgtgtatttttggagcatgttgctcgaatgggattattaggagcatagcttgttgagctcagtgggagttttattattatgtatcggacatgctagta

SEQ ID NO: 97625 - DNA, 1465 bp, Cannabis sativa
aaaaaatagaagaagagcatgaaattgaaaacaccaattaaggggagagggttatttatttatttttttaatgacatgagtttttttttaattaaaaataaatataaaataataaaatgtattatttttttttgaaacggaattcattcattcaaacaaacattatataggattcggcgagtcaagctataaaataataaaatgtattattgagatataaaagtttcgttaaaacaaaatattttttaaaaaacttttttaatgttatttagctaaatatcccaaaaataaaaaaagttaaaaaagacttttgagtcctagactagtcatacgaaatagatcacttttgtttattattaaacgagaagaaaaccagaatctcccataaatcaaccaaataacactataacctagacttttcttccttccatttccctcactttcccgagaaaatcctattctcacagtgtcactcgggaaattaatctgattgactcataaatagataagagggtggcgagtgacggagtgagtgagcttaatctttcttaatgggggatcatctacagagtctggggtcggaggccgaaggactcgaatccaacgtcaaggacgagctttgcatggatatcgatcctccgtttagtgaaaactccgccaccgccgacgattggaggaaggcactcagcaaagttgttcctgccgtggtcgtcctccggacaacggcatgccgcgccttcgacactgaggctgctggtgccagctacgctaccggcttcgtcgttgacaagcttcgcgggattatcctcaccaatcgccatgtcgtcaaatctggtatcctctcaaatattttgattgttgatcaagaacattatttaaactcaataatctattccttcactaaattcttgcccaagtcttaactatgcacttttgttatgctctcatctgtaggtcctgtagttgcagaagctatgtttgtcaaccgtgaagaaattccagtgtatcctatatacagggatccagtgagtctactctctgtttttaacttttagccctcatatatgtttggtgagactttatttattttttgtgcgagtatgtggtaactgtagagctcttggaaaacattcatatatttcaggaaggcttgcaaaagcttggtagtagaatttaaggagatgaaaattttctgttgcgaaatgatttatcttatgatcattggatgtgtcacttgatgcatacgttggaggaattaatataaaaaatgccacttcgtattgcccaagaaggggcactataagagatgacggatcctctttttacttgttcgagtttatgggttttatcctcgaagtatgttatttaaattactctgaaatgaatgcttacaaaagtctcagtcttggaatgttgaataatagagaccttatggtctaacctttggttttatatgaacgctttt

SEQ ID NO: 97626 - DNA, 880 bp, Cannabis sativa
gtgcccaagaacaaaaccgtgaggacttatgccaaagtgaacaatatcatacctggagtggagatgaatggtgtttgatagaaaacttggttcattctaaatgagcaccaaagacctatttttatagtgtttaagtgatcgcatttagaattcaaacacaccacacctcatttctctcacataaatgagtattaatccattttgtaacaactatatcatcataattttaaattctttaaatcaaattgtgtaagaattattttattacattaattatgtgtgatcaacaaaagagttacaagtgataacgaattgtaacttctctccaagttacaacatgtacgttacaaagtgtagtttaaaactataggttacacatttatttatcatacacttaaggccagtttggcacatctgtgctccgggaaaaacagttgaagttgtactgtgagaaaaaacagttgtagcaaaactgtagaaaaaaactgaattgagtgtttagtaaatatattttaaagtgctatgaatttttaagattctattataataatgagaatgttataatctaatttattataattataatctatataaaaaaatatgttgtataaattttttatatatttttaattattttttcctacattataaatttatactgataaaaataatttatgataatataaactatatttttataacttgtaatttataaaaaactctaattttccgtggtttgttaataataaaaaaaatataaatataaagtactttttaaaaagggtaaataccattttggaccctgtattttgcaaaaattaccgattggaccttctgttttgttaaatgacaaaaagaaccctgtattttttaaaatggt

SEQ ID NO: 97627 - DNA, 759 bp, Cannabis sativa
ctcaaaacactataaatagaggtcttgggttcattttgtaagacaacaagtttttatcaagagagcacattgctagaaacactttaggcttgattaatcaagaaagctatttcctttcttttcttttccctaagtgcttgtggtaggggaaaataagcttttggacaaagttgtagaccttgttcaagtttggtgattcccctattatacacttgtgttgtatgtgacattgagattgttctcacatctcttatatatatatttatgctatttatatattgtgttttatgtgtagcttattgctttgagttgtaatccctctctttatctctattctctattttatgtgtatattttgtttagtgttgtgacattattaattccatatttatgtctttgtattatttgtcatagagttgtaaccttgttgatttgatatttctattggagcacaacaatttccaacacagtatgattgcttggtctatgcctgtgacatcttaaaggcagtacataatgagtcggtgctgcttatgaccaattggcctatgagagaaatgcccatccatacaagatggatattttgacagatttataaagttggagaggaaggtaaatatgatttgcttttttttattatcctatttttaataaataatagtggattgaaattgttctaaaccaatgacactatttctctcttgcatgcaaattcgtgaacaaacgacaaagatgattcgaggaaatgagacttctaca

SEQ ID NO: 97628 - DNA, 1647 bp, Cannabis sativa
taatcaatggactaaatttgtacaaattaaaggagggtataaattttgatatgacttgtattattaaggccaaaaagtgaaatttcccttcacatttttctcatttttttattctatacattgattttattaaaatatctatatatatatatatatattaaaaaaaaaacatctcaacctagacctatactctaatttttttctctcagcgagtatacattcttgctcagtaaattttttccctaatttcttatttatatatgtcttacatattattgttgtcttcttttaattcatttgatggggttttctgacaatttagccttttctatttctcatcaacacaataatgctttatattttacaattttttttaataaaatttctataaaatatttactataaatcaattattaaaaaaaactatacatgtttataaatctatatcatgttttacttattattatatataaatcttcatatacatagttataatatctctattctcatcctaaaatctactcttcattctttgtagatatttttatttttttgttgttctccattctataatttttttattaatttttttcttctctcccggtataattttatgatatattttgtcatatgttgttttacctctaagtattatttatatatatatatatatatatattagtatatatatatccatagtattaggcgtgttcatagattagtttgatctggattttcaattttttcaaaccaaattattattacggttttttaaaattcaaaaccaaatcagactgatcaaactaaatcaaaccacacaaatcttcttaaaaaaaacactgtaaattatctatcctttttttttttctggcttttcgattttcatccatatttattttttaaaaataatttttttataactagatttcaaagtaatgattttttttaatagaatgtgaacaatttatatgttaacaattatgttttctactatatttttaaattattagttatgatttttaatttatagttatcataacaattatgattagttactccaaaattattttattaaaaaaaattatgattattaattaatttaaattggattagataatttatttaaaatattatttaattaaattataaaaataagactatggatcattgactactaagatgaatatgtaaatatgacaatcctattattttcaactcaaagcttcgacaattggaatagctcgtagtgttttttattaaaatattaaaataaattcttattaataattttcttagagtaatagaaaaactatgtgtaaatatatatattaataaattattattatagatcttttaagagaaatttgttataatagatttatttaaataatagaattagataaagaatttaacaatttgaaaaaaaaattaggaatcattttttttaattttacataaatatctttttcaattaattaattaattaattattaaaatattaaaaaaaataaaattaagtgaaatataaataaatgtactaactaaaataaacaaaaaaatatataaaaaaaatattacacactataataataattacaaactaaaattttgaattttaaatgtttatcaaatataataaaatcaact

SEQ ID NO: 97629 - DNA, 925 bp, Cannabis sativa
acaaatgaaatgtttctagtgctcgaagatcaaattgttactgtcatcttttctgtcaacaccgtgcattcttgtttcgaaatcctcttgctacatatggggataccaaggtatctgaatggtgtttgttgcttcgaaaagcctgatgcctccaatatcctagtaacatctgaattagtcatatattgctccaataaattgcagactttgctttgttgggatgcacacctgatgtagctgagaaaagcttcaaaccttgtagtaaaagaatgatgcttttataatcacttctacgggaaagcagcacatcatttgtgaaactaaggtgattgagtttcaaggcatcacacctctcatggaaagcaaaatcacctttgtttcctacttttttcaaaatttgggacaagtatttcatgccaatgacaaataatagaggtgataggcgtcaccttgtcttaatcctctccttgattcaaagaacccatgaagggatccattgaaaaaaaaaaagagagagaattttggagttctgacacagttcattacaagagtaatgaacttttcaggaaaaagtagcccccttagaacctcttcaatgaaatctcactcaaccgtgtcataagctttttgcaagtcaagtttgatcatgcaattagcccttgatgaccttctcccataatgcctctccaagtcttggcatatcacgatgttgtgagtaatgaaccttgctttgacaaatccaccttgattttgagccacaatatctggtaggatatctttgagcttggagcaaagaatcttagtggctactttatagatcacattgcaacaagtaattggtctatagtcacttggtgtattgggacacttcactttagggatgatagtgagggtcgtggagttgatctccttgagaatcttgcca

SEQ ID NO: 97630 - DNA, 1369 bp, Cannabis sativa
  modified_base (26)..(37): a, c, t, g, unknown or other
attttttcacttttagtcacaagttnnnnnnnnnnnnaaagtaagattttttatagtgtttattgtgattaaaattaaattagtcataatattatttaatcagtcacttgtatttaaatactatattttaattagttacacatatataagttttttttttaaatgagttacaaataagtttttgttatgtctaaaaatcatatttatagtcacaaaaaaattatattagaactagaaattatcactaaagtagttttttgtttgaagtgttgatcagaaaaaaattgtagtgttgtgacctatttttaacaatccacgagaatgttttaaataaacacaaaaacatctacacaactcttagctaataatattaattaatttcaagctatttaatttttatttatcacgtttcagtatcattcattgcttaatttagttctctaacctaacaaaaagttatcatcagattcatcacctaacaataataatgaaaaaataaatattaaaggatatagtcaaatataatgatcatatgtacctacaaaagtttaaaactaagggtttctccaacgagtcatcaaagtactatatttagtgtaatgtttgcagctacgttagagggctgattccacggcatcaccaaatttgaagcctcgttggtgatgctcttactgctgcatatatatagcacatgctttgtacttttttttttttttatgtatttatattattaattatatttataaaattacaatgtactttttaaagtggtacactaaatagtcttatttctttttggatccattttttttttttataaaattacaatgtacattataattatttaagacattcttttatcgaaaaaaatttaacacgccgaaaataaagttcaaattatgtgttatatatttgactcttttattaagggtacgttaaaagtacattttaatttattgtgtgtaaatttaaatgtgaataccataaattatttttatggtaataaaaataaatttttattttaaaagtggtgtactaattattatttaaatataacaagatataatattagttttttttaaaatttattaaaaaaattaatataataataaaaatattttttagtgttgtggttggagtgaaaataatttttaatactaaatttagtgatagtataacactaaatttggtgtactcctctaacagtaagtttttgtttttacgtttatatacatatcattactcaaaacaatattattaccataattattagatgttattatttttagtagaaaattaagatgttataatatttaattattaattttaaaaaatatttaattgttattggtgtcttataatatctttt

SEQ ID NO: 97631 - DNA, 996 bp, Cannabis sativa
tttcattaatcaggatttattttcgaatgatgataatgatttgattgatgttggtgcttctatggcttgtggtgttcaagctgttgagaatatggtattttattcgtgcattgtttattttgaagttgtttctattttgttttttaatttttatttttttttattgttttgttattttttacattagtttttttttttaagatggagtcttcctctactgatgttgttgctggtcagtcttctatttcctctggttttcaaggtttggttcaaaatgatgtccgtgacattattgtttttgaggagacaccaatcttaattcctagaaagagggacaagaagaagggggctgtgttgaagtctccctttattgaactaggttcttctgatgctaaattagattcaatgtctaattctcctgatgattctgatttcaaaatggtaaaatatgtgcatggattatgtccacttgatgataagattggtgaacctgttgagccaactttggaggctgcttttgatgtttggttaggccaggatctccgattgaagaaatcgatgtaattttttttattattcctttatgtaattttattaacttcagattttttgttgctaattttatattttttgttaccttgttttaggaaaacaactaatgtatatctaaagggcaaggataagatatctcttccatttcggtttggtgttgagaaagttgataataagatatctctttttctctttgctgctcaacatcgcgggcttcaacgagttgagatgctcgagatatagcttcgcaagaccagagagcatcgtgatgcgatggccaagaagtggaatgactcggagtctgagctagctcgggtaaaaaaggaagctgaagagcaacagaggtctcttaaaagtaaacttgaaagcgcccagaagaaaatgaaagaactcgaggatgccaacaaggccatccagacagaggctgatagaaagcttgaggag

SEQ ID NO: 97632 - DNA, 965 bp, Cannabis sativa
tttttatttgatttggatgagttcgtatttggattgattgattgaaattcctgttggcaaaattcaatatcctttaattgataaacctaaatacattggatataaatcaatgaacaaaccctaatattggtgctgtagatcaaagcattggcctctaacattattgatgttgtagctagtgttactttgtatagcattgacgatgcttgagatatcaacattaggatattaaccaatattgacaggactagcacatattgcatagtactggtccatagggaaatttgaatttctatgtgggatgatttttttcctaaacttaaaataggggtattagtaaaatgcgataacatttatttaattcccacattaccctcccccatttgaaacatgccctctctctctctcgcctctctttctctctcgctcggtgccgcacccacacacgcagaccacccacccacggcagaccacccatgtagccgaccggcctacatgacccacgacagaccacccacgccgaccacccagaccacccaaaatgtctaagattattttttttttcaattttttcctttaatttttggtgcttaaattcatgaaatataataatatgttgcaattttgtgtaaaatttgttagttaaggttagatttaggaagattaggaagagatttgtcgaaaatgggatttttttgatcgggcccaataaggcccgatgcccgtcccatggtcgggtccgatgggggcatggctgaaggttgaagatgacaacccgatggcccgatataggagggtctgatgggcttgattccttagctcgatagacccgacgggtccgattcttcgggcctgattggtccgaatgccttgggctcaatgggtctgatttacgtttagggagagagatggaaagagaggagttaatgtaattggaagaaggtattttggggaaaacaataaaa

SEQ ID NO: 97633 - DNA, 931 bp, Cannabis sativa
agttaaagtttgttacaactgtttgttagctcattaatttttgtactcggtatttttcttatcaatatatataccaaaattgtctcaacagttcgagtgaggagcaaattattctctccatttccattcagttcatttccatttcattttttttttctctctctctgtaattttgggctttcttattttccttcatggtatcagagcttaaatggccaataatggcgagcaagatccaatcaatcctcaagctctaattgcaaatcttgctcaagaagttgcattaccaaacaacaatctcctaccactcaatttgagactcgatcgatctaactatacactgtggagatcattggttcttgcagtagctcgagcttacaacctggatagatacattctgggaacaaatcctcaacctcctcgtgttcttgcacataatgttcccaaccctgcattctccacttggttacaatttgatcgatttctaacgcactagttaatgaactctgtaaccgaggcaatgcttggtcatgttatcaatgctcgtacctctgtttaaatctagacaatctttgaacaattctttgccacaagatcaagagctagattgctccagataaaaggtctgcttgagtcgaccaagaaaggctccttgtccatcgatgaatacattctgaaaaggaagcaacacagtaatactcttgctgctgttggccaatctctttcagatgatgatatgatcttaaacattcttggaggtttaggatcaaaatatgaggctgtgattgtcaatctcacaataagatctgaaaatctaaccattcgagaagtacaatttatgctccaaagtcaagaaatgagaattgtagaaaatagtgattcgaattgtgtgtagatttcatagaacaatacatatttatatacagagtta

SEQ ID NO: 97634 - DNA, 512 bp, Cannabis sativa
cattcttagttatattatacacaaattaaaatacacaattaaattctcttcatatatatttttatttaaaaaaaattacctagtaaactaacaagattaaacctttttttttaaaaaaaaatatatcatttattggtttaactacaaagtctaaaattataggttatgcggaaacaaagtggcacaaatctcctaatgagatatgaccaaacaactaccaaactaagttgattacaaagataaaggcaaacaccactaggcaagggtaataaacaccaaaattacaattaataaaaaagaaaacaaaacttgcacaaaaataagtgaaatgctaaaagacactagtagtgtttattatttttttgtgttaatatcattattaattcaactaattattgaattgaagaatctcctatagttaataacttatacagaatattactagtcaagataaaatatctagaagtactaatacctaataacagtaatccaaaaataaaccagaaacatct

SEQ ID NO: 97635 - DNA, 1097 bp, Cannabis sativa
  modified_base (1058)..(1071): a, c, t, g, unknown or other
gttaatgttaacttcactttgtttgtctataatcaaacaaaagataattatttggtctttcaaggtaattaatgttgatgatatgtaataataaatccccatgattaatttttatcaattgtataatatacaattttttttgataatttgatatttgtagttgtgagacgttttcacgagatgaagaaagaatggggatttgaacaaataatatcacttgaaacattcaaagatgtgcataatggatacgtggttaatgactcgtgtgtatttggagctgaagtttttaccataaatcaaactgctccaatttccgcaacacttttagttcaacgtcgattcatagataatcctatctttcgttgggaaattaaagaattttttaagataacgaacaaatatgaacacaattctcaagtatttttttctggagcaatagagtggtacgtatatatacttaaactcataaaaatatatacatatatataattattgatattggtagatattcaaattaatattcttgttaattcttttaatttaattaattgtttttcttctacataggcatttaagtatcggtccaaacgggcaactaagcagagatggaaaatcgttggcaatgtttttaatgatggaacatccaaaagaatcaacaacttatgttgagttttgtctctgagtaattaatcaacttaattctaaaaacaaagaatataaaggtcattactcaaaatacatttgtttttcttaaccattaataattaaattagtatatatatatatatattatctaaactcatgatcatattttttgattacaaattgtgcagttaataaatgttatcgtggcaaaagtaatggttggggttgtttgagattaatgaattctagaagttgatttctctcttatctcacgtactaaagtttcaacatcttccaaacctacaaaaattataaattgagtacataatagtgtaataaccagtttatatatatatatatatattggtatttagtatattaagtgtgatacaattatattattattattattnnnnnnnnnnnnnnttattattattatttttattgttgtt

SEQ ID NO: 97636 - DNA, 519 bp, Cannabis sativa
tcataaggttgctaggtggggtctgggcttgataatgagttcctctagaatggttctttgccttccatttagtcttgtgtatctggcttgtttctttatgatacacaagatttattttcaaaaaaaaaaaaaataaccatatttacagatgtattagatttgtaaataaaatgatatttaagagagttttactacagaaaaaaaatgattaaattttattattattttatataaaaaacaataaaaagtaaatgtaaatagtttataattagatgcaataactaaacttaataataaaattttaaaaaataatataaaagcaattataaatacagtgcatttattgtgatggaaattttacattatatcatattatgatttaaatttggatcaatttttggcacaccattaaagcaagttttttacaagttcgagcaatattttatagacgaccaatttccatctctattggagatgctcataaaaaatttgatcttgtgtgccaaaagttgtactaaa

SEQ ID NO: 97637 - DNA, 866 bp, Cannabis sativa
atttcagtctaggtccagatcagattctgggtgtgggttcgcgtcctaggtcttggtcaaggttgggtccgagttttgagttccaatctcgatttgagtctggattcaattctgggtctaagtcctttgttctgattttgtccgggtctagctttgggtgtgattctaggtgtgggtgtttgagttcaggtgcaagtctgtgtccgggtttgtgtccagatctttacccctatctgggtctaggtttgtgtctaagtccaagttcgggtcccgagtgcgggtctaagtttgggtgtgggtcaggatctcggtctagatttaggtcgagcatttcgatcccagtctgggtcatggtgcaagtccaggttcgtatctggatccctacctaggacgaagtctgtgtttgggatcgggtcccagatttaggtccaacgctcgggtctcagttccggtccttgtaaatgaccgtgtttgggcccgagttccagtatcagtttgggtctgagggtaggtctgttgggctctaggtcaggagccgagtcctagtcacggtcctagtcttgttctagggtcctggttcgccgattcttgtttaggttctaattttgggtcccaagtctaggtctgggttggggtttggttcttcgtgtgggttcgggtcatagtctgagtcccaaatctagacaccgaatactagtctgttctaggccccgttacctaaatcccgagtcaagatctggatcattgtcacgggtgtcggtttgcttctgattcaggtctcaggtcccatttctaagtttgggttcgagatcgagactggggtgcggttcttggtcccgaccctagttttgtgtccctagtctggt

SEQ ID NO: 97638 - DNA, 630 bp, Cannabis sativa
tatctctttgctatataataaatgtctatataatagaatttcttgtggtttaacataatattttttaaaattctgttagttttaacaaaaacatgtcaaatactaacaacaatactaaagatatgtaaatgaataaattacaggtattcacaacgtctctaaaaaagaattaccattgtgttcaaggctgaatcttcgaaaattgaaggccttttcagattgtctcctaggtattaagacaattaactcaaaatatgactactcttcttagtacttacatgaggttaattgtgtaaagcagtcaaagagtaataaaagagttagacaaagttatcacaccgtgtgagaacaaacaatgagatggcacataatttggctaaaagaagcttgaggttgaggatgaatgaggcacatgtaacttgttactagaactaacttttactgttgctaactttagttttttccttttgttaagcttctgttttggcttaagattattttccactcaaaacaatatatagatgttatattattttataatataataataaagtagattaaaatgtgataaatatatgtgaataatatatattaagtgtatggtaaataaatgtgtaacctatgatttta

SEQ ID NO: 97639 - DNA, 559 bp, Cannabis sativa
tcattagtccacctaatattaatatatagataattaaaaaaataatttaaaattttaaaaatcatttttttctttttatcttttttttgttctttttcttttttctcgacctaaccttggcttcccaaaccttgataaccctctctgagatcagtttctcttcaccacatgccatggaaacttgcacctccaagccatctaaacccaacccatattcgactcgacacccaaacgacccatcccaaacccctaaatacctcccaaacacaaccctacacaaaccagagagatgaacacgatgacgtgtccagtgctagaaaaattacgtgagagagcagatctgagaaggaaaaagtgagagagaacatatctgaaatgaaaacgacacttgcgatgacaatggtgatggcactggagaatagcgttgggatctcggggtttgggtctcagtcctcagagtttttggtgatggcgacgaaggtggatctcggggtattgggttttcggtgacggtggcgacactaaggtctcagggttctcagtcaccggtgtgggattg

SEQ ID NO: 97640 - DNA, 594 bp, Cannabis sativa
  modified_base (275)..(283): a, c, t, g, unknown or other
ttgtaataaagaactaattgctttccattttagttgtggtaaaccgatttacacaccatatttttcataaagtttgggaataaaaaatttttatatcaaatttacaaatacactcaaatttggttatgtgagttttggttaagaatatgataaattacaatatatgcattttcaaatacgttacctaattaaaaaaatttaaaaatttaaaaactcactagaaaaaactgttacctttagtgacaacttcttagtcacaacataaattttttgtnnnnnnnnntgacttttagtcacaataaaaaattatttgtgactaaaacattccatttagacacaattttagttttagtctcaacaagtattgtgactaaaaacacatttagtcacaacaaattttaatttgtgtgactaatacctttagtcacggaccttttagtcacaacataagataataatttataattagtcacaactttattatttttagtcacaaattttattgtgactaaaaataagaatttttgaaatgagtacgtatatatataattatatccaaatgacacaccaatgcaacaatagctaatttttttt

SEQ ID NO: 97641 - DNA, 716 bp, Cannabis sativa
  modified_base (52)..(60): a, c, t, g, unknown or other
tttatgttgtaatattgttaatttgttgttgattttttgttatctgtacgtnnnnnnnnnttgttattttgatgttatttcatgttacttttatctagtttttgtgttaatttttagaaaccataaaaatgtaaaagaacattctttgaacataaaaatataattattttataaaagatggtgccttatgtaattattccaatattaaataagaatgtgttaattttaaaaaaattaacgaaaaatggcgacaaatgaagtgtagacccaagaacaaaccaaaatgggaattacttcatacttcttttctttgtcaagatttgaatttcacttgaatccaatatattgatggtttgtgtgaaatggttcaacatctaaccattttgtatgtgatgcctagcacttcaattagccgaattaagatatcaataattttttttaataataataaaaaagataacaataaattttactgatttgtctaaagagtttcattgagcaagttcttggaatatctgttattttgcaatggaattatacacaacaaaacatcatctaaaattatgcaaagtcactgtttatgattagtaaaaaacaattatgatgcaaactgtcacacacataaccaaaatgtaacaagactatgttaattcacaatttacagacccccatagagggtaaaaaaagggggtaaattagaaaattcaacaaagatg

SEQ ID NO: 97642 - DNA, 617 bp, Cannabis sativa
  modified_base (142)..(154): a, c, t, g, unknown or other
cataattatttgcaagttgcctcgttaaaaatcttactaggaaaacaaagtgataagacctgagctaagggaaaaatagtacaacatgaatatgtctctcctcatgcacatatgattcataattattttggtgataatatannnnnnnnnnnnntgttatcacttttaaaatatcaccgtattttatccataattatttaatcactaatgcatgtgtatatacaatattgttcatacaaaagtttgaaatgttaagtaatatgaacataacacattagtgataatataaatttttatttgtgataatgatggtactccaagaccatatatttgttacattcttattgtatgattttaatttctatattaaatgatcatatatctataattcttcatgcatatgaagtatttcgggacttctgtactaatgaacaaactacatacatttaatatttttttaatatacaaaaagaaataaaagttttttcttcaatcatttatcaaaaactcttcaagagtttatcataacgtatattttataaatttatattgcatagacaatcatacatgttttccaaacaacaatttacttacatgtctttatttcatacaaatat

SEQ ID NO: 97643 - DNA, 671 bp, Cannabis sativa
catgtaaatttccctaaatataaaaaacacagtaaaagatagggtttgttcttaatcaaggggtttcaggctttatttgttgggctggtcctgtttcaattgggctcatggatgcatgagttgtaaaatcgtaacattaccaattttgttaagtaaaataagcctaaataccatttgtgtgttttcttgattttttttttgagtatatataaatattactttattataggggtctttcttaacatatacgtatactatatctaatattgtgtacatctacaaaatttactacattttatggtagatttaataattagctcataaagtaaacaataatactagattatccagaaatgccacttttaccagcacagttcgttacggcactggtaaagaggtcaaagttttactaacacttttcattttatgctggcaaaagttctaataccaacattgatttgtcaatccctttttgccaacacattacaagttaattctatattttttaccagcgcaataccaagttttttgccaacacaaaaatgtgttggcaaaagtgacatttcttgtagtgatccatatatctctctctctctctttttttttttaatctctcaagatttgaggtagattgtaatttgtatagttcattgtaatatttttattattat

SEQ ID NO: 97644 - DNA, 2264 bp, Cannabis sativa
tgagtgctcgccgttttaggttgactactcgcatttatattcttgcaaataattctatcttttaccagctaaattacacttcttggtgttgtgaaattctagtaacaacattatactaactaattcttcctctattgagttttgtaatacacgagtgtgtgtatatataaacctcattattcattaataaaatttataactttgtttactaatagataggcctattgggcttttaatggcgcctacaagggaacttgttcagaagattcacagtgatatagtaaagttcaccaaggtactaggccttacatgtgtgcctgtatatggaggctctggtgttgcccaacaaattagtaaattgaagcggggtgctgaaattgttgtttgtacacctggaagaatgattgacatactttgcacaagtggtgggaaaattacaaatcttcgcagggtcacttatttggtcatggacgaagctgatcgaatgtttgacatgggttttgaacctcaaatcactcgaattgtacaaaatattagaccagatagacagactctacttttatctgctactttcccccgtcaagtggaaatcttagctcgtaaactgttaaccaaacctaactaactaactaatactaaactaagttgttgaatttcctttaaaaaaaaaaaaactaagttgttgaatgagaacgaatgggccaatggcgggcctctaattactaacaacaaggcccaattgaaatttaaagtacagttgaggggttttatgggaaaacaaaaagtaagagaggctccctttcgccccctttagcaaagcaacccatcccatatttgaatttaaaataaaaaaaataaaaaattcaaaaacgaaaagtaccgttggccaacgatcaaaaatccctcccaatttcattcatatatataatgcacacacagaattgaaagactctcaacaatctctctctctctctctctctcttgtttctatcgatcgatactgttccaagaatctgaagatggcaacaccggaggccacagtcactatgtcggccatggatgctttcgagaagctggagaaggttggagaaggaacttatggaaaggtgtatagagctcgagagaaggttactggaaagatcgttgctctcaaaaaaacccgtctccatgaggacgaagaaggtgttcctcccactactctccgtgaggtctccatcttgcgaatgctctccagggatcctcatatcgtcaggtaaactctcttttttcttttttttcttttaagaattagggtttttgattttcagttgtttgaattgaatttaggttaatggatgtgaaacaagggttgaataaggaagggaagacagttctgtatttggtatttgagtatatggagactgatctcaagaaattcattcgttcatttcgtcaaactacggagaaagtccctcttgataccgtcaaagtaataatcatttccctattgttttgatgtggtgtgtggtttcattcattagatattgatcaagtagaaattaatttgtgcttttgcagactctgatgttccagctttgcaaaggtgtagccttttgccatggtcacgggatcttacacaggtcaaaatccatctctttcttcatatcattcattatactcttttcagaacttgagtgtgctcacatttctctttgcagggatcttaagccacacaatctactcatggatcggaagacaatgatgcttaaaattgcagatcttgggttagctcgagccttcactgttccacttaagaagtatactcacgaggtatattattattattcactagttctattcattaattatgtccttgatgattaaaaactcttggattgttgttgcagatattgactctctggtacagagctcctgaagtccttctgggggctactcattattcaactggagtggatatgtggtctgttggttgcatatttggttaggaatcatatctcttctgttcccttctcaattttttccctttttctccacactttatttatgtgtttaaactcatctctccttgtattaccttatagctgagctagtcaccacacaagcactcttcccaggagattcagagcttcagcaactcctacacatattcaagttcgtcgtactctccctttagtcttggctttttgaagtagtttgattttattatttatgccttgtcgtttattttatacttgcttgtctttgatttgatttttatacaggtt

SEQ ID NO: 97645 - DNA, 1461 bp, Cannabis sativa
  modified_base (278)..(278): a, c, t, g, unknown or other
gtggaatcgaccgcccgatctatactacaaccaccgctagtggaagtcacattttgggcgttaaacacccaacgtcgctttccacttctaccaagcataaaaaatgagaaattcacatatatagcataattaatacatgttaaaattaaataattctccacaaatgtgtaaatcataattaataattaaatctcataaattaactctaattatttaataatacaacatattaaacttaggaagtctttacaattacccccccgttaaaaggatttcgncctcgaaatctaacttgaataactttggatattaagtcttcatatcagactctaacccccaagtggcctctcctttctatctagaatttgcactggtcgttcatcataggacaagtctggttgtaactccaatgcttcataactcaagatgtgcataggatcagatacgtacttcctcaacattgagaaatgaaaaacattatgcacagttgataatgctggagacaaagctaaccgataagcaacttgtccaattctttcaagtatttcaaaaggccaaataaaccttggacttaacttgcccttcttcccgaagcacatgactcctttcactggtgatacacacaggaaaacatgatctcctaaatgtaacatctcggcgcttgggctctgcataactttattgtctgctctgcgaagcaaacattcgagctttaatcttatcaattgcctcatttgtcttttggactaacttagggcctaaatactttcgttctcccattttgtcccaatgaattggggagcgacatttcttgccatagagtagctcgtagggagccattcttatggtaatttgataactgttattgtaagagaattcaatcagaggcagatacttgctccatgaacctttaaaatccatgacacaagctcgtaacaagtcttcaagtatctgaatagttcgttcggatttcccatctgtttgaggatgaaaggtcgtgctgaacttcaaactagtacccatggccttctgtaaactcacccaaaactttgatgtaaatttagggtatctgtccgagacaatagtttttggtaccccatgaaggcaaacaatctctttcacatacaagttagaatactgatccattatatatgttacctttgttcgtacattcctgagtcgtacattcctgtggtcctgggcaatccaaccacaaaatctatcgcattgtcttcccacttccattcaggaagtgataatggttgaagtaatcctgctagtcgctgatgttctgctttaatttgttggtaggttaagcatttagtcacataatccaccacgtcccttttcatcccgtaccaccagaaatagggctttagatctttaaacatctgggtggttccctgatgcagtgagtaaggggagtcgtgtgcctcatccaaaatttctctctgaagttga

SEQ ID NO: 97646 - DNA, 947 bp, Cannabis sativa
taactaaaataaaataaactaatacgtacataacaactgtactatgaataaaagcctatacataattaattaggcatgttaaaaagatccatttaattagagcgaatccgacggatcacaactctactatgtttatattacattatatatgtgctaattcttttgtgttgttactgttctattaattttataatgcaaaagttttgtgttgtgaattagtaaacatattattagaaccaataatccacacaaggagagtatatggaaaggaaactataattaaatgaaagtaatatatatatatatatatgtatacgtaccatctccatctttgtcgagaagacagaatgcttcttggaactcagcaagttgttgttctgttaatctttctcccattctgagtttgcagctgtattgattattatttataaatcactaccgacgcccaggctgcagagatatatgttatatttatatatgtagtactaatttagtgatcaatatggatagagagatatagatatcacgcaagtatatatagagctatatatatagacaattattttgaatttaattattgggaagtcatagttaacgtacagtagtcaatatttattccatttctaaacttgaaaatttcggagtgacgtaagatgcattgatctgttttttgattctactggtcaaactgattttaattcaataaatgtctgcactatttataatttcctggagtttgttagttatattactattcaaactttcaaagtcttttgtagtagaaaagccttttggtgatgaaattttgtgtggatgccattttttcagctttgttgaccttatttaaaacgtattcttattaattttttgacgtatttttcaaacttattatacatttatatatattatatatgtggttaattaagaagacccggtataagagtcaa

SEQ ID NO: 97647 - DNA, 979 bp, Cannabis sativa
acgaattgggctttgaaaaaaaaaaagttttgtactaattagaaagattccttataaaatcaatttagcatatttatttgttttaaatatttgatggggatatagatcagtaaagatgaaatattgttaaatgattatggtgaataaaattaaaaaaatttgcataaaatcaaccaatcaaccaacctttgcctaaccttctatcaagaaaatttgcataattattatatgtacatatatgtgcttatatgatcacaatttgacatgaaaagagtagaaattatctagctctccaaattgaaaatgaaactaaaactagaaaattaaaaccaaaatttattatgactttggaacaacattaaatcaaaaaaaaataaaaaaatacccacctcatgagaaacccaaatttggaacaagaaaatacataataaagaaagaacaaaaaaaaaaacaatacccactcattaagagagatgaacaaaaatgatcttacctactcatttagaaacccaaatcagaaacaagaaatacataataaatttatagattaagagagatgaacaaaaatgatcttaccaaaacaaaagccctaaaaaattctctccaagcacaaagagtatgtttctatgtttggcgccaatcctctgagaaaacgagagaagcagagaacaaaagtgaagaaaatagagagaaaaagagaagaagtgggataaattaataaaatatagtttgaagcatgaacagtaatcttcacatgtagcgacagtactgtagctttatgtaaaatgaagataaaatgatcttaccgtcgttgtcattggcttgtaaaacaataaaaaactaaagtgatcttaccgtcatcgttgtcattgacacttcgctgtaatcttcttcttctccggacatttcctccaattccccgaatttgttcactattattaatagcttttctctcaacattttagactctttaattaca

SEQ ID NO: 97648 - DNA, 523 bp, Cannabis sativa
acctgcagtcaatgtaagtttattatttctaaaaatattatttcttcgacaatatattaatattgtaatttatttaattaaataattaaatatcgatcttgatgaaatgcaggaaggattttggtatcaccacgctgaaccaacgtacataatgctagtgtactggattcctaaaagtggcaacactatccctgcaaatgccacacaccgagttagtattggtgcatttgtcatgaaccaaaaaagagaggtatttatatatatgtatagtctatatagctagcttttcaatataagtaaatttagttatcaaattaaacctcttccaaatcatatctaaacttttacttattaatgaaatttttattgtgttaggtgttagttgtaaaggaaaagataggaaaaacgttgaagggtatgtggaagttccctactggaactgctgacgaggtatacaatatttttttttactttaattataataaaaagctgaattttcttaattaattatactctacacatt

SEQ ID NO: 97649 - DNA, 774 bp, Cannabis sativa
caatatgtgccgcaagatagggaaaaaaataaaattaaattcaagaattgtggtaaatatttctaataaaataaaactcaagaattgtggttgataattttaagaaatgaggtaaatatctcccataaaaataaaaattaaagaagtgtggtaaatgaaatttgagtcgattttcagaataaaataaattgtttctcattaaatatacccacctaaatttgtaaggattattaaattttcttcttcatagaaataaattttcttaaaaaaaaaagtttattttaggacctaaaaagctcaaaaatttctcaaaagaaaaaaaaagctcaaaattatctccaatggcggacatggaagcatagcagagctatagcttagtattatttctcagctaatctttctcaagatgaaaactttttccccttctttcacaacaaacactcatcttcgactattattgcctccaatttgtagattcaattcctcgtggccaacacaaagttcgattactcttctccgatctagcttctgcaattccatatctctgagctcgaatttcaagccctaccgcttgttggtgttctctgctccgagttcctctcaatcgacatcggagggttcgagtgaagagcttgatggagttaagaacgaaggagctgaaattgaatggcgtgtggaagtgggaaaccctagactttcgattccatcgatggggaaactgagcttgagtgatcaggctttctttcttcttgttttcattgcttgcacggtaat

SEQ ID NO: 97650 - DNA, 818 bp, Cannabis sativa
atatatattataatttatatataatataagagtattaatattggttattataaattagcataagtgttgttaacatttatttataataattagtaaatatttatatttatatatacaaagagaatttaatggttacattaaatatgtaactatgatggttacatttattttaattattggatcattgttaaacagttgccattagtttagaaattaaaataaaaaataatgaagaaattatataaacctaatactaaccttttttatttattcatttataaatattaattataaaaatattttttaaaatattttaattaaaaaattaatttattttaaatatatagttaattataattaattaagtttaaaataaatttttaccaattaataatctattatagcaaatcataaaataatataaccatcataattatatttaaatataaatagtgaataatccttacatctttatatatatttttgcacacatacgtaacgtacgtagtagttgagaaaaagtacaaatacacaatccaatacattacgacggtataaatatatatatatatatatatatacatgcatactcatgtaaattaaagctaaattttgaatcaaaggtatgtatacccgatctatcactataggctggatttttttgacacaacataataaaattataagtttgagaggcacgagcaaagatttggtataaaaaaatatgtgtttaggcacgtatattattttaaattggtataacacgacatgtaaactatgaatttaagcaagataaatacaaatagatagtctaaaag

SEQ ID NO: 97651 - DNA, 1054 bp, Cannabis sativa
  modified_base (616)..(617): a, c, t, g, unknown or other
atcgtgatccagaattttggatcggttacaactgaaattttggatggaaaccagaattctggatggataacaggggcaaaaagttcattttttgaactaaaacgtgcataactttttactcatttatttgattttgaaaattctagttgtgttctattagttaaatgatatgtgatcttaaaaatcaatttagaaaatttagatatcatttttgtgaaataacttgtcgcacaagttagtgaaacttttgaacttataaacactagtgtactgtgcaaatcactttaacaagactaaagtaaatttataccatttgattgtgtgtagtcttgatgtagatgaacttcttagcttgatttgcatgttttgatccaaagttgacttttcctcgagagttgactttaacttttgggttgacttttgactttgaacttttgattttttttttttttgatagggtcttgaattcttgatctcttgatgaatcttttgctcttatgaagtacgaagtagttgatatacttgttgaatccaggtctttgattatgtttgactttaccgagcaaatattgatactttgtgaacttacttgcaaaataatcaagaaaagattagnnacaaataataatcaaatatttatttatcatcaaaataagtgagtgattgactttagtcaacatcctccccctttttgatgatatcaaaatatttaatcattttaaaggaaacgaaaagtaaattaaaacatgttgagtttagctcccccttaatatattcatatattgatttatattgttttaattttgcataagtattgttatcttttcttgacatgataaagctctctcttaatcatatactcaataaatttgttaatacttggaagcataatatgattaatgccaaaataatcaattctaatatttctccccctttggatttcatcaaaaaggttggcatataggaagcaaggtcaaactaaatatatttttcccccttaatcatacaagatattacttataccaatgagatacaataggtaaagagaaatttc

SEQ ID NO: 97652 - DNA, 2061 bp, Cannabis sativa
ttttttttttgattactggcttttcaagaaagcacaaaacgaaagacaacgaaaacaaaacagactggagaagaaccagccaagaacaaagcagagtcccagtggaacaaaccagaacatagaaaacaaaggtctaaaactaatcaagctaagacaaagactaaacaaagaagctaaaactaaactaaagcaaacaaacagccatctgctcaaggagaaagcagggaactgtcaaaattggacagatcgatactcccaaactggtttgtatcgagtgcccacttggctactgagtgcgccacaccattgttcgtccgagggatccaagaagcctcccagagacccagaaggtttgctgaatccagaaacaagtagaccaggtcctggatattatgatgtaacatggttgaacggtcttgaagtttagagcaacaaactgctttgacagcttcggccgaatcactgaggaagattatattgttaatggccatagctttggccgattccgcaccccaggataacgcagcgacttcccctgccaatgcatcggagtaggagaaacgtttagtgcaggcatggaatactctaccttggtcatttctgaagatagcagccccaacagagaagttgtctccaattgcaatgtcagtgttgcagaaggtccacccaggagggggctgcaacgagtattgattctgagaactctcttggttgcagagattgagcatttccataagccttctatttgtgtggaagaggacaacattcatcggagtatctttcgcattgtgaattctgttgttacgttcactccatattttctcaaaaatgattgctgcaccttcgagaaaggcattgaagttgagacctcttggccggttgacatccagcttgaaccatgtcaaccaagcatcccagtgtaagatgcctggccgattagttctcaaattccagatacaactaaaccacaaggcccttgcatagtggcagttccagaagaggtgaaatgaatcttccatgtccgaagagcacataggacattcagtgtccctaatggagaacattgagttgagtttactccgagtgaggagattgttagatagaatcctccaccataacatcttaagtctactatggatgttggccccccaaataattctccacttagcatcattggtatcgttggcattcacgtttttaactactctataagcagatttgatagagaatttaccattacgctctgggagccaaatccacgagtcaggggacgggatgttaggaagggtaatgtttaggattcttttggcgtcatcatgatcaaaccaccttcggatcagatcttcgttccactggttgtgtcctatgaaattttccactaagctgataccaaccgtggcatccaaacggggttggggctggagaatgccattgggaacccacgggtggaaccaaattgaagtggtcttaccatcaccgattttacgacacatccctttggataagagatttctcgtatttaagattgctttccatagagtagaatccgtagtgctagcttgaatgtccatgaaatcacggttatgaatgtatttgtcattgaccaccttactccacagactggtactgtcagtaagagctttccaagcctatttcataaggaaggcagtgttaatggattccgttgagcgaaatcctaatccaccacaaaccttagggcggcatagcacatcccatgcaatcgtatgcatcgatctctttcctggcatatctccccaccagaaatcacgaagagatttatcgattttcctggcattgtgtaaaggaaggacatccgaagcaacaacatagttggagattgctgaaccgaccgatttaatgagacaggacttcccagcagatgataacagtcttgttttccaaccttggaccctcttcagcactttttcaataatgaactcggtgtctttggttcgtttggttgacttgaagagtgggatccccaagtacgaagtatcaggcgccatttttttcatcgctaggaattgggagatagcatgc

SEQ ID NO: 97653 - DNA, 723 bp, Cannabis sativa
aagccacagttacttgtctttataagatgaccatttttttatttgtaattttttatgacatatatttctttgttttattaaaagtttgtacctggtcatatattcaacgacacatgcacaactactcttaaattaaagataaatgaagcttgaagctttcttaggagcatgaaaattatttttataagtttttctatattaaatataaacattttcttgaaattaagtaccccggaacaaaagtatattttccacccttaaattccactcatatataattgtatgcatcacattattattttaaattatcatgatatatatagagagagttttttcttttagtatggtggtcaatatatattaatggctttgtaaaagtagtctataatctgtgaaaactacattaaacaaccaatctcatcaatatcaactatatataatgcaaaattgaaatgtgtcttaatatatgatttgtacggacatttctaattaagtaacttaaaggatattgtatagttatttcaaagtaattaagtaatgtttattagttatctatttttttgtgtagatcttacataatgctgtatgtatgtgtggaattattatatataagtataaataaagagatataattaataaaattgattttttaaagctctcgtatgtatatgcagaccagttcttattaggcctattttgcttggtcatattaattcccatata

SEQ ID NO: 97654 - DNA, 831 bp, Cannabis sativa
aaaaacacccttcattcaagtttaaaaatccataaaaagttctatccagccaacaggtccatgaaaactaaaaaactccgttcattcaagcttaaacctccataaaaagttatatctaggcaggtccataaaaacttaaaactccataactaaaagtctaaaacaacaacataagcaagtaataaaatagatccaacatcatgaaaaattgaaaactaatttaaattcaacacaaaacagccagcaggtccatgaagcttcatttactcaattgtaagatcttcaattccaaccaaaatctctgtaaaaataagaaaaaaaaaagtttagctagtaatataagcaaatcatgaaagataaaactaagtaaaagaatattgatatagtataatagtatattaccttcagcaattgactcaacctcttcaggtgtctcggaaagctcacttgatggctggttacgaaaccaattttgagtacaaatgagagcttggacagttttaggattcaatgtatttctaaaagagtctatgatacgaccaccggtagagaaagctgactctgatgccacagttgaaataggaacagccaacacatcacgtgctatcaaagagagaatcttgtatctactagagttgatcttccaccagtttaaaatatcaaagttctgagtatccatatcttcacaagcctccattagatacttatcaacttcagttttaggttccttgttgtcaactgccctaagcctcattttagcacgagtttgaaacatcttataagcatcaacatctccaccgtcaatctccatatcatcttggttttgagaac

SEQ ID NO: 97655 - DNA, 516 bp, Cannabis sativa
tatggagaaaatacaaccattggcactaacccaaatcagaccaacgtatctaactccaaattctcaaatttctaatcttgttttcaaagattaaatgtgaaattaaaaatgaatcccaaaaaccaaagtaaagcaccaaatatctcacactgcaacatctttacaacatagaataatcataagcattaaggagaaaacacaaaaattaacacttattctctttcaatacaaagttcccatatatcaagattatttatacaattaatttaataagtaccatacaattaattaaggtttatttatacattaggtccttaaagtatacatattttagtaagttaatccctaaattttattttttaccaaattggtccccaaactatataagtttgggtaaattggtcttcaaattttatttttttgacaaattagtccccaagctttttattttcttggtgttgtgataaatccaacacgcaagtatacgtatcgttttaacaagtaatactcaggtaa

SEQ ID NO: 97656 - DNA, 788 bp, Cannabis sativa
aaataccatctattcttataataaaagtaaaaaaaattatttttcttaaaactatataactcaagatcagcccagactaatactatattaaatcccatccaataatgaataatgaataacaacaaattgtttggttggaacctctttgacaagccagagttgttttattttatttttgatgttctaattattatatgctacgaggcacttaaggtgtcaagtaattaagatgtggcatacgttagtgcattttaatatcgtatacagtttaatttggtaaataatacgaaaacacactaactaattatatagagttatgttatctcaaaaaaatattatagagagttatgtcagtatggtgttgggcaccttaagatatcgaataacaattctcttttgttattggtcaaaagtgataattatatatacaggtaacccctatcttataatacacttgataccaaacaaattatattttaattgaaatgttataactaaatagaggtatactagaaaaaagaaataaaaacacttaaaagtattaaatgtaacaacaatacaataagcaatcttaaatttataaactatatatatatatatattattaagatataattatttttataaaattaaaaaatgtataattaattataatttagaagttattcttatttataattaaactaaaagatgactttttttttataatgaattaaaaattactcttgaataaatgttgtactatataatacactataaacaataaaaaaaatgtaaatgaactcaac

SEQ ID NO: 97657 - DNA, 662 bp, Cannabis sativa
aaaagaaatcgtccctactgtactcactgcaacatacatggtcataccatcgaaaagtgctataaaatccatggatatcccccgggtttcaacaagcaaaacaaatctaaggaggcagctacgaaccaagtgcaaactggggaagaaaacatctctgctgcaactgaaaatcacactattctcccccaaccctcctcggcacagtaccagcaacttctgaacttactcgcctctcaaactaatggtatgaatggtagtgatcctagtacttcaacaggtaatacaggtatcattctatcacaccattcaagttccccttttctaaattcctggatagttgacacgggagctactagacatatatgttctgatatcaagatgtttcaatgtatatgtaagacaacaccaaccaaattaattcttcctaataatgatagtgttaatgtgaatcaaagtggatctgttgttttaggaaacaacattgtcttgaccaatgttttatatgccccacttttcaaatacaatatcatctctgtaagttacctaactaagaattctcctatttctttttatttcactgctgatgagtttacaatgcaggacaaaaccagcaagaagatgattggaagaggtagtaatgtcaaagatctatacattcttga

SEQ ID NO: 97658 - DNA, 719 bp, Cannabis sativa
tacatcggtgcttcccaaagccaatggtagaaagtcatcaatgatttctatcgtttgcaaagagacaggcacacccaaacaaattcccgctcccttgacggcttgtcccgttcccatttgcactccgtacgactccgtagtagaaattggaatgttgagcttggtaaccaaagatgtggcgatgaaattgtgggtagctccactatcaatcagtactgtcacctcttggccatgaacattacccaccaacttcatagtctttggagaagtcaacccaaccacagaattgagtgacacctccaccacctgtgcctctgttagcccctcttgttcattatctcctaactcctccatggctgtcaactcctctatttcttcactctcatcttgcaccaaaataatctgcagctctggagacttacattgatgtccccttgtccaaggaccatcacatttaaaacatactcccctagctctcttctcctgcacttctgtctctgtgagtcttcgaaagctctttcccagctcaaagtcccgcctctgattgttgggagttgatacacgtgagccattatttgagtaatgggttgttttaaaattagttgacccacttagcccattaaaattcttgtgagtgggtccagctgaattaatttgaagtcccttgattgggcttatccctttactcggcccactatagaaggcccgaaccactttgg

SEQ ID NO: 97659 - DNA, 1672 bp, Cannabis sativa
cctagaaggcgtccgatctttgccagcctccagtcgaagggtcctcccggcagcagccttagccttgatataggccaactcctgttccctcctaaataggtacttttggtactggtcctcttccgaggctatgatgtccacccggagtgcctttctcagcggccggggtacgaatgtttgggcagagaacctttgagaggttgaagtcatccactgactgactcccagagatatgcttggccatccggcagttctccgttgtgaccaagtctcccacattaagacctttcttgtcataagtggagaaagtcttggcatgctgaaggaacagctgggtaggagcagtgcggagaagaggaggaatcctaacccactccgtgagaagctccgggcggtccacggcttggaagctgaaagagaagaaaaaacgatggctgtattcctttacattcttttgaaaattaaaagggattgggccctcattagaaggatgggctcggagagtgaaaaaatcgtctttaaacttgtcccccattttggggacagatacaagttcataaaaatataaaatttcagccaagctaggtgaagcctagcctctggctacataaaaaataaataagcctgagagcaggcgataggcttgtggaattagttggtaaggcgcaaggccgacaaaaacaagaaagttaataaaataatcttgaaaagggagcatggcgccggacatgagatgggtctggctccaggctccaaaccccccgtaattgtgattgggcgtctcctcgtcccgtggcaggcggtgaaagtaaccaaatgaaagggaaaggctagcttttataggccagaacgggtgtgaagcagttgtgaccaggtgtcatcgtacggtgagaatcacaatcgattcgcattttgtagatctaacggttgggataagtgctcatcagggcggcttgaaacgcttgagtatttgactgacacccattaaatgcgccggatcattaatggacgggaagcgaatcgttgcctgcaaaaagcaataaattttaatgatgattgtcataaatgcaacccacgcgcccgaagcacgtgccaggtaatcaatgagacagctggaggcacctaagcaagcctcatttacttcccaccaaacaagacttggggggtaaatgttgcccttaattttgcccaaaatacgtggaccaatgcgactacgacacgtgcatctgagaaacataactctgagataaatcaactaagtctttttagatcaggagtatcaatgagaaaatacctctcggagaagatatgaatgctccacatactcccggaggtcagagccatggtaaggcacctccgggagataccagactccatttgaacggtcacctcgcatttaatgtcgcatgggagaagacgtattggaacttccataagcaataagtctgacggtgtaacccctctgttccagctattacactatgattaataagcctagtgacggctactttatgagggatcacatcaatcaagaagggataaaggattatatccacctaatccctaagatatctatggtataggtcatgtatttcttattttgtatctgctaggaatatgtgcccctactgaaactacacagaaagacaagtagttcggttctagggatcac

SEQ ID NO: 97660 - DNA, 562 bp, Cannabis sativa
gacttatggtatagtaagtgttaattgattatttgattatttgttaattgcttagaatatttgtttatttgagatgcaggagttattagaagagcatgataggtttataaataatgatcttatgtatatgtaagttttgaaatacttattagcactggtattggcttgggagttctaaatgtttgaaagttatggtcacatgtctattagattatgcacatgaggcgatctggtaggatgaactgtgagatttctaggctcgaggttagaggtaaggatgcaaatcccctaccaccataaaactgggaacaaatgtatgttgtgatgcaaggagatcagattagagagctgagagaggagcaagttcgacctgctcctaaccctattcttccaacgcccctggttgtgccacaagatgtgggaaatcatttggagccattatatgaacagtttaaaaagtagaatcagccagtgttcgagggtggtgctgacccacttaaggctaaacaatggatgtgcatgataacatctctctttaactttatgtgactcaaaggtaaca

SEQ ID NO: 97661 - DNA, 960 bp, Cannabis sativa
aaaaaaaaaattaaaatgtaaaaaaaaaaaaaaaaaaaacccaaaatacactttgttttttgtttttaaattaaaaaatgcttataaattatttttttcaaacataaattttaaaatcaaaggattaccaaaacaatacctatataaacagtatcgtactgatctttgaaacttataactgttaagacatgtaatattttatttaattaatatctcttattataatatcttttaaatagggtaattaattacaattaattgttacattctaattaattttttgacttaaaattaatattttttaataactcaaaattaaaatttggtagttaactaaataatgttaaatattaatagtcaccatttatttattacctaattgattgataaatattttcataattaattgtggatattgatagaaaatattatctatttagtaactctatttaaagagttgtactatctcagaagtccaattacccattctcatttgttttttggtaaatatgataacttccaaaattaatagttggaggtatctcgaccgagaatctcctttctatatgttcaatcttgtattaatcccgcatacatacaaaattatcaaatcttgtagtttatttcgtacgttagttacccaatttaaaatttcacatcaattcgttaattggattacagactaatttatattataataataattaataatatgtgaactgtattccttactttaaaaaaggtcatatgaaaaaaaaaaaaaaaaccaagttgtaaaaacaaagaggaaaggggacaatgattctcattccataataccccttacaattctttatatattatacctaagttagccttctccattcatactcctactctctactctgtcaacccaaatctctttcccttttttcttaagaaaaaggaaaaatgccgggcgcaacagaatatttgggtgga

SEQ ID NO: 97662 - DNA, 831 bp, Cannabis sativa
tctcctccccaatcggtttggacaatttttatggtggtgtttagttgcttttcaacctgcattcgaaaggctttaaaggtagatagagcctcatctttggttttaagtgagaaaatccaggtgtagcgactaaagtcatccaaaaaatggatgtaataacgatagccatgcctagacatagtgggtgcaggaccccatatgtccgaatgcaccagttcaagaggctgctttgattcctttagagttgttggataaggtttatgatgagatttaccaagttggcagctagagcaaaattgtaaattagaaggtaaagacttcttttcattgattaaaacatgtttgagtacattaagggaaggatggcctagcctatgatgccacaaacttgattcactagtggaaacttgaaaacaagactcgatagactctaaattaggactaatattaggactgttgacactagacttttgagtagacaagcagattggtgagtaactagcagaacatgttgctggtgtggtaagttgatagagcccattgctaagcttcccttgaagaagaaccctcttcgaatccatgtccttcaaaacacaatcattagcataaaacttggcataagcattattgtctttagttagttgagaaacactcaaaagatttttggaaattttaggcacacatatcactgtatttaacttaacaggtttggaaataccaggagatttaatgactgaactgccaatgtgagaaatagcaagggactgtccattaccaacaattaatcgactcttaacattgtattcggcaggagtttggatgttgttggcg

SEQ ID NO: 97663 - DNA, 532 bp, Cannabis sativa
taaaataaaaattattaaaatgtggtatctttataagtttttggagtaaataaaattatgcattttacacttgataccttatttttgatctaattcttaaaaataagttgatcaagtatcaataacgtttttatttgtttgggtaagtttcaataccctcatttatatacatttctctctttgttatttctctctcttttctcaaactttaaaaataatttctggtcactttatttgtgaatatttcaaaatgtgaaaagtatatatttttcgctatttcaaaaaaaaatatttagttactaatataataattagttactattttatacatttttttaatcttagttaacattcatgttaaaattttgttaattgaattatactatattatacgataactaattagcttttcaaataataaaatagtatataaaataattggtatataaacatagtacacttattgttatattacatgacaacttattaatttcaaaaataatttttaaggttacctaaatatattttaaat

SEQ ID NO: 97664 - DNA, 734 bp, Cannabis sativa
agtgtatgagaattttaatattcaaaaaagtagcagatttttccatcaaaatttgtcattttaaatttcattttcaccttatagtttcatttagtcccttacaaaacacacaatacagaaattaactcttgtaatatgggaaactaaataaaattagtaaaatattacaaaaattaactaaaactaatttataaatactaaaactattatttattgaaaattaagtaaaatcaattaaaaattactaaaataaactaaaatatttgagaacaaagctaatttaatgcctagaaagatgtaaataactctattttcatagagttatcaaaatcctaaaggtcaccctaaagaagaagctactggcctgcaaaaataattggcctaaagaattgtcaagagtgttatgagcctaccggaccagcccaagaaccacaagtggccactcgccattctcaatggcatacggttgtgaggccatggtcccggtggaaacattgttcccatcccataggaggacaactaacgatccgacagcaaacaaggctttattacaagaagcactggatcaaatcgacgaactgcgataagggcctggggacgggccataagtgtctccccttaagaaaaagaaagtaaattgtcttgaagaagggagaaggaatgaatatgtaacaaaaaaagagaagataatgatggtaatggtggtgaatgactggtttaatcaatacggggtg

SEQ ID NO: 97665 - DNA, 883 bp, Cannabis sativa
ttgtgccacttttaccataaacagattaccaactcatgttttgtccaatttgagtccttatgagtgtttgtttggccaagttcctgattataacatcttaaaaccgtttggttgtgcctgttttccttacttacgaccttacaacagccacaagactgacatgagatcccaacaatgcctttttcttggctattcttcatatcacaagggctacttgtgtgaaaatagcaaaggcagaatttatattgctcgcgatgttgtgttcaatgagacttgctttcctggaaattggtcatctacatctcaatcttctaatcaggtacatactgctgtcacaagttcaaatttccccactgctattttttctacttctgacagtaaccataactctgttcctgtgttgaatgcaaatgtaaatgacactgctgaggttgttcctacacaacatctctccagtccaaatgagttggctacacctgggaattctccagcaatcacagcccctaccaactccatgacacctgccccagatattacaaatgagttgccacctgttcctgcctatatcgataacctgccacctgcctcaataccactttctgtgccaaatacttcactcacagaacctacaaatcatcttccaaccattcccacatcacaaccttctactcgatctcactccatgattaccagatcccaaaatggtattcgaaaaccaaaaatatatctagccactaagcatcccttaccagaatccttacttccatctgagcccaaatctgtcaaagccgctctaaaagatcccaggtggtatgcctcaatggactcagaaaatacagctcttaagaaagccaagacatggactttggttcctcgaacagat

SEQ ID NO: 97666 - DNA, 1457 bp, Cannabis sativa
taataagtttggactaattgtattttaactaaattaaaaaaattagggcttctcgtttcaaaatttatagctatacatgtatttttttcttcggctagaggcccactggctttctctaagtataggtacagtttggtcgaagttgcgttttgctattgcaattcaattttttctactgcgattagtcttgtctctataacttagttttgagtgttttagtattgtctctgtgatataattttgagtgttttagtcttgtatgtgtgacataattttgttttgttatgtttcgttgttggttcttctttgttcttcgatgactccatcaaactgttgttagtaattgagaataacaagttctttatgacagaagaggttgttagtagtgcaattatgtaccttgcacaataattgagcgctcaaactacaaggttgaatgaagctgtaacagttttttctgtcgtgtcttttacatcacattttattttaagttttattgtcaaatgatttaagaattattagacagctaaatatttagctcatcttttttttttaattttaattatagtcgtgtctttaatgggagagatgtcccaattaaattacagactattattttaattaattgctattaacaaaattgcatgatttattaaaaataataataaatttaaagtttctattgactgctatgtataacgacttctctccaaatctttttgtacatatacgtactaataacatgcatggccttgatattatttttgttataataatacaactaaatcaaattctcaaggttttgtttggtacacaatcttctatagtatagtattatattgtattgtgttcgattatattatattgtgatagattgtattgtactatattgtattggtattggcttatattataagtgtgtaaaattatattatataaccataaactcgaccccaatcccgactctggatcagatcccatctctagtactcctagcccacaaacctcgacctcggaccccatccctaaaccttgacctcatacccggactcggaccccatgcccagatcctaatcccagttcagggtctaggtccagagttgggcaggtcttaggtctaggattcgggttcgagtacaagtttagggtcgagtttggggctagggccaaggtcaggtttggggtcatattaggtgtccagggtcggtacttggcctagattcgtggtcagggcagtgttcggagtccaggcccaaagtctatgtccggggttgatgcccaaatctgggtttagggccgagtcagggtccagggcccggggtctggtctccataaattttttctaaatatcataatacatttatggtcgtattaaataacatgattcacattatattaaaatttatgatcgtaataattattacaatacaaaattttatctaaacataatgttcatt

SEQ ID NO: 97667 - DNA, 551 bp, Cannabis sativa
gctgaggagtcccaacaacctcaacctcaacccctgcaggtgcctcctccaccgaaaatgttcgaccacctgtaaagccttcaaatgagtgaataatctgctgattttggtcagtttatcctttccctgaaaaagttgcttggggagttcaaaacaagggtcctcacttcttgataattattattttttttttaagaatgaatagatttgagagtaaagcccatcgattttgtcagacttggtgggttaattttgaaccatatataaatgactgttttaccatatatagatggtggacttgtacaagcttataatgacggttgggctcatggtccttgtgtaatttacttccagtgtaatctgtttaaaccttataataatctcgatcaaaagtagtctcaattctcatgcttcagcctttctggtttttccattcctacaatataagtagggaccaaaaaaagcagaatggcgtatagcatcatcaaatataaagataactaaaacaatattccagcacgatgtacgattctgtagtgtgacatagattg

SEQ ID NO: 97668 - DNA, 520 bp, Cannabis sativa
gaagagggtcaagttatagaatgggacattggactcttattgactccccaacctaattctggcctttcgaacaccaaattgtagtcttatatatacacagtgtatattgacttctgaactgttcagatgacaaaagaaaacatttattcacgaggctcaactttatgatgtaaaagtaataaatacgtggtaatttaattagttttataatttatgtgattttgttattacgtacaaattatactttactacataataatgtcgttttataacatccacaaagtcactcaaaaagataataaaagaaaagaaagataaattgcactagtggtacaaatatcttcttctaccccttattttttatttaattaattttgtcttttgaatttaaagtagaatcactaggaaagtttgtgaatatataagatgtatcacatatattcatataataataatagtaaattaaccacatcatactaaatcaataaacttgtgtttcatgctgcaaaacgaaaaaact

SEQ ID NO: 97669 - DNA, 744 bp, Cannabis sativa
gtttctataccgaggctgagactgagagctggactgcctatatttattcagagggtataatcgtggcattttaaaaataaaaaataattatatatattagtgtataattttagactatgtttggtgggagggaggtagagcaggatggattgagggagaagttagagacgatgggagtaagagggatggagaaaattgttaatttttttttttttggtattgtttggtattagaaatggagaaaaaattgattagttaaattataaaattgtcatttttaaaaataaaattttattatttttttaagggtagttattatattttgtaaaatgtattttatctttttctacaatttttctaaatttggagagattaaattttgaagttttagagtgagaatgtctctttctatctctcctctctctcattctctcttcccaaacaagtgatttaatctctccttctaataaaacaaaataagcataggttaattttcttttcagtacacagatgcgtaaccgaattatttttaaattataaaatttatataaataatattaaatgataaatgacgtattttaagggtaaaattgtaatgtagatgtaacatttatgataatataaaagaatagaaagaatagtattggtacaattgtaattaggttacttagtaatttttcccttcgaactttgatatgtactaaatcgtgccccttgaactttttttttgccgttaaaaattct

SEQ ID NO: 97670 - DNA, 577 bp, Cannabis sativa
gcgagtcacgaggtttgcctcgtgcatctctttctccaaggtcaggttgattttgggaactattctcctgtgacaccctgactgcagctatctcacgctctaattcagcattacgtcagtttccttcctccaattggcgcttaagatgacagttttctaactcaatgataggtaagtacctggttgggtcataggcgcatcctcgtcaacttgattaggaagagaccggccgctgcttatcctaggcccctcgagtctgagtccccaatactaggttttcccggagctagtggcctattcagatgataaatcaaatgatccttggggactcagtggctcttttccaggacgatgattggttccttcatgaggattattttctttgttgtcatccataagaggaatattattttttatgtaaggaggcttttttctgagctttttcacgaaggctttcaatgaaagcaccaaagtgttaatgcagatttcgttaaccaaaacttgggcctaatagtgataatctcacatagaaaaataaaaacaataatggaaaaggtatgaacacaaaggatttttt

SEQ ID NO: 97671 - DNA, 780 bp, Cannabis sativa
tctctctctctctctcttagttgtggaaaattggaccacacccccaatcactcaagaattattcaccattataatgggtaagttgtgctttaagcattttgttagacatttgtatagtatgtagtttgcttttgtcatatgtgtgtggtatttgtcgaaactggtattttttggtcttaaatgatagatttggtaaatttggttttctgtcggaatttgggttttctagagattatcgacagtttgtcaatagaatatcgatgcaatgtcgataatatgcgaaggaaggttagggatggccattatcgacatgatatcgacaaaatgtctatatcatgtcgataaataaagtaatttaaataaattcatatatttggcaatatatcgacaatttgttgatattatgtcgacattttgtcgacaatacacctaattaatttaaattattgtggatatttaggaatatttactggtatttattgttgtcgacaatttgtcgatagaatgtcatatattattgactttaagacaaaaaatattgtaaacttttaaacattagacgcgaaacaagtgaaattttttagacataagtaaagactaaacaaacattaaaactaactactaaacaatcataacataaaaatttaaaagtctttactctgtcggtgagactcgtaatatgggcataaagatctaggcttgaccggttcgccattaaaataacctaatctgcaacgacgacactcttcggggaaccctggtggtggatatggatatttc

SEQ ID NO: 97672 - DNA, 1126 bp, Cannabis sativa
taaagaccttgatcaagcttcccagccaacaaggtcttcatggttacctgatctttgacacaacaataagtgggatgaaattcaaagtatgcattgttatctttggcaaattgggagacactaagaagattctttgtaatgtgagggacatgtaaaaggttatttaagacaagttcttgggaatgaaaaggagagagaatgaaggttttacctatatgctggatgttgaggccgaaccatcacccatatgtatttgtcggtcaccagtgtagtcagtggagaatgtcaagttttgagcattgggggtaatgtgatgagtggctcccgaatcaggaaaccagctattatcttgaacaacttctggtgtggcatacaagtgagagcactcggcaagattggcactgccaggaaagccttgaaatgtttctggaccaagaaacgatttatcaaatcggtagaaacatttttggactgtgtggccaagtttgtggcataattggcattgaagcttttgaccccaagccgaatattgtcctcgaccttgagtagaacctcttctttgtgatgatgtttgaccacagccagtataggaacctctagactgagacatgtgagaaccaaagccaggaggaggatttgtagcatagtaatgacctctggacactgcagcatgaggagtagaagtattagtaggataatatggtgaggaaaaggtacctttatttcctgaaaagggctttgtgtgggacaagtttacttcgactttagctatgtcaagctctgtggagtctttttccaaccttacttcttgagccatgagaagtgcctcaatttctgcagcagaatagtcatcaagtcgagtattgacagaggttacaaacacattatattcactggataaaccattgaatatggcttcaatatggtcttgtgcagacatagaatgaccaattgatgcaagaatataaacaagactcttaatctttaaaagaaaatcactgagagagccttgcattttagagtttccgagttgagttttgtatttgccaatattcgctctgttcaatgcagtgtagtagatacgaagagtatcccagatttgggcagcagtatcacacccaaccat

SEQ ID NO: 97673 - DNA, 2462 bp, Cannabis sativa
ttataaatatgtattatagctatatggtaaattaactaaaaaatgtcatcttttttttaagcaatatcatcagttgttttataacactactttaagctaataacttcttttataaccaggtataatcttcttggctttttattggttattaataccttggtaagttcaccgtataatcttattttttaatctgatgaacaataatctctcattgtttagtatttcaaaataaaaaacccaatttgtctttggaatattacagctcataatatacttatacagtttcaggctaggtaatacatattagaagagtgtacatataatgatgtttcttttcactagctactttaaatttttctaataatacctaagtaatgataaaccaagttgactttctgacctactcttagtctctctttataagaatttaatacgtggaatcagtgaaagatgagttaattataatgagaaaaaaccacgcacaaaaagaaaatcacagaggctaagaatggaattaagaaaaaggagaaaatatcatcagaacctcattgatgtgtggatgatatatgacctcaaaggctgcagttttaatagactagtacactattttccagctatatatgtctcaatttcgtacactactcatgactcatcttaaatccccccaaaaataaaataaaatagattaaaatatatggaaaaatacatataatcacattatatatatatccagtaatatatagattaaagggatgagatctcatgaggataaatctttgcaaaaaaaagaaaaaataaagaaaagaaagggggtttcaacgtacctagaacttgcgaattcatagagctttcctcttggagagaaaattataagtgcaacttcagcatcacagagaactgataactcaaacgccttcttcaaaagaccatttctacgcttcgaaaaggtcacttgcctgcttgctgcattttctattcgcttcatctgagtttttcccctaaccatttttattatcctccaaattaataacctattatttatatgtatatatggcaaaactgagaagaaggaaaccccagtagagaaaactatggatttgagtagaaaaactaaaaatttagttgatctaatcagagattaaacccagatgtaaagtttccaaaaatagaaaaaggggccaactttaaatctaacgaaaaaaggaaagtcacacaaaggatgagatttttcttttcatcctcttttattgctaagtttggatagatctcatcttagggagccaagaaaagaggtgagaaattttctgaggaaagcaaaaatggggaagagggttgggtttttttttctcaattttttttaaaagaaaattaacgagtatatatttaataaaatttcaataatctttcaatgtatatagctagtaaccctagagatatatatacataaagtagtaaatttaacattaaaaatatggaaaagtcaaggttgtgtgaagaacctaatctctttctctttttggaaaacacttgagaaaaaaataggcacctcccataaaaagaaataaaaacgaataaatgctaaaacatgtgaacccattattacttcatccaatcagaaaatatatatatataaaaaaaataacaataatatattaaaataaaaataaaaaataaaaagaaaaatcttcctatggatgcacaagcagagaaagttgagtggtttagagagcacgtgatgacacgtggtggtgggtgactgacaaccgatcagggcggtggccgcggagggtggcagccaagtgagcgaagggaaagacaccgaacattcttgtcggttgccagttgtgagcggacagtcttcccaacgtgaggttgcagggagagtttggagcaccctcgggcactgtaaaagaaccctcctctctctcttttattattatataataataaaataaaaaaccctaatattattaacattatataataataataataaaataaaaaaccctaatatagtaagagttttttttagtatttaagtggctcgtccgtacgaggggctctgaatcacaacatgggggtttggttctccgtacaagtattgtcagcgctggtccaatcacgtcttgtcacgttaacccatcctttctattgttattggaccctcccacgtggctgtgtcttgtttggtggtttttttttacataataattattgaaaaattctacaaggtcacatttctgttttactgtaagccatcttcattaaacccactaaggctaattaagtggtgatcagggaggagtgaaaatatattataccacctctcaaaaaagtaaaaaaaaaaaagagtaagccatcttcattttttgtattaaaaataaaataatttaggtgacttatggtaatatttttatttttaaatttttatttttaaaaaataaaaatgtgttttataatca

SEQ ID NO: 97674 - DNA, 722 bp, Cannabis sativa
tcttttagcttaacatgaaataaaacaaattgcagacataagagactgtactttaacgtggccaccagacctgagtactttgtttcttttatcgaaacctttgggcgtagtccgcccagaaggccattcaattaaaagaaaaggttcatttaatacttaaagttgtcacccaacctagtactttattggtagtatttccttaaatgttctccattccagtaccgtggtactagaatgagttacattttttcgtcatacttacctaatttgtatgttccggagtcgagaactttgaccactttatatgttccttcacagttaggtcctagtacatctgccgtgctgtctttggtgtttaagaatacccttctcaggaccatatctcccacgaagaatttctgatctttcacttgtttgttgaaataccgatctactttttgttgatgggccatcaactttaagtttgcagttgctcatctttcttcgatttcatcaagttattttgcaagaagtatgtgattggtaccttgattgtacgtcaatcttttgtgggaacgtggctcgagttcgacgggcatcatagcttcataaccgtacgccattgcaaattgtgtctgaccgcttgctgttttttccattgtacagtatgaccatagaacttcgggaagttcttctggctagtttcctttgacatctttgagtttcttctttagtgtatcctt

SEQ ID NO: 97675 - DNA, 540 bp, Cannabis sativa
gaaccgtagcagtagaagaaattgtaggctgatcaatgcttagtgtagcagcaggtggagaaatctgtctaacccgagtgaagttttcatgaaatcggattgcataagttacaatagcagcaggttgtcgtggtgaacccccatgaacaactttattcctatccgtccatatgccccacaatatacataacatcaactcaaaatccttctgattcaaaattgttgataaattgtgtaagtaatcaccattgaacatgttttgagccttggaaaaatcaagctgaaacttagatgatctctatatggctttggcgtgcttacatccaaagagagcatgtccaatagattcccaacttgaggcacaaagagaacattctacagaagttaacactttttcttaaaaagagcagctgctgttggaaggatattgtgaagcaccttccaaacaaatattctgatcttggggagtaaaaccagattccaaaaaaacttccaccaatctctgtggttatttgaagttgatgagctaagttgttcttc

SEQ ID NO: 97676 - DNA, 803 bp, Cannabis sativa
attccattcaatttcattacctccaaccaaatgccaccttagagtttagaagtagctttcaagcttagaggcaacttaggtttctaggctagggtaaaggcctttatataggaggcctaaccctagattatagtttgaaaccatagatattaacatagtttattcagccaatctgttgggttttagggcctaatttgtagcccatgtgttgttgtccacgtgtagaactctataaggaagactgcagtgcacatcttggtgggctaggctcctatggaggccaggctagctggcaatgttgtagtcccaaggttggccagccgtaggccagccattggtggtcggccagctcctaagagggagctagtctgtcacttgatgctcgtttgagtgggtctccgtttgctcaggtactaacatggccttcttgtcggtgaactgtactaccatgtggcactaattttgtccacataagcatgcaacatcatgaggaaaaaaattgggataatatttgcccctcaagtccctgtgtaaacgtctgtatggatagggactttaatagctacattggtgcggtcgagactgctctatcctttgctgaataaaagttgatgcattttctagccttttgatgcactttcactagactgtctgatgtcattgcagtaatgaaatagctgctttagtttctttatgatgagtacatgaggtaagtgaagagaaggggcccacatgtattacataagtgacttttgggggaaaaaccatttttcacttctcactttttacttttcacttcctct

SEQ ID NO: 97677 - DNA, 1533 bp, Cannabis sativa
tgttttatatggtttttttttttaaaaccatatttttagtttgatttattaaataatgccatatttagtcacatttactttttataccatatttatcattatcttaataatttttcccatattttttaaaatagccctttaataaaagtgtgggtgttgtatttgtttgatctagcccaatatcagaagcacaattatagttgcagacccattgctattacccaccatctctctctctctctctcgacctttttggctttcttttctcactcatcggcggttacttgaaagattatcaacctcattcactacctgatcggagaggaggaggcattccgttgtcgaactcggcttcattaccacctgcacttgggtcataatcaggtacggttttgaggctgctaatgaggattggttccctttccctttcctacaaagataaattttgttctttaaacgctcagagtgatgagaatatcatcatcagtatcactgtgaaaaatagttcagaagaaaagcattacttagttgtttggaaatatgctaatatactgatttgattcttttatgctatgtaataatcaaaccaagtatgtaagggagattttgtaccttttgttattctgaaattaatttcagattctaaccaattgaaaagagtttcttagtttatcattttcatgaaattgttgttaactgtgtgggatgcaacttttcagtatgtattgtttatgtaatttaacatttgttattgtgatgaaagccacacttgttgcaattttttttgttcacagagttgggcccagttttctggctatacatgcataaatttattgatgaaatggaacactttcttcacttatgtattgacaatcatgatgagtttgattgtaacttgggaattggggtttatgtgtgtgtgtgtgtacagattgtatgtactggacaatatatattcttagttgtcgtgaattgctgcaatgtgtaaccattagggtccttttgtttgaagctaacataaaattgttagatgagcacgtctaagtttggagataacacatgatttcagtgatcattacacaaatctccttcatgtttccaggactctgaagcctagttgacttccatacatataaattataataatggaaattctgtatttggaattgatatatttgcttgcaatatattttagatctttagtttaccatttttttagttgttgggatcaatgtgacggtatatgtatgtcatgtttattagattttttctctttctaaaaataacaatttaaatctgattcttgctgatgatttttatgattggttatgtgtattaaggtcatgtatagcatagatcaccacacaatcctgtagcataggaatttttcagtggagaagaaaaaagtaaagaatgagcaagcatagaccaccacccgaccccattgcagtgcttagaggtcaccgcgcttctgttatggacatttgtttccacccatctaaacctatcttattcactgggtaatatttcact

SEQ ID NO: 97678 - DNA, 873 bp, Cannabis sativa
tcttcaaacctatggacctagcttaaagttatattgagccaagttaacgggcttgactaacccttacaatcgggaaattttcaccaaggtgtttctaaatctctttcgatatttttgcactgccaaggactattaacctctttctcggattgttgtagtgacaatctcactttaactgggttgtttacaatactggtgcaaacctcacctcaatcacaatatgggaatgtgtttgaaattataagtaaattcactctattagtatgatgatacaatagaaacctagagtgattggtaagcacacttgaaagaattaaatacaaattttggcttaaagtgtgtgaaaagtgtttgttagattttaaacttgggagctcattaatctcacttgaatatgttaggtatatgatataaatgctcaaccaacatatatttatgagtaaaaattgagtttttattgtgttggggtgaaatatagccgttagcaggattttcaaaaataatcctaggaaaaacaacctgtcattttctaaatggactaccgtttttgggaaaaatggcttgtcgtttggaaaatgaaaggctgaaaacaaggcaggggcaaatcttgcatttttcggctctaaaatgcacataactctttactcgattatccattttcagaacttccaactttgttctcttagttaaatgaaatgtgatttagaaagtcaatcaaaaaatttttgaaccattgggtgagaaaacttttcgcacaagttagtgagtgggccaaaatttgaacttataaaccctagtgtgctatgcaaatcactttaacaacactaaagtaaacgcataccatttaattgtgtgtagtcttgatgtagatga

SEQ ID NO: 97679 - DNA, 506 bp, Cannabis sativa
atttaaaaaaagaattacatttcacgatgtaaatattaaattatttacgaaattattaataggtattaatatactagctgtttttttagtgatttcacacatgaatagtgagaatagacatgttttagtaattgtttttaattttggtatgtatgttgatataatataattgtatttttacaattaatttttttaaaggtatttttataaataaaattaattttaagtataatattaaaaatatcccattaaattaatagtagtgttaatttctgtatcccattaaactaataaaattagttaaataaacacttttaatatacaacagtatttattgttcttcgcataaagtattattcacctatttctacgcacaggtaaaccacttgaggttagctcaagtggccataggagggtacgtgtgtgttagaggtcttggttcgagtcttaaattatgtaatgtaatatataaacgcttaaaaaaaaaaaaaaaaaaaacgaacggg

SEQ ID NO: 97680 - DNA, 844 bp, Cannabis sativa
cgagttgagcacgaacaacggaaagctaacctgtctcaacgaatcggagaagcttgtcactctgaacaacccgctacaggggtctttctaagtcggtaacatagagtcccaatcaaccaactggtcacatgggaactagtactcaaggagaaactgataacttgattttttatcttataaatatggccaatatatgtattaatattcttaaattgattctttaaattattaagtagtgtgattataatttattaggcaatttaaaagactaatcatgtatttagagtcatttggagggatgttaggatattttggtagaaaatagtagaagctagcgagctcgattttacaagacaaaacttaattacaaatttggacaatctttgaggcagaactgaacttggagcccaagatgaatgtttagatctcgttcttagctttctgaaacatcttgaatcgtctaacttcgagttatattaaagaagttatggcctaaatactaatcaagtgacaaaaatcttttcggcagtgagctgtcgccgcgacgagcaacctcgtggttgcgacgatcgagaaaacctgtggccgtggcaaggggtcaatttctaaattgcgatttttttgtctttttattttaaagaggagttatcttttttttttagtgaaatattttttagtactataaataggacctcttaggctgtgaatttgataattctagagctacaaaattgagagacaaacttagagagagagcaaggaagagacggagattgcaactttgaagtgttcttcattctaaatcttttcttctccttcaactcttactaaatattatgatttt

SEQ ID NO: 97681 - DNA, 740 bp, Cannabis sativa
gagacaatgatgctaatgtgtgagagggatattttgagaacaaactcataaagttagcctagaatacctatgatgaatttcatatattattttaaatttaatgcatgcatacaaatcaaattttcccttttaaattactctaatgctaaacatctctataagttgtactacacaccattaattaatatatcattcaaatattaaattattaatctaaagagtaaattacggcaaaacctccaaaagtttcacctcgctaacaagtaactcccaaaactcatttttttgcggtaaaactcccaaaacttaggttttgttagcagtttgatattttcatccatctttcgctattaattgccatggtggattgtccataaattcataatgtacacatgtcacaatttaattgacacatgtaaataaatatttataaataaattaaattttaaaataaaaaaacaaaaaataattttttctttcttttctactatatcttttttagagattttttttcttcttcttcaatctttttcaaactatcaccactaccaccgcaaccaccatcactgttactgccacctccaccaccaccacgactcaaacacaataccacatcttaaaacacaaacaaacaaatatatttattacatttgtcacgatatcagattgaaatctcataaaatcaaacaaaaacccaaattaaattaaaaaataaaaatatcagatccaaaaaaaaccac

SEQ ID NO: 97682 - DNA, 513 bp, Cannabis sativa
agctgtatccatttgagaattaaaacagcgttatcaatttcagtgaccaccatggagtaagaaggccaaaccacggaggcgagaaccaccctgtcaggatcacgaaggaccaccccactcccccatatacttcctcgcagtctttaacgcaacatccacattgggtgttcatgtgaggcgaagaactcaaccgcttctcgtaggcactaccaaactgagcctgataatcaatagcccattgaacaatgagctcaactttcgatttagtttgttcatgaataaatttattcctagtaaaccaaattcgtcacaaaacaatcatcatttggtcaaattccttatgggaatgacacgagataatatgaagcattaacaatgagaaagaatcatgactagaagcccgcaccccaaaccatcttcctctctctttacacacctctttaagagcactacaaccccacaaagcatggagactcgattcttcttccatattgcataaagaacaagtagtat

SEQ ID NO: 97683 - DNA, 1109 bp, Cannabis sativa
tttactttatgattttattgcggtcgtatctttttttgttcattgagtctcagttcaaaaacatgtgacgacatattattggaccacatattaaataagttaaaaaaatatgtccccatatgtttttgagttgccacttaatggattaatagacacttaacaattaaaaaaagatatgactttaataaaattgtaaaataatgtatttttgtcaccattttttttgattaggctaacaattacaaatgtcaagggaggtttcgcctcaaatatctttaaataaatacaatatcaaaaatgaaaagtgagttgttatgcaaatatgttatgtatattaattttggggtgaattaattttgtaggtgttgggctattgaagctgcatgatgatgtacaaatgtgtggttatgaagatgttcaagtgatgtgggaaatactacaaagaacagaatcagaaatgttaggaagtaataacaataatcttaatgatcatcaacccaagcgcaagcacagattgtttcccagagtttttgtatggtctaaccaaactacaaaccaccaataatcaactactttctcatcacccaatccataatatatatatatatatatgatatgagtacagtaattatatatcactataatcacataccaatcagaatatatatatatatatataactattttgatgctaataatgttcattgacagaaataatattatcaaagtagcatcaaatatagttcagaacttgttcaataaaagcctcctaaatatatgcattcatgggtgtgtatatcaaaattggtatgatcaatggaaacatttactgttactttttcactctcaactcttatctacttatatttttcttaatttctaacgtatgtcttcaatttactgtaacaataaattatactgagttgatgttttggcttgtagcaattttattattaggtcttaagaattgtgtatatataataactattttgatatgggtctgaaatgttcaattctcaactttagggatgagtgccactgccagcacagtatcataatatttgatctgagtattaactggtacaattcattatcattgaggcaagcaa

SEQ ID NO: 97684 - DNA, 854 bp, Cannabis sativa
gaatagtttacaatgtcaaaacatggtaaattaaaatatcaaaaaacatgttcttgatagtgtaaactattcgaaatttacagggataatattttaaccaaaatgaacgtttttatattgaaaaaaattaaaaaatattttagcatgtgtttttggacgcgaaaattaagaaagaaattgtaaaaggagattgtaattaatttatatattcttatcctttcaattatagactatgaattaattgatatttcaataatgttgatggcaacaaatttgtatgttgtgtgtaaatattatggtatttgattttttaataatatatatctttcataaaagtcaattacatatgtgccctataagactatgttatattatttataaataatataatatatattaaatatgtgtaataaattaataaatgtgtatatgacaatctatatttgttatcatttttgtaatatatggtagagttacttgttactataagtaacttccataattatcactaatattaagtgtgtaaaaatgtgttacatatcttaatttaaaattcttaaaagctatagtagttatagttattggagaatgagttttctactcatttattgagtccataacctccatgagaggttatgagttagaatttcaaatggtgatatcctacaatatataaagaaatctaaggtgctcatattgtgacaaccaagtttctatcaacaatacactttgctagaaactctaaaagacttgataattctcaaaactatttcaaagctatcaactgaggatttttttctctccttcgggttggttaccactgtcttaccctctatgattgagtacttgacttg

SEQ ID NO: 97685 - DNA, 590 bp, Cannabis sativa
atatttgttgctccatatccccaacacttgtatatatattctcatgcaagtgaaatcgcaataaatgttttaagagaaaataaaaatgtaatcgcattctactatgatttttggaattttagttagattaattttttaaaatatctctattcaaaactatttagaaaaataggaatttagtttaaccacttggccaatcttttatatatttattattttaaaaattttgaaagtttttgtttaatgttaaatttaacgaaaaaaaataaaatttgttaaactaagaaatatggttagataagcacttttaatacataaagatatatattgtatataaagttaagaatatatttttaatggttaacaaaatgtataataaattgtaaataattttttttgcacgtatattataataagttaataaaatgtatataaacttgtaaattttcctttaaaatgtagatatccttaatatatatatcttacctattatataaaatgtgtatctaacagaatttgttgcgcacttaacagattttgttgtgttaaactgttagttttaacataactaattaattaaatcgttaaaa

SEQ ID NO: 97686 - DNA, 516 bp, Cannabis sativa
aaaatgatcatcactactattggtttccttaagcaaagactaataattaaatgattaacatgagttatatacgtgtcgttaagtgatttatgcttttagttttacatcatgaaataataaaaaagtatttaaccccataacttaacttttttacttatatatatatatatatatatatatatatatatgattgatgtttttgctttgcagatctgtgcaaagtgggtgtaattacatgtcaatatatatatgggtatataattgaatcggattcatgaacatgaatcatatgattttgatctatatatatataggccttgtaagaaaataaatgcaaattatttttatttaatttttataatatgtagtacggccttgaccagctggctaccatcatatataattaatttcatggttaattaaaaattttgatcctttccacacactatgataaatgggagagctttactttgtttggtgcagttttggaagactgaaattgaagaaatgaaaaga

SEQ ID NO: 97687 - DNA, 1307 bp, Cannabis sativa
acacaaataagaataatttcacaaacagaataaaagaaatggcaattaacattaactagggaaaactttaaaaaacattcatcatcttccttaattgggagtttagttcattttcaaatccataaccatttcaaaaacagaattcaacataaggaaaataaaaaggaaagaagaaagaaattgttggtgtaatgaacctgagtcgccactttactcctcccgccgctcttgactgcgttgtaggtctaaaaatcgcttcttccctttcttcttttcgtagttttctttttattcttcatttcaggattcaaaagacaaatttgggctcaatctgcacggaatctctccacggccatggcttcccttaccgcggcgaatgctaacttggctgcggcgtggagtagctcgccgcggctactaacccaagctcgaaagtagcctctctaccaaaccttggccgcggccgtaaataaatccgctacggccagaagtgaaccaaatcctgatttttcaatttttcttggctcaacttgtcttttattgtacttttgaaacctcgaacgtccacagctatgggaacctgaaaacatagaaaacaagcgtaattctgtcctaaaacatcaaaaaacgactctatttgtgactcgaaacatatgctaaaaatagcctaacagtgaactactataaatttcatgtgtctctcttatatatacttaacttataatttattctcaccagtctagtgagcgggtgtggcccagagatatgtttctagatttttgcctcaatattttagtgttttctttaagagccacagctcaaggaatcacttagagcatatccaatggagagcaataagtgtggtgtattgtcatttctagagcatttttctaaaaattaactctaatggtgatgtaaaatttgtgctaaatttgactcaagttaaaaattatatcaaatttggcacagaagatagcgtgtgccaaattttagcccataataaataccacattttttttatttacctattttccactcattaatactattcatcaataaaaaaaaggtttttttatattaatttatatgttattaaaataatataaataaagttagttgttttgtatatttttaatgagtattaatggtaatattgacttttatagctaatttacactttgtgcattggagcacaaatacaaaattaggccaaatatagcttatcatatatgttgggccagatttaacccaaaatatatacaatccattggaaatgatcttacaagatggttgcaacacgctcctca

SEQ ID NO: 97688 - DNA, 626 bp, Cannabis sativa
aatatataattagatgatacaatttaatttcagtaatattatatatcaaaataatttttaaatcattatttatcaaattaataaataattatttttattataataataaataaactaaattaaccgttggaaaaaatattatctagttgaaaacataaaagaaaaagggtaaattggaagatgacaaattttgaattgttttttagtgttgttccaagttggttgcatgtcattcattcttggccgcaagatgactcattttgttatctcttcttatctgccacgttgagatatgtgatccacataggagtttgatagttgattgattggtcctgatcactctgcgcccgctccttataaaaatatattaccaacctccaacttatcgggcttctgccagacttggattggatttgcttcaactttgaggaaactccacaattctcctcctaggtactctcgcaccaatttctcaacatgatttttttttatttacttttattttatttatttcttttttctcatttatttgatactatgacatgtgggagtgtggctttcttttgctcttttatgcatccaaattaatcatctgctgcttagcctctcttcccacaatttttttt

SEQ ID NO: 97689 - DNA, 553 bp, Cannabis sativa
ttgagttctaaaactcaaaccttggctaaactccaaaccaaaccatcaactaacttcaaatcagctcaaataaccataatataatatcagaatacaaaaaccagcagctttacaaattcagaatcctaaatataagaacatgcaaagtcaccaaactttctgacttaaatttctcaaaggagaaaaggaaccttacctgagtaaaatacttgagtctaggttgctaaatccctcaagaaatgatctactagaagagaaagaaaaccagcttttctccttgggttcttagtggccaactcaaagaaagagagggagagagtttgattatcttcaaattccattttttctaatttctagtaaataaaagatattactaatactatggaaatgcaatacaattcagattactcaatctaaagtaatctcactcaaggacaaaagcatatgaggcaaaatgaccattttacccctcccacactgaaagggtttaaaagacactaaagggtattttgggaaattctaaattctaactattctcgacattttcaatgtc

SEQ ID NO: 97690 - DNA, 729 bp, Cannabis sativa
  modified_base (50)..(61): a, c, t, g, unknown or other
ttgaaagaaaaaagttaaaaatacgtactacaattaaagatataaatttnnnnnnnnnnnnaaattattaaaatggggtgtacttagaaatttttggggtgtaaataaaacttctcttttttattttgaaaatttttggtttaataataatttttttttaattttttaagtatataaaatcaaatttccctagtagaattctgagagagaatgaacacaggagatttaagtggtttatagactaatagtttatgagcgaattatattaagataagattcttgtagagcttaagggattcaataaactatcttgggatcttatacatgcttaatactaaaagttagatccttttttacaactgataccctaatccctaaccgtggtagcgatttcatatgggcccaatagagtggaccggttacacttaggtgccgtttggtaacacatttgttttttaatattttaatcacaaaatgaaagtaaaacttttgtttttgaaaaacaaaaatacgttctgtaaccacttttattttttaattttaaaaacataaaacaaaaatgtttctgtaaaattcatttttattttcattttttaattttatttaagtcgggtctagatccgggatcagattcgggttcgggtcagaggccaggttcaacgccagccgtgggagaaggatttgggtccagatctggtcggagtctaaaacattgattaagaaaaaaaa

SEQ ID NO: 97691 - DNA, 551 bp, Cannabis sativa
ccaccgctagtggaagtcacatttgggcgttaaacaccacttcaagcatttattttgcaaagtgaaaccttttggcaacacgtatcttggtggtccctattgtctagttgcttccacgcacgagcacacaaccttcttggggggcaatagtcagatttttatatgtattttatcccagtaatgggcttattgtaaaaaatcttaggcaggtcatgagcttgtccatacccgcacttcagcctataaatatcttttcatttttatatgaagggggaattaaaaaaaaaaaaagagtcaaagctctactaagattcctctaagctttcttcttcttcaagagaaacaagagagcagagttatgatttcttgcaaaattattgtaaaaatatacaagcctcctaagaccaataatgctaacacatggactagggttttttaacatccgaatcatgtaaaaattctcgtcttctttattgttacaattataatttctaaagttcttatttatttagtttctaaaaattcgataaatagtctaaatatcattatgg

SEQ ID NO: 97692 - DNA, 613 bp, Cannabis sativa
ttttaaaatcactttaatatttttttaagaattttattctcacattatttatgttaatttcaataatgattaattttatttccataatttttttcaaaatcgtgcataactttttcttttaaaatttttttctaataacatttgttgattggaaaaatagctaactgattcggagtcaaatgatcactgattaatcaccagtaacgagttagaagtaataaataaataaaaagaaaatcaaaatttatacaggttcgacccctttgtatatgggtaatgacctactctcattttagttgtattgattgtgagataatactgtgcatatcactaaggaagacaaagtgaattctagctacgactctcaaagtatttacaaagaatatcttttagcaaagtgctcttagatgtgtgagtacaatttcaggtctagtcccctcttcttgtaaattcattcactatttatagaaaaaagttattatatttgactccgtaaaatgagtgattaaaggataaatattcttttatttaagggtgcagttgttggaaattattttaccaggatcttatatctactcacaagtatgttgattaacaccctaaatctgaactt

SEQ ID NO: 97693 - DNA, 564 bp, Cannabis sativa
aaacccaaatccaaattggagataaatgatgcaaaaattagggaaaacttagtgaaatcccaccatgatgatattgctagtcaccacagatgcttcttgtaaaaaatttttgaaggcaaacgcagtttcttgtgagatgctgcttggcctgaatctcccagcatgtcttctagtcctttagctaagcctttgttgtttacccaaggtcacaattacttttgaaccaggtgacttggactttgaaattatgtcctccaagacacgtaaatcaaagactctccaagaccctaatgtcacttttgaggctgagctaatagagtcaaagatgcgagccatcagagactatgtaggtaacaccttgagggcttgtggggttaaatacaggtgagacttcagagttagatcggtacctgccggcgagttcagttgttatcctcaaatgcgactcacaagctaaacatccgaggtggccagtggtgagaccagtacaagtgactcgattcacagaaatatttgaatatggatgtacattcaggggtggatatgagtttttgttatgttctt

SEQ ID NO: 97694 - DNA, 720 bp, Cannabis sativa
acactccattaaaggttgatcctctattagttgatgagttttatttaaattattggttataaataaattaataatataaaatagtaagaacaagaatcctccaatttatggtttaatgtttttgtttcatttgtctatatgatacaataaataacagtatatagttcactagatccttatctttaatcattacttttaaaatcattaactaatgcaaaatccaaagatgtttatgtcaaaataaggacacgtggcattccattttccacaagcactttttttttaaccaaaaataaaaaaaaaaacagaaccagagagaaagaactaaccaataatggagctgtgttcgattcgattgggagtagagactttgcatcatcttcttcaaccaaactcaaactcaaagccaaacccaaaacccatcttcattacaacttgccacgtacaccaaactcgccacctcagcatttcagccaccagcgccggcgccggcgccggcacagcattagagaaagccggagacggaggaaagagagtggtggagctagtcggagctttcaaccaactgacacacagaatgggttcaacaacttcatcttcaattctgttcaaagcccttaaactgtcaatccctcttctccacgcgcttccactcgccccagacggccgttcacctctctccaaggctttatcggtagctttactcctggccgatcttca

SEQ ID NO: 97695 - DNA, 688 bp, Cannabis sativa
aaaaaaaaaaaaaacttaactaatttattttaatgataattttactttcactctttttttatttttttattttttttatttttcttaacactctttttttatcttacaaaaaaaattaagagcaatcctcctatatctttctctcttttacattattaataaatgtagcattttttttggatattttgtagtttatttagagttgatttatgaatgatttgcatattttaataatgaggatgtcttgttatttttctattaatttatagttattttttgttattttatagattttttatagtaatttttatgttattatttaggtgttttatagttatttttatatatttttttgtacagtttgtttaatttatgtgcattttttatagtgtatattttagtttattccacacaaaaattttgttgtatatatgcacatttgttattattttttagttgtttttaggcgatttttaaaatattttttttcaataattgtttttttattcatgtttatttttttatagtgtttatttttttatagtgtttatttttagtttcttcctaacaatttttttagttgtatgtgtattgttttgtagtttagatacatatatttagttttttttttttttgacatattttattaaaatacaatgataagatttttttaattgacacaatgtgc

SEQ ID NO: 97696 - DNA, 1771 bp, Cannabis sativa
gcagacaaatttattgaagagaagatttttcaactagtaagtaatgaaatagtaacttaatttagtttttcatatgtttctttaatttaactaatataaattttgtttacttgttatttttctcactacaagattggagttagtagctttgaagtttcaagagttttggagttgaagcactaaagggtaccaactccacattcatgtttattaaggaatgttaaaagggcgcgacaacactactacaaaatgtcatactgttaatctgatggtggtattgagctcttatgagttagattatagctctcaataatgataattttatttttaccttttaacatttgcttatgaataattcaatgtatttctttataaatgataatttaatttaccaattaaacataatgaataaaacaacattaaaaaaaaacaatttagtttgcttcaatatattattacacgattataaattactattttcatcatcttctctaggcgtctattataaatggatggtttagaagcatcgttgctgttggtctcttcgacggattagtttcaaagcaatttagcaaaaaatcttttgcctcttttgaaacatgtctagttaacttatcattccacttccttctttttgtaatcatagataaaacaatgacacccactgcccaaatatccgaacattgttcttgaatttggtgtttactccaacattcaggagccctataaaaagtagcgcctctaggaggagtgggattcgttcgatcattagctatctttgccaattcaaaatcagcaattttggctacaaaatagttatcatcttctcgctctttgaccaaaagtatattgtcgggtttgagatcacaatgaacaatacccttcttatgaatgtactcaactccttttaaaattgactttatgtgtcgcttgatttctttggactcgttgtacaaaggtgagttattgataaaattatccaaggtcccaccagacgcatattccaagaagacattataaaatacaaatttattaccatcataatcaaaatcgatagttgtatcttctccatagcattgaataacgtatggacagccagcaaaaaaatcgagaatcttcttctcattgagtaagtcatagttttcagaagcataagttgtttttacgaccataacagggtggtagccattgatttgagacccttgtgtgggtcgtcgaatcattttagccatgtaaattgacgaatgtagcccttcttcaattagaaaacccctaacccatatatcattgttatttgggtgaatactcatctctcctttatcactatttcccattttttttctttctaattcgaactctatctacatctctctctctaaaaatataagttgagtgttggatatttagtaatattttgacataatcctaatgttaatcaattttttaaattaaaataaaagatatcgtttaattttttatctttttttttttgttcgatagacatttttttttatctttttatattcttatttagtaatatattttaattcatgatttgtaaattaaactaaattttgttatagtagatatcacgaaggaaacaaattaattatttgaacctaaagaaaaaaagtgaattatttgagatttttattcatctaatttatttgatactccacaatttgtgtttgagtacgtaagtgtaataaatttgtaatgtctttttatcttttccaaaaatatcttcgtgatatttataatgtagtctgat

SEQ ID NO: 97697 - DNA, 925 bp, Cannabis sativa
cagctctcagcttggcaatcttcatagggggaaagaatttggaaaggaatttcagggctaattcctcccaagtgttgatagaattggatggcaaagataccaaccaactcttggcttactcccttagtgagagtgggaacagccttagcctgatggcgttatcactaactccgttcatcttgaattgtctgacaaagctcttcgaagttggcaaggtgcatgtttgggtcttctgatggcagtcccccaatatggactgaagattggaccatttgcagtatggctggcttgatttcaaaattgttggcaccaatggcaagtgatcttatatatacaagatttggcccctgtcaagttaggaagcaaatagtcccttaggctacggtcgttgtttttgtgaccattagcttggtcttctacaactccccattattgatattattggcgttgtcagctatgactccttcttgttcaatctttattgcaacttttttcaatttcttccttcttctgttttttttacaagttttctttatttcaggatcaacaggtaatctgactgttgcaccttgatttctcataaactagttacacctaaaaaagataggattctaaaacaaacaaaattagtactataattgaaaaaaaaaaaactaaattagaacaaaatttaatgtttaataatattaactatcaatcctcgacaacgacgccagaaatttattgtgatattttgcacacgcaagtgcacctatcgtttacaagtaatagactcaccaagagtgaggtcgatcccacgatgattgtagttaagtatgttaaataaacttttacttctatttggctaaataaaattaagaataggttaaaactataagataataaaaacagtgaaaggagaaacaatttaaggaaattaacagtt

SEQ ID NO: 97698 - DNA, 723 bp, Cannabis sativa
ttaaaaaaatattatatacgtagtaaaataataattattgtgtaataataaaaatgaaataaaataagaaaaaatggtagaggatgtaaattttttaaatttaataaaagagagtatagagaacaacaataataacaaagaggaacattgactgcaacaaatttaattacaattagttttattcttaactatatttttatatattacttgcagtattgtttaattgaaagtcagaggtggtacattaatttaacgaataaaggtaatgttgaaggttaatactccattgatttcaaaaataataataataaaaaaaatactccatataatgtatattattttgggaaacaacttcgtatacttgataatataatcttatgcaaattacaaaatatttaataaaatgtacgttggtggcgtacgggagaacgcttcaattcacctccattttatatatttaaggttgtatttggttagagctaataaaataaaatagaatagaaataaaataaaataaaataatttttattttatttattttaaattaaaatgttatttcaataaaataactattccaccaatactaaaataaaaagaaatatcattccaatataagaaagaaaaaatttagtagcataaaaaaaattgaaatggaatagtaatcccttttatttcaaattaaaataatcatttactaaaataatagaaaaaattattccatta

SEQ ID NO: 97699 - DNA, 1001 bp, Cannabis sativa
  modified_base (42)..(46): a, c, t, g, unknown or other
tatttaggatgttaataaacataattgtgagtagatctaagnnnnnggtaaaataaattccaacagctaggtgatctgctttttcagaagatcaatttccttagagctagcgacaaatgccttcgagaacatggtgatgaactgcaaagccgatttcgtagaacgtggcattaattcctcagagggagttccttcaacctttgacataaattcctcgcccacaaacttctcttgaagagctaggacatcgcgggctctgacggcggggtcaatcatgacatttttccccttatcttgggcaggtctgacctacttcttagaggaatcagctgcaggagtcgccacgacttcactcttcctcttctgcgggatgatgggagatattttcgcagttctagtcttggttttacggttgagaaccggagcttgcttcaggaaagtcaattatgcaaagacaaaaacgttaaagataagtataataatcgccagtcgagaggtttgtttggaaagacgtttgtctattctctccctttgttttttagatggctccttgtacactagttcccgatgaagactggcattctcagagattagcttatgttctcgcaacttcaaagttgttcgccagtcgcgatcttgaacaggaaggctaccgaggacttcaagaacttctttgcgggctgaatccagaacaggtcgagccggtctatctgcgatcaatgaaaaaataaatgtttaacgacctcataaggtaacataaatattaactaagtgttgaaaagtgcgacgtactaggtcgacgattgaaattagtcctaattcctggtactttgaacacgtaaaaccacttagatttccaatcccccatatttaaaaccatgccttctacctgattgattctagaagtggcccacttgctgaaacagtagaacaattgtcgtggcccacattctttatgtcatagagcagctgaaatcctccatcgaaggctcccttcgcgc

SEQ ID NO: 97700 - DNA, 882 bp, Cannabis sativa
accccaatgaggtgcttggtgcgagacttgactaatgatcaagcaccaaggcatgctcatgttacaaaatggccctagtgtgggtgtgccatggggcagcacgccacacgtagcactgttttccaaccttcccaaatatcccatccattactaatactatatccattatatattactctatctctctttctagctagctagctatagctacctccctcactttgtttatataatatacttatatataatggatgagtatatataatatataatagagagtagagagagagagaaacaaggggccggatgaggtatatatgtgcaaaactggggatagttagtcgagcccatgctgatgagtttattggggttttttatatttttgttaatttagagtattgttattgtgtattagtagtgtttattactttttaaatgtgttattttacgacacctaatattgtcttttaggatttctgtttttaatgtggctattgaagagaagagaagagaagtggatcatagtttttggttcaacacgaattacgcatgcatgatacccaccaacatgtggtgtcatttgcagagtcgaccttcattttgtgggcaacacatactcataatacatatatatggtattgtgtgcagccacggccacctatcctgctcctttattaatatattcgttgccttcaatagctggtcatcgtccattggaagcacaccactacaaaactagctacgtaccattattaatacatactagtactttcttaaataatattgttagggaattttgattttatatacttaaaaaattaaaaaaaatttattattaaaccaaaaatttaaaccctgaaaaaactatatttttttttcaaa

SEQ ID NO: 97701 - DNA, 798 bp, Cannabis sativa
  modified_base (516)..(517): a, c, t, g, unknown or other
ctcaaaggtcttacatcctttgaaactctttataaaaaaagtcccaactatgaacaccttcgatcctttggttgcttggcatatggatccactttagaatccaaacgccataaattctctcctagaagtcgggcatctatattcattggctaccctatgggaatgaaagcttacacccttttagacattgaatccaaacaaatttatatttcccgcgatgttgtgtttcatgaacacattttccctttttctaacatcacctcacctcaggaaatagacatctttttctccccatccgtgttaccaaaccagcaaccagtaacacaaaaccagccaactgctgaaatacaaacaatagctgctgatgcagccaacaaaaaaccagctgatgcagtctatttccatactgctacagcccctacagtggccactaacgccacaaacaacatccctcttgctgcacaaaaattacctactgaccctatgcgtaatgatgcagcaaacacaactattgannatgcaacaaacacacctactgctacatctccactcacggctactgatatagctgatacaccacccataatttccaatccaagtatcacaaaaactcatcacaaggtagttaccaaaaatccaagcatcactaccacaaccaaaggccgcactctcactaaaccaccacatctaaaagactatgtttgtcatgcctcttccacagcctatccaattgaatcttttttatcatatataaaactgaatcctcagtttcgtgccgctgtcttagctgcatacaca

SEQ ID NO: 97702 - DNA, 1150 bp, Cannabis sativa
aagattatgctaaatatgttcattttcattcatttaatttaagtatgtaaatgtactctcaagtaggcagcatggcaattccatgatctcagaacaaagtacaaacctgctttctgggttcaaaacgtatggcacttgaagagcatctcaaggcacatgtatgtatatatataaatgcttgatatttgatattttgtgttttgtgaataatatataattgatttatttattttggaatggaatcagggcccgtatgttgctggttagaagattagtgttgtaggtttaagtttggccccaaaactataccatcttgatgttgctctttaacatttcaagaagtggattgtcccggcagagctcactaatgtcctcaactacaagaaggtatatatatatatttacatatttaaaagctcatcttataatttaacatggctttgcttgcactatattatataatgttgaccgattttatgattaggtctgtctttctcaattgtgttttgagctattatatatcactatgtagtaccattctaaacatgtagatttatgtcaaatgttcatatatgcattttactttatataaatgaaaatggctatatatataactttgattatactaattaattaatttttgttgtgattttattatttgcagcttctattctaaatttctaacattccaatcgaaaacccccattttgaaaaatcgtcaaagacaaatagaaattattaatgctaatagaaggaccataataatgcaatgtgcagagagaacgcaagagagaaagagagggaaagagagagacttatagaggtggacgagaccttcatagctgaggacgagagggaaatcgcatccctgttcaagaccttcacagctagctgaggacgagagagacttacggaggtgtaggggagacctatgccggtttgaatcgcagttgggagaccttcaaaaacagaacgcaagagagaaagagagggaaagagagggactgttcgaaaatgaaaatgaaaatataaaagaccggcctgttatatttgggggtaagtgaacaataggaggatttgcgtcgttttctcacactcacaaaatctttaccgtcggttttaaaaagccacacaaagcattcgtgaggct

SEQ ID NO: 97703 - DNA, 3250 bp, Cannabis sativa
caaagatttattaggttagcttgagtttaacatgttcaacaagttggtttgaccaatccacctttaaatgacttccaagtttgcagacatattagatacaactaacctagctacctcaaaaagaaaaaatcaattgatataaggagtgtgatcctataaagaagaatcaacgtaccaaccccagagaattattaattatatacaaatgacaggaaatgttaaaatagtactgggctattgtaaacagctgtatatttgatggtctatccttccaagacctcagcagagattaggctttatatgttatagcttatagctatttctttaatgctttattatgttaccccttaataaatttaggagagtctaagacatttgacctctgtctctttttcaaaaaagtaaattgtaaataactggatatttctaacctaaatttttatgtggatgctaatatgattaggataatatcagattcagtagatattttaggattatctgtaaggcatatgaatcctattgtttcctgattttctatttctgcctcttcttttcctgtgttctttcctctatttattagtgatacttgtaaaagccaagatgtctgaacttatgatagtcttattgatattaatgatattaatttggcagctctaacgatattatttttgtcgttgtgcatgttgtagctctggagaacagtactcctcacaccctttaagctcatcacagtgttcttgcatgaagcaagtcatgctattgcttgcaaactcacgtgtggtcaggttagaagatcttttttctactcaatgcatataatgtgaagttatttaatcatggttcctgaagtaagtcgcgcaaactaatatgacctcatgtgcaggtggagggaatccaagtccatgcaaatgagggtggtgtcacacaaacgcgtggtggtgtatactggctgatattgcctgcaggatgtaatgcacttttttccctggcaactatttttctatagtccacatcccactatcaagtttgtaaagtgcaagtgaaacatttcatgctttatctttgactgaaaatgcatgaattttacattgtcagatcttggctcatcattctggggaatgactttgatacttgcatcaacaaatctcctcactgcaagaattgctgctggttgtttaatttttgctctgtttgtggtgctctgtattgctaaaaatgtaagattgctaattcacatatttcagcgcatgcaaacattattgcatatttttttcttcagctactttaaattgaggacatactaatttttcctttctatcttattcttcacacagtggacactccgtggactttgtatcggtatgtacttttattgagtatttgaaagtaaggtcaatactagatattcatatgcttccttgttatgttctgatgctgactggttgaaaatctatcaggattcatcatttttcttgccttaatttgggttctgcaagaaatgacaacagttcgcatccttcgttacgttattcttttcataggtactttcttcttattatttatgtggtcaaactcctctattactttttacatgtattattacatctattggattggaatttacagctactttatgtttgatttggttgattgcaggtgtgatgaacagcttgttttcagtatatggtatgtaccaacactcatctttttagtaagtgatttattgattaccaattctacacttgtgtttgatattcaaaggcatatgacagatatatatgatgatttaatatctcgaagagttaactccagtgatgctgagaaatttgctgaaatttgtccttgttgcaatggtgttggatggggagtcatatggtgagtgagcatgttgtttaaaactcatttatattaatcttttgttgctctctagacctttttcaaaagttaggttgcttcagaattttaaattcaacaacaaacttgatggaaactctggtgttaatctgaattgcgaatatttggtagcaaaatcaattttaatagttgtgattgcatttcaaaaaaagagtatgtatattttctcattgtaaaatgattttttactaatattaatgcaataaactacacttgcaggggaatgatatcatttacatttctttgtggatcaatgtatttgggtcttgtcatcttatcatgaggtacaagctgctttcctctagcctataaaaaattattggtaaaatatcattattgctttttcagtaagcttatatgttttttctcacaacacctttgtgttgttagaagaggctacttatcaactttgaaatcttcgtagcattttatgtgccaatgttaatattttctttttctttttgatcttgaataacttagttggtagttaaagatgacttttatagatgaattaaatatgtttttgttgttttttctcttattctttccttttcaggattagaatctcgggttcaaactcatcttggggttgcagatatatcatcatgtttcattccaaattttgtagcctgattcaattatactaaaaagatatttatgacttcattcttttaaccctttttattgagggttacatgtgattattttcataattttttataggagttttgtactcgtatctattttttatataggagctgcagagtgatttaaacatttggcatgatctacgtaattcaatgtatttttatatatattatatggatctttcgtatgctgaattgaaaaacatgggtaacactagaaaacctaacacgctacggcaataacatgatttaggtacacatatctaagtcggtaaagtgggtgttgttggggttttcacttcattaatcaaattaaacttcagataaagaaactcaaaactcaaaattagttatgggggcctttattataacaattaattattgtctcagaaaaatggtccaccttcttatttattttcatgcaagcattaagaagagaagggttgaacataggaagctcagattgtggagaactttgacgaggtagtagctcactactcttaaaccactttaagagttacatgggaagccaaagctcaatcaccacccgtgtgttgattcattgtgttcaacaggggtatactttagatcttcacaactaactgaagctaattaagcagtagggatacattgggctatttacaaaaatatggaaaaaaaaaaaaaaagataagttttgatatatatgg

SEQ ID NO: 97704 - DNA, 524 bp, Cannabis sativa
ttttaaaattttaatttatttttaattttcttaattatttaaaataatttttttttaagatctaaattaactttttaagatttaatgaaagaaaaatattgaatcttttttgtttttattcgaaaagagtacggtttgacagttgttaaattttaagaataaaattattaatgtacaaagacatgtaaaaatttcaataaactgagtaataggacaaatctaataaaataattaaatttcaataaatgtaaaaatttagaacaaaaaaaataattattcttacaattttattttgaataaaaaatgaaatcccacgtgtgatggcattagtgagtgagtggtctgttctatatgtagtctctacctctgttgctggagatcaattttgttgttaactcaaataatatattattatttttttttgaaatcaactcaaataatttatgtacgaaccaatcttaacattcctcgtagccgtagtccacatgggaatcatctttacattattggctcaattttgtatg

SEQ ID NO: 97705 - DNA, 765 bp, Cannabis sativa
  modified_base (581)..(585): a, c, t, g, unknown or other
  modified_base (640)..(656): a, c, t, g, unknown or other
tgtacaaggcttgacatatgctatattgtgggattagtttacaatctaatccaggtttggaacactggattgatgtaaagcacattttcaagtatctttggagaacgaaagatctcatgcttgtatattctggtggagagttaaatcctactagatatactgaatctgattttcaattagacaaagatagtcaaaagttaacatttagatcaatatttactcttggtggaggagttgtagtctcgagaagcattaagcaaacccgtattgtagattgaaccatagaagccaaatatataggaggttgtgaagcagctaaggaagtagtttcattgaagaaattcaacactacattggaagtacatccagacgtagagaaacctctagtgctttattgtgacaaaagtggagcggtggccaactccaaggaactaaagagtcataagagaggcaagcacattgagagaaagtaccatctactaaaaaaaatatattagagaaaggtgatatgacgatcttgaagatcgtgccagaacataacatggcggatgttgggaatattttaccaagacctagatttnnnnncaagtatgttgattaacatcctaagtatgaatatctctaaaataatgaaattaannnnnnnnnnnnnnnnnaaaccttacattggttgtagcgaaagatatgactcctttcgctatatctctaacccttggatctctttctctccttcgggtttggttaccaccatcttactcactatga

SEQ ID NO: 97706 - DNA, 503 bp, Cannabis sativa
actcaaaatccatcttgacattccgaaaatgggaagagttaaactttctcaacaccggttgtaaccttcttaacttgtaacttaaggttgccaagtttcctccattagcttctttcctccaagattcaagaaccttctctttaaattcactatggtggcaccacatgttaaaaaatttaaatggcatatatcccaacttcctcaaatttaactgcttaatcacacagaaacaatgatccgagacaacctcccactgaaaaaaaagcttccgtgttaggatggagatctagccattcctcatttttaaagacccaatcaatctgcgagtagattctctctcccttctcttgattattagtccatgtgaattgagaaccacttctcttcatttcatcagctaacccaagagccagccattggtttgcatcttttaattccccagcactaaccgaattcccaccagttctatcactgtagttaaagaccgagttgaaatcaccaca

SEQ ID NO: 97707 - DNA, 793 bp, Cannabis sativa
ctgaaaaatagtattatatgttacgaaaaagataaaaaaaattatatcctttattttttaattttttgcgttttaactgatgtataatttaaacaaagaaaagaacatttaaaaaaaattacaacgaaagaaaaagaagcgggattgtacccgcctttaattagtttctttatttcctttattttttcagccattttcagcaaactacaatctggctcctcttatccgagcatttgtcttgctgctgcaaggagcttgtcggcctccaccgcgctagaagtttttcatctaaggtaagattttttttctactgttttgtttgtccctcacccatttatctttcctgggtattttttttactttgtcatgtatttcaaatatttgattttgtttttgttttcatttttcatagattcacatttcaaaatctaacaatttgatttgggttttcatttttttagtttttgagcttttgggcttttggagtctaaacatcactagcaggtaattgcctctcactttgaaaatatatttttctgcctctctctttttgattattagggactcatcaaaatattttagatatgatatagtattcaatttaatttaatcactgtacaatggaataaaaagatccttcacaattaagctgaaaacaagagaagaagaataagttgtaaagaaaaataagaacaccgttagatccctagaacccgcgttcgttcgtagatgaagaaggaaagaagaagataagaatatttatacaaaactttgctgccattataagagaaga

SEQ ID NO: 97708 - DNA, 807 bp, Cannabis sativa
gaggagatttaaaaagcttggagatggatgttatcccaccttttgaagtgggtgttttacttggctcttctataacagacttaatgatgaaactaggagctgggtcgattatggagtagaggtcactggagcgcctctattaatgagaggctatgatgtaataaatctgttgaataatatggcagattttgattacgattggcattgggatccatcacttcagggttggagtcaccaaaatactcaccttattgtccaaactcaccccaaccaactgaaaaatataattgtcattattattaataataattgtgcactgtatttaatttataaattatggtgtctttttctcctcgtatttatttccttcgtgattatctatcttgttggttgaattttatatatctcattttctattatgttatattgcatttcatttcttttttaatctttaacacaaatacatacatatactatcacctcctcatcatgattcttttatataaatttactataaatactatagttgtagtctcttagttcacttttttattttttattttttattttaaaaaagaaactcccaacacaactaataattaattgaaacacaagtgagacaataaaatatgaattattaatttgacaaataatattataaattatttaataataatattaagaattgcagtcagtattatataatattatttaggttaaatcaaataataaaagtaaattattgtgaaaggaaaattaccaattttaagatttacatctttcaatttcaaaaaaaaaaagaaagaa

SEQ ID NO: 97709 - DNA, 862 bp, Cannabis sativa
aaaaaagtaaaaaataccacctgacagtatttttgtaaaaaaatggcaaaagttagtatatcatgtaaatttcccttatgttatacatagcaaaaaatatattattatttttttaaaaaaaaattattgtagaaatcaatataccctatttctttcatttttattttgatcgaatatctaaattggattagtatttagatattaatattcatctaatatatattagagagatttctcattaaaatcaagttttaaggaataattataccttttattattattattattattattattattatgtaaccaaatcttaaatgaaactcactttgaatgttctagacatgccaatcaaaatttgaaaaatagaaattcttaattaaagacataataaaatttgacaaatattatatataaatttattaattttgcatggttgtaataataatgtatttgtattcgtatcaagacaatatctgtgaatgtgaaggaccaaagtggttgaggattctataatttagaatatatgtatttattattaaaaagttctcacattctaaaaagagatctattaatgcatttttctttatttcagtatttagaaaaaaatttaagtctttttttatacatataattatctatattatagttatttaatttgaacatcttttaaaattttgaaaaatttaaaatgacaaaaataaagttcaaataatttattttacacacatataaaataaaagaattttagtgcaataaatcgtttgaatcatatttttagcatgttaattttcaatctctcaaaattttataaaatgtcttaaataactacaacacgttataaaaaattaaactaaaaaat

SEQ ID NO: 97710 - DNA, 531 bp, Cannabis sativa
  modified_base (328)..(331): a, c, t, g, unknown or other
tctttcgtgaggggctaccaaaaaacaagatgcaccttggttatacaggtagttataatcaatccatttaagctctcttaaattgtgtagtccgatacctacagcgtctcagaatcatcccacttgacctttcccaggcggtgtgggattgcatagcttacctgttatttccccttacggataacgggactactgactgtcacaatcaccaccctacggggtccgacatcctcgtcgaccacacttcttgttgggtcaaggctctgataatgtttgtaacgtcacagcttcaagcctctattgagtccttacacccacggaataatgnnnnttatacacgagtacgccactttggctgcttcatggactaacgactagccctacagaccaacacaagtatttccagcgtactttgtcctcactcgcaggttccctgggaaaacttcccaagaggtcacccatcctgaaattaccccaggtcaagcacgcataactgtggagttctttcgtgatgtgctacagacaaacaag

SEQ ID NO: 97711 - DNA, 1190 bp, Cannabis sativa
acaccactcaacatctattgggctggaacaagaaagaaatccaattatgaataaaacattatcagaacactaattttcaattatttatataaaaaaaattgattcattaaaataagtcactgaaaaataaacgttattaacaaaactcaaacttagatcagcatcgtaacaaagtagcgaagaacggaaaatattgttcaagaagaacaaacactttccctaagatcacaaggatcaactcaaacctattatcaacaaccaataagatttggtgtaacttaacaatgatccacatgaacatgaatcaacatctacgcataaaaaatcacagaaatacgagattcaagaattaaaatggtttaaaactatcaataactcacattaagatagataaactgtctgcatataagaaaatgtattcaaataaacatactactattactctttgatcagtactaatttaaaaacaaacattgcaaaacatccgaaatttaacgacaaaaaggggaaaacatcacttctttattaagaaatctacttggatcgctgtctcatctttcggcgcttcctctttagtctcctcatacgcttcttcttccactgtcacaacaaatataaaaacaaaaattaacaaaatagaatcaaaaccaaacatcaagcaacgaacaggtaataaagagatctacatttaataaccaatacagatctttagagtacaactaaccttagccctcatggtgaagatgacacgaagttcgcttccaaaccctagagtttcagaagaaagataggtctgccgagaaaccaaatgtgacgcgaggggttatgctgtgaggcctcggaaatatttataggtcaagaaaagaaaccctaatgacaactttgaaccgccttaagttgggcctcggtgaatttgcttttctgctcagctttgtactcggcccaatagatactactccaacttacaaggcttagctacatagaaattgcacatatatcctttttttttttattaacccatttcatttttacctttctttctatatatttaatttatacactcttttatttattatatcccgattatacctaataaaaaaaaaccttcctcacctccctgaacagggtataatcagtaatagacttataaaaggtacatttcaattgaatttaaaataaagttatttttg

SEQ ID NO: 97712 - DNA, 721 bp, Cannabis sativa
  modified_base (68)..(69): a, c, t, g, unknown or other
aagcagatgatgttgtctcatttgttaagatagctttattttttatttttttttgatttaagcgtttnnatattacaatcatgttttacttgagactcgaacccaggactttcaacatagacacccacctaagatagttttatttggcatcatatataatagttcaatgtggaatattgtgaagagttgttattggttgactgcatgaataaccgtcatcttcgccaaagggttcttgttggtgaacaaaattttagaagcttaatgagccaaccaaagtgatggatatgtcataaattgtcaaacctctgctgagatctggaacaccttcaatcaattattcaacacaagatttggaagatttaatcctatcttgaatttgaatacgaaattgttattgtcaatcttacatctcgatctgaatcttttgctttgcaagaagtttaattcatactccacaactaaaaaatgagaataaatcaacacaccacaaactctctagtcaatgttcaagcaagtattacaaatcttaatgtgaacaacacaactcttgtggtgtttcaggcaattatggcagatgatatatcgtggccaggcccggccctgggcataggcgggctaggcctgtgcctagggcccacccagcccaggggcctaaattttttttttctcttttaaaattatacattttttttaccaattttgaaaaatatcacatttt

SEQ ID NO: 97713 - DNA, 856 bp, Cannabis sativa
  modified_base (526)..(532): a, c, t, g, unknown or other
  modified_base (791)..(793): a, c, t, g, unknown or other
ggctaaaaaataataagataactaataataataaagtttttagtaatattattataatattatattattattatatatataaacgaagtttaaaactttgattatatatatattatgtaatatatataatataacagcgaaagaacgaaagaacaaagaacaaaatcctcgttctctttttccccataaaattttctctctatattcattctctttgattttcaacctgaaacttagtgatctaagctctggtagtagcaggatagcaaatccttgaagaggaaaagctttacgtatggtttaattacattttaagctaaaaactattggttttatataaggattttatgatttaaaaagattatggagattctgacttcgtagaattgttctttggtaactatgaaactagtttatttgtttacttgttgaatttgaggtgattttgtgttagaaatcgagtttagaactctttaaagcttagtctgaacgttaatggcatttttatttaagggctcgattttannnnnnnttacgaaaggatggtaatatttatagtatatatgcaccttgtgaaatttggagtgatttggataacttttggtagtgtttcggtgagtgcaaaaattgagattttcgagtttcatagtttttagaaattcttaggatatcagaaatcatatttttgtcataacttttgactcaggtgtctgttttggacattctatataccgttttgaagcttgaaatgagctctataatatgttttatgttttagagccaaaatatannntttattttagtgtatttataccgcggggtttggtagaaaaccctagattgtcttatgtgaata

SEQ ID NO: 97714 - DNA, 593 bp, Cannabis sativa
acgagaagcctcttcttcagggcactgttagagaaggcctgtaccagattcccactcgtgcccctgccttcaagaaatctcagtctcccacttccaaccagtactcagctcataatgctagtgttcttgagtctgtacacaaatgtaatcatagacatttctctaagaatcaacttcttgtaaatttgtggcataaaagattagaccaccccaataaagctgttttgaataaaattttacaccatttacatgttcctactactgatccttcattttgccatgcatgtcaatatgggaaactccatcaaatacattttcctttatctcagaataagtctacttctccctttgaaataattcacacagaactttggggtccatcaccccatgtgtctgatgagggatacaaatactatatacattttcttgatgattacacaaagtatacttggatctttcccctaaaatctaagtctgaaacctctactattttcctacattttaactcatatgttgaaaggtctttttcaacaaaaataaagtatgtccagtcagactgggggtgaatatcgtccccttgcacccattttagc

SEQ ID NO: 97715 - DNA, 973 bp, Cannabis sativa
actcttctcattgcccccatcaagctcaaaaaataatttagaaggaaaaaaaataattattgatatcaactacacaaagaatcatattaaaagagagagcagtgcacaatttgaagagtataggtagaggttattggctcctaaagagaaaattacatgtgtttgtgttttgtaagctaaattcaattgtacaaaggcaaaatgatacgatattatttagcaaagataagaaagatatataggttgggaattaaatagaataacaacttttgtatttgtaaaagttggtgtggtcatgtaatagaatcatttccttttaaaatcttcactattgacttgacaactatagtcaaacaagtgcacacctataataagttatcagcttagaaagataataaaataaactagtttcaactaacaagtatcaaaatcaaaccaatgaacagaattggatgttgaagctaatacaaacgaatgaagacacacaacactaatgattatactcttgtttcagagtggctaataatgaattttttttcagcttagaaatataattaattaagctggtttttcaattacaatcttcaagatccttcactccatatcataatttttttaaaaaaataaaaatgaacggagagttggatgttatagttaatataatacaaacaaatgaagacaccacatatcacagcataacactagtgaatagtaacaattagagtgaattattttataactaataatacccattatggcttcacaaattcaactaatcaaccttttgtgtgtaccatttttattttcaacttattatgtctaacaaaattcattttcccatacctctttttggtatggtagggacaaaaaataaagactgattggttaaaaatgagtatgctgaaaaataaagggcaataatcaaaatggcaaggtaatgtaatcacagaaataaaaccttccaaaatattac

SEQ ID NO: 97716 - DNA, 1055 bp, Cannabis sativa
aaatgcgatggatggccatttgagataaatagaataccgagtttgagcgaggttatggtttttgacaattttaatcctagactttaattagcttaagtttaagcaccatgggcattttggtaatttggcaagggagggttaggtggctggtgggttgactaacacctagacaattctttttcagcctaagatttacaatgaattaattagagaaaaagaaattaattaaagaaaattaacaaattctctctctttttccttctctcttcgaaccaagcttgattcaagaaggattgctgctgaattcttcatttcaataggattcatgtacctctttcaaggtgttagatttagtattagcttgaggtaaccctaatcatctttattttaagatttcttgtattgtaagcttgcttttagtgtgtaattttataaattggtggctgttagggttacattgatttgtaattgagtttctaagtttattttgggttggagatgagtttcggacattgatttttttgtgtgttgtggtcaatgaccaagtttgagttttaaaattcaaacttgggtcattaatggcatgttttgattttggatgtttttctgagttctattgcttggattatattggttgatgtttttataggtgttctagaaattttggtgaggttcggacacgttttgtgtatgttttggattgtttgggaaaacctagtgcaaaccggttaaccgatttgtcaggtcctataaaactagttaatcggttctgggacaagtttcccgaaaaatccatttcgtcgattcatgtccatttcagagcttgagttgggtgattccttgttgcttagggtattgtagttttagttggaggtttgggtttcccagattagggtttcggcgcgtcgtttacccggttatattatgtgattagggtttccatcccgcacaaggtttttcgttcagatcagtcaacacacttgaattcagaaacgaggtaagaatagcatagaacatatgatatatatatccgaatgtatgtatgtgtgatatat

SEQ ID NO: 97717 - DNA, 1357 bp, Cannabis sativa
  modified_base (625)..(627): a, c, t, g, unknown or other
attataaataccgcgcaaagcgcggataatctatagtgtacacgttcatataaaaaaaatattgactaaaatatttttttgtctaaatatcaaaacgaatataaaatttactgaaacactaattaaagtagacttaccttatattaatatagtataagaatatataacatctctagatccaattattaagaaataaagttggttcaaaattttttatatctactctttttttatggatttagtagttataatatactattagtgaaaaataaaattaaataatgtataaatttctttctcaaattaatatatatataaatattttacaaaaatattaaaacaaaatatataaatttattatattacaaaatcccgcaaagcgcaataatgttacttagttaatatagaatggaagtaaccataaacttaaaaaaatactgtataataaaataaaaatataaaatattgtaatacgaaattttttacatttttaccatattaactttacaaaatactttgtttaaaattttaaaattacaaaaataccacgtttcaataaaataaaaaataactaaaaaataattttagaacgacttaacaaacaatatgaaaataattataaaannncaaaaatataactacaaagtaacataaaaataacaaaatattgacctaattgtagtaagcaaaataatatcaactcatcaatatgtttttgtattacgattttttttttacttagttttgtcagctgatttatctttttgtactattacattattttttttatgaaatttgttgttacagctttattttttcacttttttttttctttttttctttttgagttagtgatagttaaaataataacataaagataacaaaaaaaaaatgtacatatatacaacaaaaatattgtttggaataaactgaaaaatatacacgataaaaatacacataaactaaacaacaactaaacaaaaaaaatacataaaaataacataatacaactataaatcaactataaaacacttaaacaaaaagtctttgaccattgaatgagataatttccactaccactagcaggtcagccgggccgtgagtgcggtgggaacgagcttcccaaacaacataaaaagaaatataaaataactatacaataacaaaaagataactgtaattaacagaaaaataacaagatatcaatcttgttaaaatatgcaaattattcataaattaattctgaatagactacaaaacataaaaaaaaaaaagtatactacttttattaattatgtaaaagataaaaaaatataaaaggagtactcttacattttttataagagagagaaagagt

SEQ ID NO: 97718 - DNA, 744 bp, Cannabis sativa
  modified_base (50)..(50): a, c, t, g, unknown or other
aaaaaaaaaaaaaaattacactatgggattttaatttttttttttttttnttttttttttttttgaaaaatcatctatataaacaaagctcaaaacttacaaagaatgatagaggtcagctttacaaaaattagctaaccaattgggaaaaatagtgaaaaaggattgagataacttgttctcaaggctcctttttgctaacctatgagcaatctcgttatagtttctatttacaaacttgagctttgtacaataggggaaacgatgatgacgctttatcttattgtagatgatacaaacatcacttagatcattgttgtccatcttgaacccatccaccagctgcttgcaatcagttctaacctcaaaatggctgttggtttccatcagaccggccttcatagcagctaaaactgcttcagcttcagctaagagaacagagcagaattgggggagaaagaccatacctgctgctataggattcccgcaccagtctctccaaatgtaacccaaacccacaccttcttttccaggatccatagctgcatcacaattgacgcagtacactccttctgggggggccaaccacctgcctagatcagtcttaggttcggtcttttcagtacataaggagatgttgtggttgttactgggggtagttattcaaaacccactcaataagtcgagccccttctaacacaggaagattgttccaacatttgtttcggttctcccaaatggccc

SEQ ID NO: 97719 - DNA, 561 bp, Cannabis sativa
taagggacacttaataactacatcgtacacgatcataaaaaaaaatgactaaaatactaataaatgttgaatgtaatattgaggaaatctaattatgattaattaaggcatattttataaaatatagattaataagggtataatgggtaagattatgatcttactaatctaattctgtggataatagggaattttactataaatagataaataagcgtaatttattaattacggaaattttattagaatatgtgtgtaacatgcatgttatttataaaataaaaataattttaggttagacaatctcggagacccaattggaggtaagaaatgtcacaacggtatttatttactgtttactgaatttttcggcaaccaaatcattttagagcttaagaaagtcatgaaggtataaataacgtaataacaaacaagagatttttacgtggttcagttgttaaatatccttagtccatgaatccattaggctctatggccgatgattgtttatacaaatataaaaagatggaccttttatcctatttttcaagctcctcttga

SEQ ID NO: 97720 - DNA, 643 bp, Cannabis sativa
gcgtgggtttggagagtatgtgcatagctgttgttgctaggaatcacctagggagtgtggtttctattcacacatcccgattggaattctcagaagctctgtgtggagaagcggcggcttgttgcttggcggtgtcggttgccttggataagaagtataattatgttattgtggagagtgattcgagactagtaattgatgctctcaatgggaaggcgtcccattggactctagataactatgtctccttttgtattaagtcctctccttctatcatgtgttgtaatttctctaatattagtaggaactgtaactttgcggcacacaacgtcgctaagtgggcttttacccaccaggtttatggatcaatctcgatcaatgctgtaccggaaaacatattatgtaacgaccatgaggtctagctctttatttaattaaatctacgcttattttcaaaaaaaaaaaactttcatgttatatcttattgagtgtgttatgcaagctttcccgtagtgtttgttttgatgtaatgtaatgtgaatagtaattataatatgaatagtaatgtaatagaataaaaattgtaataaaaatagtattatgatgtttggtttaactctgtaatgaacattgtaatcaaata

SEQ ID NO: 97721 - DNA, 924 bp, Cannabis sativa
cggttctgtgctgggaaccaaaaatcgagccccttaactcaatttgacccgaaaccttccaaaactttccagaatacctattcacactccaataaacccaaaacaagcaataaaacccaaccagccattcaacaaataaaaataccattaaagctccaacttgagctcataagctccaccttaactcaaaccttaaaacaatcacttcactaagcttaattcagcaataaaaacatccatctaacaccagaaaacagattcaaacaatcccaaagcaaacagccacacaatccccaatactatgcaaaaataatcaactttaagctaggaaaaccttaagaagaaaagagcaaaactccataccttaatttaacttcaaaccctcctaaaacttcagaatttgattgagtacaaagaattccttgactagttctcttagttggtcgaaggagagagagagaggaaaagcttgatggtgaaatgagtagagttttctaggttttcatttccttttctttttgtttttattttaaaatagatgaaagaaatcagattatttgatatatatgtataatcccataaaagacaaaagactttactaactattttaataccaattcaagcctagtcaaaaagtcaaatgttaaaagaaagccaagagtaatttggttattcccaaatcccgctaaattcttgacactaccaaagtctaactataacaccccgatattaacattctctaacatataaaatgcgactctctaaagacccaacgtcgctttccacagctcccgagcacaaacacagaaaatgaaaattttaaatgaatagcataataaacatatacgaactcaaataaattcccataatatgtatttttattaataataacaaaatctgatatataaaccctaattatttaat

SEQ ID NO: 97722 - DNA, 672 bp, Cannabis sativa
  modified_base (368)..(368): a, c, t, g, unknown or other
atgtgaataaacaatatattttggagattggttaacaccaccataggagtgtgtgtgtaaagaccacttagtttaatttagaaattagcagttaattatgattacatatgaaaattatttatagatatttaaataaatatttatgctgttattttagaattccgattgcatttttaggtcatatagtgaatttcataattttgcatttcccgtgcccggcaacatggtgttaggctcagtaaaatcacaacttagtatgttagtattgtgggacgattatttagacattgggaatgtcgggattggtcaggaatttagaatttcccaaaataccctttagtacccctttatgttattttagtgtggangggcaaaatggtcattttgcctcaattatgttttgtcctttagtggactttatgttgtgaaaatatgtgtttatgttggttatttgttggctgaaataggtttaattatacgcattttcatcattaattcaaagtaagttcttgagagaaaaatcaaagaaagaacaaaaatttcatttttcattcaagagctctctctctctatccctttcggccttgcttgggggctgctagggctgtgatttctttgcaaaattcaagtgttttccctcaagtttagagtgattctagtgaaggtaatcct

SEQ ID NO: 97723 - DNA, 842 bp, Cannabis sativa
cttaagatgcatacaagactaaacgagtcttacgtctttaagatatttgcatcctagttaagtcacgtctgtggatatcttgtaaaaattcgataacttaggacatgcgagtccttatcgggtcattgagtgcatcgggtcatccagaccagctcgatgagtaaagaatcaatctctactaactcataggaaaaccttgatgatcttcgcatatatcttggtatatgcgagtcttaaacccggtcttcggtcctgcatcatgcgaggcacaataatgcgactagactctgtcagggtcacatcatctcgctgagtctggttcaggcaaggtttttactcaagtggtctccttctgacagctcagccctcctcaaggagagtgaatccatgtgtcatacttatgggagcctggtcttgagtttttaggtgaaaaattcacactataacagtaagattcactaaattcttatgtgtttaatttctttattttagaaatattcatatttaggatgttaattcaacatacttattagtaaatctggatcctggtaaaatattcccaacatccatatctatgattagcgctctcactcaattatactaccatgttcctaagatgtaagtactgggccaatctactttgtcagctttaacgaacaattcaaagaacaaaaataatacatttaagctagaacctaaccatctcaggattaagatctattgacctaagatcatcatagtgatattaacatagaaagatatgatggtaagtttatgatatcttatcaaatgtcaatattagtctagtccgatgtatattccatacatccaatactagcata

SEQ ID NO: 97724 - DNA, 530 bp, Cannabis sativa
aacaaggaacattggtcgagagcaatcaatgaagagaaagtgtcactgataaggaacaaaacttggtcagttgtaaacagaccaccaggacagaggttgattgatagcaagtggttgttcagacaaaatgaaggaattaatgatgattcagtgaggttcaaggcaagggcaaaggggtttactcagagagaaggtgtggattttaatgacatatttgcaccagtggtaaaacaagcttctattagagccattatggccaaagttgctgctcaggatctagaaatagatcaaatggatgtgaggacagcttttctacatggcactttggatgagaagatctacatgaaacaacctgagggatttgacaacggcaatctaaaccaggtatgcttgtaacacaaatccctctatgtgtttattttgacaagaagacttacctgctattgtatgttgatgacatgctaatagtaggcaaggataagcacaaaatcagtgagttgaagtgtcaactcaagggtgaattcgagatg

SEQ ID NO: 97725 - DNA, 3307 bp, Cannabis sativa
  modified_base (550)..(572): a, c, t, g, unknown or other
ggagttccctgactgctagccacacaaaaggtattcgtaaacccaaattcctcctccattccaggagctaaggctatcaacctccgcgaggagcatggattgcccagaggggccactactataaatattgcattttgcgtcagttatggcaacaaaaatattaaaccaccgatgcaaataattactggtcaattttagcatcagttatgtgcaggcgcaggtttagcgtcgatttttagagtatttgcgtcgattgagcactgacgcaaaacatcccaattttttttttaaaaaaaatattattatgtatgggcttcgacccaattaaaaaacactataaaatctacattaataaactctaacaaaagcagccgcccccttcatctcttttctctctctctctctctctaagctaagggaaaccaccatattcgcccaactgaagtacccatcggagaccgccaagatgcccatcgttggtcgcctagacgagaaccaccgcacaaccaccccattagtcacggtagtctttctctctctctctctctcnnnnnnnnnnnnnnnnnnnnnnnatatatatatatatatctctttccctatttcgatctctctatttttaatctgatactgcctttttctaggtttgcggtggtagggtggtggtggtggtgtcacgacacgcggtggtgctctcccgtctttgaaaaaatttaagatatgagatcttttacgtgaaattgaaaaaaattgtgtggcatcgatttggttgtaataactagattttttaaaaatatgtttgcttcttataaccgaagcaaaaaaacaattagcgtcggcgcactagtttttttgcttcggttatgaattgaagtaaaaaagttttttttcttcggtttatacctgaagcaaataatcaattagtgtcagttcataactgaagcaaaaaatatcactatttgcatctgcagttatagcgtcgattatatcaattgaagtaaattatttatatgtcacttaaaaactgaaataaaaaaccttttttatagtagtgggccaaggcattctgaaacacggtaaaccgggttatgcttttatcctgcagaagcttcacccatacgtgtcagactacagacctagggaccaggctcttttgagtacgacatcagaggttgtctcccacgacacaccatcatacacaacatgcatgtccttgtgtactagcccaaatgatccaatggctagggataagggaaattcaaaagggaaaagccctgaggtgacacgcgtctgaggcctagctcgtacggtctgacacctttaaatgccatatgggaaatacgccacctaccaatttgatggtgggaatttgccccaatgatgatccatctaaggcatcccatacaaagaagctggcctataaagaccctagacagagcacgagagggggaccttctctttggaaaggaggacccattcctcatcataagcaaacacatttctgtaaccctactgttaacttcagaatatttcaactaggcttcctcttcttcaaggtgaacacagtggaaaggagttctagtccattgtatctctatttgtataaatagttaccatccaatgagcctaataaaatggactcgtggactaaggatagttaatgcctgaaccacgtaaaaatttcttatttgttatttactccacaactactatcttgccctccataaatatttagtagccgaaaatctcagttaacaattatgatctaatggtaaaaattaacttctgaggttgatcgtcgattcttagagttcgagtcgcgatgacgggactcgcttcgggtaagttgtagcttaaatttgtaactctcttggggataaaatttggagtcaatagcttcagaattataattgaattgtgagacatgactttgatggagcattgaaatagtttttaaaatttaagttgaatcgcgtcaatagatcaatattaagtgagttatggccattttactgaaggttgttctgggcccaatgcccaagttgttatccagggccaggttgacatgtgatgtcaacctggacactaagtgagtggggaaagacgcaggagatgtattttttgatgtctaagtgatatttggacatcacttagcctattttctacgttttggtgaagctggtcaccagttctcggagatgatgttgttttgcataaacgagagactcaaaactccccgatttttgaataagtcacttcgtcaggaaaataaaatatgaagttatgaatttagctattctaacttcatggctcttagttattatgaaaaattatacgaatgattgagacaaaatcataatcgggtaagaagaatctagtgcaccaggtcatttgtctatctgggtgttgagtgctcattttagagcttttgagatgctattttgatatttccaaggttctagaatttgaggatgagatatcctatcccatttttaacaatttcagaaagaatgcttggagcaaaattgacatttaagtgattgaaactagtgcaccaactggttcgttgtcagcttgggcgttgggtccagtttttatgcctttgggaatgtggttttctctccaagtttgtttgtatcttagttatttctgatgacgaaaaaaaaaaaccaaaatacttttttggaaaactaacatgaaagggcacaagttgacgatatgtcaacttaggcgttgggcctagtgcgaggtgtcaaactgggcactgattccaatttcaagtcatttgaaaattttgtttgatttctaaaaatagttgaatcttaatctttgttgaaaaatagagaatatgtctggaagagttctaaaaaaaactccttaaaatatttcattttattataagtttgttttctcatatttttgtacacagattggtttatgccataattaatcgtactcctaattaagattattttctaatgttcttaatttttttaattaaatttttttcataaaaattggaaaaatttatttcccccatatttttactaataatatgctattttatatttaacaaaaaaaaatggatggtatatttaaaaaagataacattaaaaagaaaataaaaagaaaaggcaaaatataaactctcattttgtaaatacttggaaataaatgtgctttattaagatatcagaattatcatgtggtcctccctaaacatggtttttatattaataaaagaaaaaatgtttaatttatttatatctcaacattatcctattatttgtaattgaacatatatataata

SEQ ID NO: 97726 - DNA, 3051 bp, Cannabis sativa
tttacaaattttacattataagaaatattgttacaaatttaatataacatttattatgtaccaaatttacatcaccttttaacaattcaatcaaattttttattaagtgaactatatgttaatgaatagggcagtgtgccccaagttaatggtgatgtttccttgaaaatgtgaggttcgaagttgtggactaattaatgtcttagcatttctaccattctccttgtgtttgtttcatatccaaattctttgttgtcaaaagaaaaaatattcaatttcgtaaatcttgcatttatcattcatcaattttacaattttatgctaatcccacatcagttaacagttatggtattacagtttaattttcttcacttatcactctacattaacctagaataaaaagggtaaaatcaatctagtatatataataacaataatgagtaaattcttagaagaataaaatgcccactgagtcagctagatatttactctagtccaattccaaaattcaactaacatataaaaacaagtcaaactatacaaaagattacccagaaagttgtttccatagacataactttccagaaccacagattcactttccatcagttccaatgttagattcaagattaatatctactgaaatagataccggtttctatccatttctctttgtaaataaccgacacaaaccatcaaggcgagaactgaagcctcctgcgcaatgctaaaccgattttcctcgagtttgcagggggcctcataggagccttgggacaagtatcagcaatttcatttacacgtagtgtcgaagggggtgttttgcagtcattagaatcccattcaaaactcgagctcctagcaagaacatcctctacttgcattgaaacaatagtttccaagagattttcatacacaacattgatgatctcttcatcagaaataaaaaatgcattagcctcctcacatttctcctctgagacatcattggaagagtcaaaactcagcttcctcacacaaaggttctccgatctattcacgaattttctacaccggggcgccaatactaaatcttctggacaaggacgaaaggcattaaaaagatgtgattttggtgtgacagggtcgtcataaccatcaataacactgctttcccaattttggtcggtgtccaagtcgaagcaaggacgagtagtaattttatttttagtggagggaggagagctgcaggcaataggggaatccacattctctctatcggaatcagaagtaatagaccctaaagaccttgtatcctctgaaacggccggcaatgctggaggctcaacatccttttgagattccacaacactaacctcattcattttcccaaaagaacttgttgatagatctacaatattctcgattagattctcgcatgcttcagaacccatttttacttttaaggcagagacaggggagctatatataaatatataaatatatatcagctgaaaaaaataaaagaataaaatacaattgtgagaagtggggtattcaaaatagagttgacaataagcttcaaaaaccctactcctaaaggacacaactttacaagagtgaatttacatatgataaaaactaaacactaaactgtttaacaaacaaatcaatagaatgatatatcactgcaaattatttctcaaacaaatattaacaaagggaagaagaaattggggacaaaaaccctaggtaacagaatggcaaaagttaaaggtacaaaataagttaaaccaaaaataaataaataaacaagagcacaatatattccttagaaaacatgacactaggaaaaggagtttactaattgaaatcaaaaagatcaaaatacctgagctgagggaagttatttgagaaaatcctcagaaaattcagttgcaaagcctcgaagtcgaagaaggcaagcacggcggcaggaaaaagagaaggaaaagaaagagtaccccacacggtagtactcgcacttctattctcaatttagttttatttatttatttgtttatttcgttttacttcttttaaaaactctcagctttttattttttaagcaaaagaaagaaaattcaaatcactgttgcgttttccttctttttttttcttcattctctataaactcaatccacttctgcacttcagcatccacattttcctcttcattctccataagtaatgatctacaaaacaatacatcatacacattctaatctaaatgtatatgataaaaatagcaaaacacaaagtgagatcaaattataatcaattaaatgaattgaactataataagagcgaaaactctgtgatcatgatcaataaacgtatgcagtgctttagcatataatgattcctataattgaagaaataacccagaaaatagataaagtgaacaataatataacatatatggattgtagatcaaaacccaaacacagattcaaaaacacaattatataacatatttcaacttcaacgaatgaattgaaatcatcaccacctaaatcaccatttgagaacatttatgcctcactcacaggccctctttccccatttgaaagtatagaaagacaaagccaaagtacctaaaattaaatataacacagagtctcttgaaatatttttaaggcagacatacttattttaaaaagtacaagaaaactatgcatattacattcagtaaaagctattataacaagaaaattattattgattaatgaaatagggtacaagcaatttacacgcagagaactctaggctgaggacaatacaagtggctagaactattaactgtaaaaactaactataactaaatcaactaactcaaacctttatatcaagagtttaccatcagaatcttgggggaatttaaaacgaaccaaaaattccatattcctactgcaacaatccacaatctaaggattgttaattatatagagagaaaaaaaatggtgtttttcctttttgggtataaaaattgaaacataagaatgaacttagtttatatctatatagacgtat

SEQ ID NO: 97727 - DNA, 579 bp, Cannabis sativa
gtgtaaataactatagcattttttcgttaaaaaatggattttataacaaaaataatataattacaaaaaaaatatattttaaaaaattgtacattttaaaaataatttttttttatagttttttataatcatattatttggttgtacatttataaaaaaaaatctcaatttttaaagcaaaaatgcaatagctatttacacttagttttttcttcttccttttttttttttttatgaacacttagttaattataagttataaccaaaaatgcttttccctttctcaagtctatacttcttcatgagaaatccttgtatcggttgtatgatagggaaaagctagagtgcgcttttttgaaattttaagatgatttgaagcatgttgatcaagtgttccctatgttggacgatttttatccaaatggatccatccggaaaaactatctatctataagaagatgaatcttagaattttttggagattatagacggaaggagaatcgattgatctttgacaatgtatctggatgattaagcacttggacccacatgcaaattctagacttgttgaactgatca

SEQ ID NO: 97728 - DNA, 594 bp, Cannabis sativa
atttatttgtttattttaaaaatagtatatgaggtaattcccttttattttattgctcgatgagaaacttttatctatttattaaatttttgggttctgatttttttttgagtaggggttctgaatttgatttggattgagtagaatatttcttttattcgtatacaaatttgatcacacatggtattttttaatttgacaaatatatatatatatatatattttaatttaacaaacctttagcattaatttttttttttaaatatatatatcaacagaatttattatttagctttcaattttataaatcattattattccctttaatatattttattcacattaatttttatttcttaatactttacataatatattatttttttttttcaatatattacacaattatacattctctttcttcaaattattattcttctatttgcaattatcaccccatattgaacattatttcgtttaaaattaatatttgaaaaaaaagaacaataactacaattaaaacctaaaataaaactaagtttacgtgactttgacttgtcacataacatctatctatctagtatatatatatat

SEQ ID NO: 97729 - DNA, 791 bp, Cannabis sativa
tgaattgactatcctagtattgatctatgtcgatgatatcttaatcacaggaagtgattccaaggctgtctctcaactcatctctgctcttaacactcagttctcactaaaagatttaggtactctaaactttttcctgggaattgtagtgcacacaacagagaatggtttacacttatgtcaggcctgcacgggatctcctacagaaagctcaaatggttggagcaaagcctgctccaacacctatgactaatggacttcgtttgtcagcccaacagggggatccagtagccaatgctcaaatgtatcgatcaatagttggggctctgcaatacctcaccattaccaggcctgagctgtcgtttagtgttaataaggtctgtcagtttatgcagaaccctctcaccactcattggttggctgtcaaacgaatcctaagatacataagtggcaccattgaacttggtctgcatctcactaaacccgtgtccctcaacttaacagcttactgtgatgccgactgggcatcagatccagatgacaggagaagtacaactggttttgctatattttttggttctaatttgattgcctgatggagcaagaaacaaccaacgatttctagatcaagcatagaggctgagtacagaactgtagccaatgttactgctaaaataacttggctgcattacctgttttctgaacttgggattcaaatgtcacaacctccaaccatttggtgtgacaatatgagtattgttctgctcactcagaatcccatcctacatgct

SEQ ID NO: 97730 - DNA, 516 bp, Cannabis sativa
tttcttcaatttttcagactttttgattatgtttttagtagatgctttagtatttttagtattttcaatttttagattagtaccagaaattattctttttagttatatttgagaaaaacgtgagaaatagaaaaaaaaaaaaaagttttttttcggactggagcccagtggtcgcgaccctggtcgcgacctggactttaacagaagccctgaaaattcttgggttccagaagtcgcgactaccccatctggaagtcacgaccccagtcgcaacttccctattttccagagagggctgaaattcaatcgtaagctagtcgcgactagccctaggccaagtcgcgacttgcttgcgatttttctataaattcaaacttttccccctcattcaaccaaaaattcaaatttcaaatacctcccagccgaaccctaccccttttctctcaaaaattcaatttttcatcgccaatcttcaatcttttcatcttttctataatttctcaatcccaatccatc

SEQ ID NO: 97731 - DNA, 611 bp, Cannabis sativa
tatgctttcttccaatctgaatcgtcagccttagtcaaacaagttacaaatggtttcttcctagtgcaacaaaaaagtagcactccacccttctctttttcgtgctctttagcatagtaacgtttcctaaaaattatggggtctactataataccaaacttttcagtaaaatgttcaaggctcaggagtaacctccaaccgttgggcataagtttcccaagagatattccataaagactaagtatctcggtcaccaagggaatgaaaggaaactgaaatccacaatcaaaagctgctttgtaaagacacacccaacctcccatatcccagtcggctctcatgagacttaggcagtctcatttccacatttgagggtatgtcataagaaattctccattttttcaaattagtattcgtcaaaatacattcacggttctcattaaggaacccggtaggctcactagagcactcatctcgacagccgtccataccctcatctaatggaccaatcagataacctattatctctgggtcctctccgttaactatgactgtttcacccacatttattttgtcgcactcaggattttgcacaagagttactcgctcaa

SEQ ID NO: 97732 - DNA, 1679 bp, Cannabis sativa
  modified_base (560)..(566): a, c, t, g, unknown or other
ccaccatccaccaccatcattgttacgtcatccactgctgccttcttctctctttctctcagtaacatgtgatgtgggtaacaacactaacagctatggtgccccaaagtgcgtgttacagtaaatatatatgcatatataatgggatattagagtattgacattgttggcatctgtatatgagatcagagcatatttctcttgttttggccctcaaaaggaatataattggcacatcttttgttattgttagttattgatactctttttcttttttatcatattcttctctggtcaccactctctcacatgaatcacctaattgtgaaggcacatttatcttatttaaataattgtattagactaattatattaatttaacttaattaaaatggattagaaacataattaattttaaaataaacaaaattaatttttcgttagattattttaaaactaatttaaaaaatacacttagtttaataaaatatattcccgatagaaatttctagtaactaatttatattttttaatgtttaattaattagaaaaatatattnnnnnnnaaaattaattttaattaatttagatcaacttaaattagaatatttttcttaaatattaaactagaattaataattaagttcatttcaatcaagaaacttaattatttatttcttattttaatacatttaattaaaaagaaaattaatatttaagttaattttattcaagacacttaaatattagatatttttcaggaaatttaattagaaagaaaaaaaatttaagttggaaacttttattacatatcaacttaaattagattaatttttaaaatatattttattttattttaataatcatttttcccatcaatatttcgaaatgcatattaaaatgcagatattttttgaaattttttgaaaaatagaataaagttgaaaattaattttagaccaactaaaatcaagtaattttttaaatgatttatcaaaataaatagactaaaatatattatattttaattagaaaataagtaattagtttatgaaatatctagatggttattttttgtgaagacctgtggtatttttctagatatatttaattaaatagaaaattaatatttgagttgattttattcaagatacttatatattgaatatttttcttaagaaatttaattaaataggaaaattatatttatgttaaaaattaatttataaattaattttggaccaacataaattagaataattttttccagaatttattttattttaatataaatttcaaaaatgtacttatctttaaatacattagattttgaatttagttaaatatatttattagaaaattaaatttgagttaagaattaattttaattaattttagaccaacttaaattgagtaatttttataatatttatcaaaaattaatactaagatggaaagtaattttaattattttcaaatctatctaagtataattttgtaaatattaaattaaaatttatatttagagttatctaaattagtaattttaactaaataaatgtatattagaataagggttatttgcggtaaaaccccctaaagtagggaggtttttgcaactaacccccaattctaaaatttttgcggtaaaactctctaaacccaagttctgttagcac

SEQ ID NO: 97733 - DNA, 1770 bp, Cannabis sativa
gagcttttcatggttttctcgataattattgatgatgcttgataagttttgatgttaattgatattttttgtattgttatgtttttttataattggttattactcgaagtgtgttctataggctcgatatgaactcgatatgatcaagtagactataagccctattgtaaaataaaatgtagcaaagctcaacaagctaatacgcctgattgtgctcgatggatacaagagtatatgataatgctatgttaaattctaaaattcatttaattattggtttaggatcgagtagacaacgagccatatcgagacagcctttgaattgaaatgcgacaaatcatgacttgataagatatataatgcatcaagagaactcgatgtcgtcatgttaacttatacaattttattattttaggctcaatgagttcaattgattttgatactgtatgtgttttttttttgtagtatcttgttaagggcttggtttttcttaggggggcctagattttattggggtttgagatgttggattttgtcagagttggggtttcatcgatgcttgagttttgccttgttggtttcatcggtgctaaggtttcattagggtcaaactttcgttaggctgcaatgtcaatctagtggatggagaagtattaacatggagtttaggttaggtcaaattgagggagagaacagtacttttagagaatttccaaaataataaactattttagttagagttatattatgggagatttttttatttgctatgccacatgaattttataactcaaattctccaataaaatcctatattaaaataatacattatttactctaaaaaaatacattattaattacccatcggcctactaccatatatttaatgaggaacgaagtcacctttgtgaacagggacagagacacttgttatggtgtaggggctacaacccctagtaaaaaatattttggattaaaggagaaaattttattaatcaaaactgagcaaatgctacaaaaaccagcatctccaaaataacaaaagacaaacttacttacatgttacaaattaatttaaaagatttgttgtccctcttagagagatttctcctattaacaagtagtaatcttgctttaagtgtgactctaactaaattattcacatgagaaaactttttgctctaagatactagcatttcaattccaccaaataaaataaattgatgccgcacaaacagctgcaataatcctatgaagcagactgcgatgtcgattagcattcaaccacaaaagccaattcaggtaagactcaggccaaataacattgccaagccaagaattgatagtacacatgagatgcttggaaaaagaacaattaaagaaaagatggttatgacagtcaacaccaacctcacaactgggcagctagtagaaatcatggtaatacatcttgccaacaggtgatctctggttaataagttattataagaggcttgccagagaatatatttatgttttggtatggataatctacaccaaatcattttataattatcaactttgacttaagggataagaaaagagttgtaaagtttactaacccgaaatcttcccccttttccagcatctagaattgtgtctcgagtgaaaacactcttaagattaagaagtttgcgcctgtacccctagtaaaaaaatattacatgtaaaaaaaatcaaatattttcctataaattaaataattatataacaaaatagtaaaagaaaaaa

SEQ ID NO: 97734 - DNA, 523 bp, Cannabis sativa
tgcctcgcacgtaaatttttactagtatagatatatgtgtatatatataaatagtaataaggttaagaataaatttattttaaacaaagtatgaatgataatagagaattaaaatggaattaaaataaaaatagcatgcactttataaaaaaatcataaaataataattaaaagtagaaaaaaaaaaatagatgtttagaaatagaaaataaaacttatattaagatcctaaatcaataaaagtatactttcaaaaaaaataaatgtatatacatatatattcatatataatcatacaaataaagtttattattaaaatagtacattgagaacaaagtgaaaaaacttcatatccaatatgattaagccaccatatctatattgaaatttcaaaaaataaagcttatattgagttcccaatttaataaagtatactttcaaaaaataaatgtatatatatatacatatatataatcatagaaatgaaaatttattattaaaatagtattttgagaagaaagtg

SEQ ID NO: 97735 - DNA, 889 bp, Cannabis sativa
ctatacatctatttactaatttgccccttctactgtcattattttatttatttacacaatcttttctatttccctttttttttactcatcaacaaaggttagttttgttaatttttaaggttaacaatgaaaaaaatataatttgctttcttttttgtaatgataatatttataattgtaatattattataatggaaaatgtatagttgaggtggacaaatcaactagcaaatttcacattccacacattgatcagctataatattattatcgtgtcagatgatggttgtcaaattaatgaatcaaccttacataatggtcataaaattatagagctacacagagaaaagctgtaaaagaaaaggctatttgtagcttgatcctctaaataaataaacaaagggatttatatttagtcaaagtataatagtataacctttcaaaaaaagaatataatactataaaacaaattatttttaattaattaaaaaaatatatatatatatatattttaaattaatggagaatcattaatgtgatttgattataggcaaaatcttcatattcaatattatcccattagtattattaaatatacgggggttgtttattgaatcatatttaatattttagggctagttagatatgtttcaattatattgaatgttaaattttatcatcacatctaatttaataattaatttcagttatcccaatcgatctaacaattattggatgttggattggttcaatttttctaatggatgtagtatttcatatatatttattagtttattttgggtttattcaatattggatcggatcagatccatccaatattttaggtccagtatatattagatttgactggatccatccaatctaagaa

SEQ ID NO: 97736 - DNA, 589 bp, Cannabis sativa
acaaagcaatattaacacgattaagtacaaatttgaaaaagatctgccataacttttgtgttattaattataatttgtgaactttcaattcattaaatttttcatatccaaacaaccatattataagttaaatctcagcaaactaaactacgacgtagtacaaaaatatgcaaaaatacaatatattaattattcttttttttttccaatgattctcctatactattatattcttattgatgcataaatgtaataaaaatttaaagtgtaataatatattatatgtttcagcaatagttctattttatttatgtttattaaatataaggtaaaatttatataaaaaaaaaaccaacataatttgtttaatttgatttgaaaattttaatttttttttggacaaatataaaacatttacttcaggaaatgtttgtcaaaatctatatcgatattagattattttttattgtcctcaaaggatacaataacatatacataaatatatgtattcatctctttcataatatattcgtcaactatatgatgaatattacgtttgcataatcttcgggatatatgcaagatttta

SEQ ID NO: 97737 - DNA, 1591 bp, Cannabis sativa
  modified_base (42)..(45): a, c, t, g, unknown or other
aaagttcatatttagggtgataataaacatacttgtgagtannnntaagatactggtaaaataatttccaacacggatgtaggtcgatcttcgcaataagtggtaaatcatgcgtaccaaacctaattacggcgtgttttggaacatttttcggtccgatcgggattcggagacttccgatttagtcttttggtaaaataaataactatagtattcggtaaaacaagctgcatagtggcggatgtaggtcaatcgtcacaataagtggtaaatcgtgcgtactaaatctaattacggcgtgttttggaacaatcctacaattcgattgggtttcagagatttcttgcaaagtcttttgctaaaataaataactgtagtattcggtaaaactattcggtaaaacaagctacatagtggggaattgttatgtagtcaaaaatgtatatttattagtgtaaaaataaaaaaaaataaagttattttatataatatttttatgaaagtaatgtaatatatttttatttgaaaataatataatattcaattaattttataaaaaaaataacataaaaagataaacaaagaaataaaagtaataaagaaaatgtattatttttatttaaagaaatgcaaattaaattttaaataaatatatttttatttaaattattgtgatatattttattttgaaaatattttgttgtgatttaattgtgcttgttgtttgaattaaaaaaatagcattattaaaagaaaagaaatgaaaaatggcaaaaatagagcttaaaaccatgaatattggtacttttgaagtccacaaaatcaccaataaagcagcccaaattcggcccaaaagcccttctctagcgcaacatgtcacgcgcagaggctctctgcacctgggccccacgcgtacaggaccaataggtgcctttgtccacctcgtcagccctctctcattcgtgagcttttgttcttttgatgagcatggctgcaaatgtgtatactttgctgtacaccagcaataaataaaaataaacacttactctatatatttatttgatgagcatgcctgtaaatgtgcatttttttctaaatgatgtataaaatattggtatttaaaatgtcagctaaaaacaatgtgagatgaaaaggtggccaacatttattcagtggcccttattcagtttatatatatatatttagggaaacttactaaaatattatttttttaccaaatgttttcaaaaatactgggacacggcaaactttacatttttactgtcctggcccatttttatttcttttatgctgcccaggcccaatatatttacttttatactgtaaacagtaacaaaacacaaacggcacctctccttcgtggttggggacagacaaatcaacaccgaaatcatagaaacactaggaaaaaaccataaaatttggaaaagagaaaaaaattactaaattaaaaaaaaattgttgttttgtagtgttattttactattgttttaatatgaaaaaatgccacgtaaatgaaatattgtggaaaatgacaggacatggaatctgaaaaaccgagtttttgcaa

SEQ ID NO: 97738 - DNA, 5774 bp, Cannabis sativa
aaaaatcttaaatagcttaattttaattagcattgttgttaagcactagtgatgtccatcaccttttataagtggttaccccatgatcggttagcaatacttaattacaccaataacaatataatacctaattctgaattttaatgatggtccggcagagcagagaatcatagcccagtattttatccacatgcagaaaaagagagagaagccaagttgtaaaaaatcaacagtgttggattccacatggaatcatttctctttctctctctattcattttaccaaattacccattttctctcttcttttccagatagagagagaattttctcacaaaccaatcactcatccctttctcctttcaaaaaaaacaaaagcaaaaacaattatgtccgagtctgaagaagaagctcctcctcctcctcctccttctactactgctacaatagctagtaatactgtttcgttcccgccaaagtcatcgaaggaggttctcatggattttgacctcgaccttgataatccatggccgatggaccagatcgcttttgtttctaatcctatgtctcctttactcttttcttcttccttagctgaccaccctttctctcctctttgggcttttgccgatgcagaaaacgaggagaataatcataataatagtaataatcataatcataatactacgaataattgtaataataatagtaataataacagtagcaatagtaataacaattctaataagtttggtcgacatgcgaattcggcacccatggctgactcttctcggttttcctgtgagtttttcttattgaatcgctcctgttcgttttgtgtttgactagatttcgtttgtttatttctctagctagtgatctgttttttgctatggttgagttgaaaataatctgtgattgattgtgtttcttcttacataaatggcgcttaattgttggaattatatggttttattgtagtttttttctaagctgtatatttttttaaggaacaaacaagattaagattaaggcacatactctgaattagctgtgctttggtcacttgttgatatagaactttgaagattgaaacttttttcttttcctttctaatttgggtttttgctaaattcagctcagaaaagatttgaatttcatgttggaacttaatttctttgtttgtttaaattaagagttgttgagtaactgttggagtactcatttgttcttttcgctttgaaatatcacaagtacaggtaattctaattcagtagcacaaagaccagttgggaacgaagagaacagatcacttccttcaccattttcaggattggtaccagtggacaatccaaatgggtattattggattaaagagaggatgactcaagcacttagatatttgaaggagtcaactgaccagcatgttctggctcaggtttgggcaccagtgaagaacgggtgtcggtatgtactttcaacttcagggcaaccctttgttcttgatccggacagtaatggactccatcagtataggatggtgtctttgatgtattcgttttctgtagatgggggtgagaccaatgaagttcttggtctccctggtcgtgtttttcgacaaaaattgcctgaatggactccaaatgtgcagtactattccatcactgagtaccctcgacttgatcatgctcagcattacaacgtgagaggaagtttggctttgcctgtttttgaaccttctggacaatcttgtgttggcgtacttgagcttataatgacttcggagaagatcaattatgcacctgaggttgataaagtctgcaaagcacttgaggttggttttcttttttcccttgccaagcttattaactctactgctatataccgaaataagtaatggaacgaaattactgaatgaagcctctgggttgagtcgctgacaacgtcgatctctttaaaagattggcggctctgcccagattgtacaagagtctagcaatcacgtcgttccaggataaaacagcccagttcactgtacggcattcctttgcactgaaggagaccggtcacttacatccctaagattgctcagagaaaaattgatttaggaaaaatgtttttgtttctgtaaaaatgaatattttcttctgttgttgttttgagtcgactcaataaaagaattcgaaggatcattaactgggtacctcttgggggcccaacccaagtgtcaaagttacacttttatacatttgtgtgagaaagtgctcttatcacatgtcagactctattcactatcacacacttcacacttttcttttttgtaaatttcacaaactttattaaaagttccaacaactacttacacaacgttatgttttggtgcatgcttttacagtataccgcttttgagtgttgtataagtaaaatttgatgcctatatgatattgtaatcaaatttattcaaacctggtgagatgtgatagtcacataagtttgattctattgcaggcagtaaatttgagaagtgcagagatattggatcatactgatacacaggtgagttgcaaatataatgtaccttttaattaggcttccttttggaaacaagaagataagcctggatttttttcccttcatttcttctctctctactctcccagattgaaatacttggcaattcttgtaaaccagatttgtaatgaaggtcgtcaaagcgcgttgactgaaattttggagatattgacagcagcttgtgaaacacacaaattaccaatggctcagacatgggttccgtgtatgcatcgtaatgttcttgcttatggaggtggcctgaagaaaaactgtactagtattgatggtagttgcatgggacaagtctgtatgtccacaaccgaagtagcattctacattgtagatgctcggatgtggggttttcgagaggcatgtcttgagcatcacttgcaaaaggggcaaggggttgctgggagggctttctattctcgcaacttatgcttcagcagtgacattactcagttttgcaaaaatgagtatccattggtacattatgcacgtatgttcgaattgactagctgctttgcggtctgcttacagagcagtcacactggaaatgataattacgtgcttgaattttttctgcctcctaacacaaatccttctgaacaacatactatattgggatccctattggcaacaatgaagaaacattttcagagtcttaaagttgcttctggaattggtcttgaggaagaagggattgttgaagttgttagagtttctgcaaacgggggacttgaatcaaaccttgaatgtattcggatacctcaaattgctgaatcaccccaaggacatagtgccttaccaaatggaggagacatggtgcagcgagatttaatgaaacagccatcgacggtagagcatgattctgcaaatgggggacaagatactgctcatgatggtggaaacatgaatcatgggtctgtttcggatcataaagagacaaagaaatcagaaagaaaacgtgggaaaactgaaaaatcaattagtctagaggttcttcaacaatactttgccgggagtcttaaagatgctgccaaaagccttggtggtatgcttttttttatttcctttctaaaatgctatttaatgtttgctaaaacctttacgaaccagaatcggattgttattaagatgattctttctttgcagtttgcccaactacaatgaagcgcatttgcaggcagcatggtatctcgcgatggccttctcgcaaaatcaataaggttaaccgttccctctctaagctaaaacgtgtaattgaatctgtgcaaggtgctgaaggagcatttggattaactcctattgccacaagtcctcttcctgttcccgttacctccatttcacggccttctacttcgaacgggactaatcagcaaaattcgccatgtcatgtacactatgatccccctttggaaaggaaagactcaccaaccaattcttcatgcagaagagggcagaccgaaatcgaagatcaactgcaaggaggagggatattaatccagaaagaccttgttcaagaaaacggtggattttacatacccgagaataatagaggctcaaaccactccaaatcaggaagtggctcaagagaagtgagtgtagggaccccaacttctcatggctcatgccaaggtagtcctgcaaatggaaacataatgctaaaggatccattttcatattccattcaggagcaatgcattaaagtagaaggttctcccgagccaacgccccaaccaacaaacggcttaatcttctcagtacccgaagctctcgtaacagccgaatctcaagaaccattcggagcaatgctagttgaggatgctgggagttcaaaagatttgagaaacctttgccacgcaacagatgcaatactagacgaatcagttcccgagtattgttggatgaacccgccacctcttcctccacgctctgatttcgcagctcccaaggacacaacaacaacaacaacaacagatataatcattactgaaactcaaccaaatgttaatagagttagccaagagatgagaagtgtgactataaaagcaacatacagagaagatatcataagatttcgattatctctaagttgtaacattgttgagctcagagaagaagtagcaaaaagattaaaaatggaggtgggtatttttgatatcaaatatatggatgatgatcaggaatgggttcttatagcctgtgatgcagatctacaagaatgtatggatgtttgtagatcatcagggtgtaatatgattagactcttaattcatgatgtaatgcctaatcttggtagctcatgtgagagtactgaggagtgaagattagcttgtatatatatatatatataattattatatataatcaaatttcatgtaacattttttttgtaggtgctgggaaagtaaaagctgtatatttggttcttagagcttgctttcatttttaggaatttttttgagtgaaattgtagaaagctcagttgtctgtaattcctccctttttaattttcttatattgtctaatatttacaatggcaaatgaataattttgttggaattactcactaatttattgcttctgaattattttgaaactattttaaggtcttcttcttttagaaaattttaatttaaatgtctcacactacaaagagattttaatatgaagaataataataatatcactcaatgtggataaattactataataataatcattggttgaacaatcatcatcaagagcttcattacaaagctagttttcttcttagtcaacaacattattgaagtatttaatagaagatggatttgggctgataaagcaacaaaaccattaataaagagtaatcatttatctaattgtaatatttaccactacacaaaatagtttagtataaaatttagtgctgaaattcatctcaaaaatcaaaattacacctaacattatgcttaattggaatcgattcttaagctaaaaatattctcatccatttcatgcatggttattttttattttcaaactaaattacacctaacattatactattatccaaaatattttttatagtgtttatacataaatacactccataattatataaaaaaaactgttttaaaatgtgaaaataaaaaaaaaaaaatcttattttcacctattcaatatacaaattaagcactgcacaaatgccatccacc

SEQ ID NO: 97739 - DNA, 525 bp, Cannabis sativa
  modified_base (483)..(490): a, c, t, g, unknown or other
aaattacaatccatcaaaccaattcagtaaacataattcactcgctcaaaatacattgggctttgaccaaatcaaaacgcccaaacgagcccagtagctacaagaccaatcaaatacaaaggatagaaatgagtctataactgatccacaagaatcgatcattcctccttggaaaaagggaagaccacttctcacgtttattctacagaacagatgaatttgatcatcagaggctctataaaaggagaacccaaaagtcttgaaggatcatatcatttttaatcactaagctcttacttaagcattcacgcaatacattatcattgttattactagtccttctccatcagtctatggtggaaatatttattttctattttcttatttcacattctgttattcttcattcgaattatttactgacttgatcgtcagagtgttgagattactaggatctaaatttactaacaagtatgtttcatnnnnnnnntaaatatgaatatctctaatacgatgaaattaaac

SEQ ID NO: 97740 - DNA, 744 bp, Cannabis sativa
aatgttacacaacacaaggtacaattctaacggatattgataatatgccttggaaaatatatatatatatatattaaatgtgtcgttatcatgctttaaaacatgtaacaatatttgttaaaaaaataaaattaattaattaatgaacattatcacttgacattaaactctttcacatctctttccaaactatttcatacgccacaatatatatatatatatatatatatatttatatactatatatcaatatattacttaatatgcatcataacattaacatgattccatgcatgtatatatatatcataaatattgttggattaagcatatataatactgtttaatgaactacataatgcataatatatatatgtacgccaatatatatttgggcattttatatacatttttttaaataattacaaaaaatgtacaaaaaaacacaattttaaaaatgtacatatttaaaaacatatttacaaaatttcatacaaattattaattaaattataataaatatattaatgattcactttctatatttagatttgtataactatttttttttatgaataattgatatagtattagagccaatttaataacatatcatttttttaattaaaaaattattatcaaatttgaaattatattatagtataatttgatcttgataatatattatcagattttattggaaaaatattaaaaattgatattaattatacatatgatcatatc

SEQ ID NO: 97741 - DNA, 727 bp, Cannabis sativa
tggaggcttgaagcggggatgttacagtggaggcttggcttttctatggaaaaataaagatgagggatttttattgggtttttctcagaaccatattgacatgaaaattgctactcttgatggaagttggtggagattaacaggggtttatggagagcccatccgaaaccaaagagagcaaacatggacccttttgaagacattaacaaggaactcaacccttccatggtgtgtaattggagacttgaacaatgttcttagtcaagaggacaaaaaagggggtcggccatatccccaatggttactacaaggttttcaaagttgcttagatgaatgcggtttggaagatttagagctcttgggctaccctttcacttgggaaagaggtagaggtactcgagaatggatcgaggtgcgtctggatcgagctttggtcacgaattcttggcgtactctgttcccggaagcatgtttatcgaatttggaagcttcaacatcagaccacttcccagtttttctagagccgactgtaagggcctcttttcgtactcctcgccgttttcgttttgagaatgcttggctttctgagcccatgtgttatcaacttgttcaggattgttgggatactcaatctcatgatagtacttcgggtaagattagcatgtgtgcggaggttctagctagatgggggaaagaaataacaggagatttcaaggctcgaatcaaa

SEQ ID NO: 97742 - DNA, 2048 bp, Cannabis sativa
gcctttactttacccttccttaccttttcagtttctatttatttataatatcttattaatcttaattaggtttaataatccaatattaattatcgcctaaataaaaattaaaatactccgaggccggagagccgtatacggaggagatatacatatatatatatacttacatggctcgaacccatcgaagaggaacatcgagagaggcaataacaatgagatctgcatccacgtggagtttagcaagtgatctgagcatgacacgtgtcgccacgtagaactcgtagtctcttggagtccccatatacatcatcgttgcataagcatacttattccgattcatcaccaccgtcgatttattagacaacttattatgatcaacaacctgattatgagacgacgtcgtttgatcatcatgctctgccgctgtaacattaataacgcccaacaaaaacaaaaacaacaagaacataacagtaacagtactttctttagaggcggccatttctctatctctctcttcttcttcttcttctctttctctctcttagtcttagtgttttccaagttttataagtggaaagactcgttggtggtattattaatttatataaaataataatgaggggaaagtagtgaaacagacaaagtcatcctcagaaattaagaaactttttatttatttaattatttgaaagaaaggaagatgtaacgagggaaggtccctatatatgccaatgccaaatttttagaaaggaaattttggacttttagtatctctatacacctttagaataaggcaatttattcttcttctttataatttgaccttttctctttatatatcatcatttaattatatttggtatttaattttttttcagtctttgttggtatacaatctctcatggatatttttattaacaaaataaggaatttacagaagtgcccttctccttgttttctatgtatagtaagcaaattataattttcattttaaacttttaacatgtattagtctataaattttttaaattgtttatttttctttaaaattattgagattattaagttaattaattgagaacatttatataattttactaacaaaagtctattatagataaaagataatgagacaagaattaaagttcgaagagtaaaattgtattagtaaaatcaaataaatttaaaaaaaaaaaaatcttaaaagttaataagattagtttaatacatgttaaaattgagttgaatcatctcagattcataataatatatttcacttagaacaaagagaatttatgtttggaacttggatagagaatctccaagataatttttttttttttttagattgtataaaataaatgatgggagattcaaaataacttaccaaatataaatatagtctaacaatttcaacagttaaaaagacttgttattattagtcgttacttttggtttgcatttcttactcgtacgtttcaagtctctagctccacgagacttttcttattatcactaccacactccaacacatagcttattattttattttattttttactcaataacacttgtcttaatttcattgattaaataatcaaacatatgaaaagaaaaaattatagggaagaatcttaagtatcctatatcacaaatcagtaaaaatatacattttttttaaataagcgttcattgatactgaaaattaaattttgtagtatcattataaaagaagtctgtcaaaatagaataaatatataagctaccataccgtttatgagttaaagctcacttaaccagagcaataaaattacagaatttagaaatataagtaaaaatacaactatcaaaatatttaaagagtcttaaggtaagcgtgttcgcagtgcgggtgatgcggtttttgattatttttgtaatgtgcggtacagtgcggtttgacccacatattaacaattcaaaaccgcaaaccgcaccacaccgcgcggtttaagaaaaattcaaactgcggccgcactgcaaagaatttcaaaccgtatttt

SEQ ID NO: 97743 - DNA, 779 bp, Cannabis sativa
gctactgtcaccactgcggttgcaatcccgacgcttcatcatcattttgtgactcctatctttcttctttcccttacaaccattggcgcccatcatcataccatgtgaaccgtatgactgatgctcagagtagccttggtggctttgaccatgagcatggcctgtactgccatgagctgcataggtcatcatgcccatgccatgagacagtgctggacccatgccataagattggcctggggtcggcttagtcatagagtgattatactggtcagtcatcatgtggttgccctgttggtggccatatccttggccataagtggagttcgtgttgggctagtaaccctgaccgtgggaagtactgtggttctggccatgaccagtcatggaatggccagaatagtaagatccagtactgttattgtgcttgttgtggccataacaattgtcaaggcacttttgctcacaagtctcattggttggcttgtagcattgcattgaggccatggtgatgaatgattaatttcttttggaaaagaagaaaggtctatttgtaatttttttttttttgaactattgaatttgcttggtggtggaattggttaccattgttagccctttatatatagagttggatatgtgcatcatcaagtaacaaatattttatattttccaattgaaattaattgttggattaaacctccacttacactgatattaagactaaatacaacttaatacacaaggacagaacagtaaatacaagtaaagccctaagt

SEQ ID NO: 97744 - DNA, 705 bp, Cannabis sativa
atttagaaccatctcggaactttgcaaaacattgacaatgattggcggttgattaggttgttgcacagtcaattcccccaaatccacaaacaatgtaaaattttatgagttatcgtcatgtacaacatcaacatcattggtctcataagaaccttctatcaaaatattttcctaaatttggcgatgatgtacattatgaacaactttccaatttcgacctctaacaagatcatccacaaagaatacttgcttagcttggttagcaagaatataggggtcatctttgtaccatacaccattgacatttatgctagtgatgtttgttatacccaaagtttggtaagcccatcagaggaggacacgtgtcgagttgggaataactcaaacacgcaaacgacaagtatgcttagcatggagcaactcgttagaaatataattcgcagggtatgtttataactcagcttgctgaatagccttctgcgagacagaaacatatgaactgctaacttacgtattgatgagaaaccatgtaggtgcacacgttcatgacgaggcctcaacctcgctgggtgaaagagaaattgacaacactaaaagtacttaacttatattatacgatataaaactgagtatagatagtatgacgagccaagataacagacagtgaggtgtttatctcgctagaagatggtatgcatgcaagga

SEQ ID NO: 97745 - DNA, 1074 bp, Cannabis sativa
taagtagacaaaattgtggtgttaaagctctcaaaacaagaatgtctttttggattagtgtaatcttcttccactcttaaaatctattgaagattagagctttttttgtttctttgataattatcacatgtgttttattttatagtgtctttacattttcatgattatgtaaaaaaaaattcaatgtattatcaatcaacttttcttattaatttaatatttttttagtttttttatcactcaaatcaattcaaaagatatatatatagattattttacacaagagacataaaaaattttgtaataaaaatgtgtacaaattgaaaagccaaataaaaagaaaacgtgtatagttgaaaaaaaaaaaatattaataaccaaaattattagaggaatattaatattaattttttttgaataaatattaatagtaattaataatattattatgcgactattagttatgatatttattttaaaaataattggttggttgtactactttattttaaatttttgcagttacatttataagggagttctatttgcaccccataaaataataaatacactctattattaaaaaaagtataaacttaaataatttttaaaaattactcttaatatttttttaaatttttttcctcatattattttacattaatttcaataattattttaattttattttcataattttttttagtcgtgtatatatattttttttatttttatattaaaaaaatcatataatttattaatataatattattatttcatttttttaaaatagtattatttattttaggttaaatatatatatattataaaattattactaagtacaaacaatttaaacaatatgtacataattcagttttttatttttaattatataggtaactcttttaatgaatatattaaaaattatgcactcaaaaaattattatatttttctaatatatatagggaaatttacaaaaatactgtaatttgggttaatttttacaaaaatactgtcacacagaatttttttcaaaaatactgtgtttttataaaacactaataaaacac

SEQ ID NO: 97746 - DNA, 739 bp, Cannabis sativa
agatcctggtaaaataacttccaacatagccttccttgtgtttgttcataattagttctgttcaagttactgctttacccttctgattagctctttatcttttagtaccgttaattaactagtgaaagtataatttagatcgaatctatatttttgcacaacttttcagttctataattaacacataaagggaaccaacactcaatttattaggaaagttaggattccataattgtagatcatgtcctcaaccatccatattattaaattccctacataaaagttgtaagaaccatcttctctaagatgctttagcgagtgaatcaaagaatttaataacatgaaaaggagttcaagattactcaagattgaagtcgatctacaattgatcatctttatgatataaattttgtctttatagtaaacgacatgtttcataacgagagcttaattacatatcggtccatgtcatatataaactatattatacacaacacattcacttacatgtcatactatatcatcaatccaaatcaagatttcttgcaccgaataatggtcattagtaaactgcactagcaaccattgattgaagattccaaaactttaataagtttctcactattttattcatggctaagtgatcttaattctccgtacaatacagtcataacctcatgtatgaataaggaattttctaatatttatatttaagtatacaatattaaatattaataat

SEQ ID NO: 97747 - DNA, 732 bp, Cannabis sativa
  modified_base (331)..(340): a, c, t, g, unknown or other
aaattttgaggaagaaaaggagagaatttcaaaaatcttaataactctttttattttctatttgtcaaataaaaagagtcaaaaattaggttatgaaaataagagttgtaatgttttatttataaggtagcttttagggttagattttgaattgaaattgaataaaagtatataaaaatagctttattaaatccatcatggctgaaccctatgtgggttatagtagatttcaattttgccattttattaaaactcatctttcttttcacaaatgtcatcttttaattctaactttataaatgtcagttctatctatttaataattataatnnnnnnnnnnataaaattttcatttaacttatttattaattagaccttacaacgtctcttaattaataaaaaaaatcctaaatcctcattttcttctcaaataagtccttacttagtgaaactcataaatagaattctaattgattaattaaaattaattaattgagtctacaagatattattatcttaactagtataaggaccatgggcctatataatcaagcactcaataagtaattctagaatttatcaagtaaattctctttattattaattcctcctcacccaactatagattcgaaattgcactcctggttacataaaatactctattcaccaacaatagatacgctataaattatctattgtttcaatccgaataatcaaagatcttctatagat

SEQ ID NO: 97748 - DNA, 938 bp, Cannabis sativa
catattaatatattgtaagtataacgaataaaaatattatcattaaatatatacaacaatatttaatatactgtagtactgaaaaattaatatatcataataataaaattatatactacaaaaaaaaatcataataaaattaaagttagtatgttaatattcaaaattatgcatattaatttaatccatatatgatgctaataaaattacgcatgtttgatacgatttttagaaaagttaaaaattactttttgaaaaagttgtaataaaaaaaaaatttggtaaacaatttaaaaacaacttattaaagaatttataaaaaaactacactcaaaagttaaagttggtacaacctaacttttaaaaaaaattattttaattaaaagactaataaatttatttgtactaaaactatatttacatatttttatatatttaaaataaataaattataatgaaataaataatatttaattttatattttaaatattagcataccacatgaagttagagttttttttttttatatatttgagtatttttttttatacgtgataaaaatataatttaaaaatattataatttattttaattaaaataattaaaaatacatcgggagaaataattaaaatatataaaaaataaaaaatttatatatatatttgtgattataatgaactatattataacattataatcatgatcattataataaaatcttaacatcttagaacactttaaaatttataatttaccaaataatctgcttattttttttctacagctactttttctcacagcacaactatagttgtttttcctcacaatacagttgtgtcaaactggctcatagatacaactattaaaatatgtataccataccaaaaattttatatataatcattatatatagtaaaataaaaactaaatatcatct

SEQ ID NO: 97749 - DNA, 656 bp, Cannabis sativa
tttgatccccaaagcctccacaacctcaccgagtagataccaccatggtgagacgttttagcttcaataagtttacccaagttatctctcgctactataccaaagccatacgaggtctcttgatgaaatagttcagcatcaacattaatcttgatgtgatttgaagccggttttgtccaaagctcagccctatcaccactatttttgaaagatagtgacaatgaagcaactttatcctgagcttttctccaatggtcatgaataatagaggctgagactaaaacctcatttacagttgaattttgtttgttccaaacaacattgttgcgagcttttcacaccgcccaacacaacataacagctcgacatacttgatcattaacagctgttccctgcaaaatctcaaaccagctgccaaatgttgcagaagcaaccatgttaataggtaaaccgaagactgcccagcaagctttggcaaaatcacaagtgagcagtgcatggtttatggtttcagcatgggaattacacacagttaaagaagctgagatttgcacatatttagaaacaagattgacacaagtggtaagggatccagagattaaatgccacaagaagtttatcacccgatgagggccaaccctaaaatttggtgggct

SEQ ID NO: 97750 - DNA, 639 bp, Cannabis sativa
atagcagagttcagatcaaaatagagaggaggaaaaagggagcagaggaagatggatggagaagatgaagtgagtggatgaaagagaagctcaatcagagattggctttagtcattgcattatataggagcttgagtacaatgtacaacttaggaaaattcataacagatatttaacagacctaaccaactaaataaccaactctgtaactaacttctaacaacctttataaccggtttctctaataataggttcataagttttgtgtagatagaaacatatgtgacaaaagccatgttgatgagctcattaatggactcattctgtgttgatccacctattgatatcatatgggcactgaagatgtgaagttttcttttttcctttttcttttgcagaaactacaaaaacaattattgtctcttttcatgtacaaaaacttgtgttgtgttcatttttttgttttatatatttactcacagcatatgcaaaaaggaaaagtacttaataatccatttcttttagctgttgagatgaaattacatctagctcttagctcgaaaaaaaagattcctaatctccaaaatttctcaaataaaatggaataaattaaataaaaatgctaaaattacattgtaa

SEQ ID NO: 97751 - DNA, 909 bp, Cannabis sativa
tctcaaattatatgatataaaaatgaatttttttttgttatataaaagtaactaattggtttcttatcaacactattagtaggtaaaaatttatttttaaaaatgcaggaaaaaaagcagaaaatatcaaattacgtcccctcactttaaatcatgggtccgccactcatgggcccaccactaggcccacaccacacatattggacataataataaaacgagaatattgtcgtatatatgaggcacatgggccgctcatatgatcatggtggtgcatgtcttagcacccatcttgcctaaattgcataataaaataattatcattctttaactttttctttttcttgattaattagcatcttaagcaagcactaggggaatctattgatcattaatggttgttgtttaaaaaatatatataagattagggtcatcactttgaaaggaacaattttatatataagcaaggaaaactttattatatatatatggtagaataatttatagttttatatgtttggggttttacaaagttggcacattaatatgtagacattttcaaaagatagtttggatgtgtttgtcaatgtgatggtgatgattttggagttcatatataattagtacagctagcaaaactatatatgtcatgataaattaattacttaaatattgcttaatttaattaccctttttaattgcttatgtggcctttgctgaccatttcatttaaagaatatttaatttgaataaattataactaaataatagcattatcaacatgtatgtatgaatgattgatatataacatagttgatagagccaaatgtgtaaacttagtaattagtaattaaattttacatatattattatcagtcaaaattcacaaatattcgagaatgtgtaaaa

SEQ ID NO: 97752 - DNA, 728 bp, Cannabis sativa
tataattatcttgaaaagcattttaaaatgtatattataatttattgtataatactaattaaattttcaaatagaactcaaatataattaccacttcacaattacatatcttgatgccttaaaactaagtttttcttgaggacatttctaaagaaaatatactgaccaatatatttgataaaagtgcaattttattgttaaaatttacacatcctaagagaatggtggaatactaatacagaagttaacaaaagagttgttcttcatcgcagcttgaccacttaataagtggaaaaccctattgcctcattactgattgatcatagtagattgtaagcatagcactctgcctctgcacaagttaagatgaaagggtacaacaacaaaaccaatgcttgtaaacgatgagatccgtatatcaaaacggtcttatatattgtcatcgctgtctgtttcttccaaccgtcaagtgaatcaagagtttctcagccttggaatggcggtcgttcattttcaaaaggcaactcgataggagtagcattggcgtagaactcttctaagttgtaaaaatctctttgtggaggaagaaatatatggatgactacatcacctgtaatcaacatatcaattaactaaggttcccatctagctcaaacaacatcagaattcctattgatcaaatttcccatatcacaacttggaccaattatgctatgtaggctgataac

SEQ ID NO: 97753 - DNA, 783 bp, Cannabis sativa
gggactcggaccccagcgatcatttgtctcgatttaaccgagtaatgacggtcatgggagtcagaaatgacgccaagtgcttatgccttccactgatgttaagcggttctgaggaagaatggttcaaaaagttggaaccaggatctgtggactgctggaacaaattacacgtcaacttccggagacagttcgtcgcctcgaggaagattaatctcgaagttagtgccctgactaacatcaagcaaatacccacaaagacattgaaaaatttcataaagaggttaaaggaagagccctcaaaaactaagaaagttgatgacggacaacagcttgcacttctcctaggtgggatccgtaccggaaccctgttatggaacgaattacaataagaaggagccgcgaatctccaagatttccagaagagggtccaaaaatacatcaacttggaagaggcccaaatagtggcctacggaggatactatccaaccggagtggcgggatatgtacccggagttcaactctcgggaaccctaccttcggttactccacaaatgagcggtatacaattctctgctactctaggatacaataagagccaagccttggctccgcatcttcgcactacgggaacccctcgggcgtaagcgaacaagtcccgtctcactccgctgagactgcaagcctaacttgtaaagaccgcatatgattaataccttaaattattaaataattaaggtttatgtatgagattaattaataattatgaaatgtatattttggaaa

SEQ ID NO: 97754 - DNA, 791 bp, Cannabis sativa
tgtgtctgaatttgcaatatttttcagaattaagagaaatgaagcctcattggaattagtaaccagagaaaaggaaagaaatgaaacagtaatcgatgaaagtggaagaagaaacttgatcagattagagaagggtgagaggaaaaccgaggaaggcggggaaagacatggagaaggagggagggtggaggacacgtggcgagtgatggtgagaatttgaaatggttaggcgccatcttaccacgtggcaactcctaacaacatgactcatttcatttcagttcatgataaggaagttagaataggaaggaactgctttctcttttcttttcttttctttttttttaaaaaaaaatgtaatataatattattttacaattaaataataatttaataatttaaaggtcttgagtcgaactcataacttctttttttttcgattctattcctaattcatgttcctcaaacaactaataaaactgagcatggattagctcgacatattttttaaatggataaaaaattagtataatttgatgagattatttcttttattgagatttcataagacttatttatatgatattataatttcttttttaaatgaagttatttattgtttaaaaaaaatttaaataaatagaattttaccaataaccattctccttaaatattttggccagaaatataaattaaaaagaaaataacttggtcaagaagtaggaaaaatcctgctgcactcaaagaacgaattgactggtgttttatcaattcggtgtggcttgataatt

SEQ ID NO: 97755 - DNA, 529 bp, Cannabis sativa
tttcccttttgggaaatctgagcgaacttttcgcggatcctgcacctttttctttctccctaggatggaagtagggtttttctgttgattttcttcagagggctaccgtatagggcttggttccctgggcttgtgtttttgagtgcttggagaggactctttcgtcgtttcctcgagtcctgctgggatggccttagggtgtatgtgaatccctgctgtctccatggctttctgcatggcgaccatcacctcttgcatctttttattttgttctttttaggcagcgatctcagcttcatgatcagcagctttttgccttaagagcagtagctctgtgtaactgccttcgtcgtaggcatcatactcgtcaaagttttcctcgtactcgtcatcattggcctcctctcgctcctcagtatccacgttgactcttgaggccacttcctcgtcttcgggatttcgagcatcttgaggaggacgaggctgacgtgtgttgcgagtttctaccattgctgcttcaatttataag

SEQ ID NO: 97756 - DNA, 524 bp, Cannabis sativa
aacttcagcaattattatatttgctaactatatataattatatactatactgtatataccaatgccataaaaaaaatcatttgcgttagccaccacattttctgtttgatcatcacttaattaaatatatatagaaaaaatatcaaaaccggcaggcgtacttattaattatataccaaaaaatatgatttaaacatttactacacgctaataatttactgttttagtataatagttactgttaatgctatagtattatataaaaaagttatacaattttacaaatactgaaaacataaatacacctaaacttatacaaaattgacacttcacaataataattattaattattactccctaaatataatatatatattattagaaatttaggtagtacgtagacttttctaaaaagtagttcggggtagattttacagtattaagaaaactttattagtaaaaaaatcaagggcctagcatcatgttaaatttcgaaacctatgctctctcacgagaagagcct

SEQ ID NO: 97757 - DNA, 595 bp, Cannabis sativa
ttggccattttcttaatttttttaaaaagtggacatttactaacttagttaccaaatttagggccattttgcatcttaacccaaaaaaaaaattaaagactttgtgatatatttgcatcaatttttagaaaatttatataatagaccaaaaatttgaaaaaaaaaatacaaaattacatcaacacggaaaaaaatttatttttatactttaaacttttttatttacaaaaatacctctcagtaaaaatagtaaaccattttttagttgttttatagtttatatatagttgtattatagttgtcatgatgttgttttctggtgatttttggttattttatattttacttttagctgatttttatagttgtcataaggttgatttctcattgttttttagttgtttttttttttattttttgttgagaaaaatgtatttttgtaatttgaaaaactttacaagcgtatttttttaaataaaaattataaactataaaattgtaaataaaatataaaaaagagtatttttaaaaatttctaatttttagtattattcttcaatgtacaattgcagaacttgatgcaatttaatatttt

SEQ ID NO: 97758 - DNA, 705 bp, Cannabis sativa
taaaaaaattattaatttttaatttgaattattatttttttaaattctctcatatgtaaatcttcacagttttcgcactaatattacctttgctataattttttttctcactcaatattaaactagtgtgttcttgccattattatattttagattaatttactctcataataaaagattttatttaaaaatattttattattaaattaattttattagaaaaaaatataattttaatgacatatttggatatatatatatttctatttttttttttaaaaaaagagtttttacactacatactgaaatttctaactttattttatttttactgtgggacagatttttttttcaaaaatactgtgtaagtttcatattgtgtactgtgtaaagttttcactgttgttctacagttattttttagttgttctaatgttattttttattattctactttgttgttttacagttgttttaggttgttttacaaaaagacagtatttttgtaaaaaaattccatgtgacagtaaaattgtaaacttttatccaaaatttagtatttttgtaaaaaattttaaaaaaatagtctaaagcaaaacaaatgataaaataaaaaggaaaacaaagaccaaatcagcccatttctctctcttttttttttaaaaaaaaaataaagaaaagaaaacagcccacttatgccaacag

SEQ ID NO: 97759 - DNA, 588 bp, Cannabis sativa
caagcccatctcatttaaacataaccctatgtgaatacctatataaagaaagagaagagaattgaaaaagctaatgtcacttcttcctcttctcttgattttcgaattcgaagaccgcgatgaacacaattaaaggaggagaagattcaggttcagctaaatgctatgctacagaaaagaatcaagggttagagatacagaaaagaatcatgaccaaaaacctagtacaaaacagattcgtccgacctattgagcttagctacctataaatatggcactatctccatgcaagagtttgagaactttggttcagatttttgataaccaaaaaatacaaattatttgtgcggtaagaactccattacaaagaggttgtaataccgtctcatgaactaaggctcattaatgccctaactacatacaaaatatgtctcttttctccttttttttttttttggaagaactgaagttcatgtctcttttctccttaattgtattttctttagcttaatcttttgatatatcccgtttttgaaaaactcactaagcaatagttatttaaaaagtacgcgtataaaatgaaacata

SEQ ID NO: 97760 - DNA, 575 bp, Cannabis sativa
cacttcacctagatctttcatgtcaaaattttcacataacactgatttcacattgttcatgacatgaatctttgatcctaaaatcagcaagtcatctacatattaacatataatagcgcaaacacaattttcatatttatagtaaatgcatttgtcactttcatttactttaaaaccatgtgagatgacaagattataaaatttctcatgccattgcttaggtgcctatttcaaaccatacaaggatttatctaatttacacactttatgttcttgaccaggaacaagaaaacctttaggttggtccatgtaacatccccgactcaagcctccattggcccttcccccacgaatttaaggctcttatacacgagtacatcactctagctgcttcctggatcgacgactggccctacagaccaacacgagtctttccagcgtgttttgtcctcactcgctcacttcttgggagaatttcccaagaggtcacccatcttgaaattaccctaggtcaagctcacttaattgtggagttctttcgtgatgggcttctagaaaagaaaatgcatcttgtt

SEQ ID NO: 97761 - DNA, 701 bp, Cannabis sativa
tctgaaaaagttatgtctaaattttttaatctctacaatcattttattatgtagtcttttggcttactgtatacgcacatggtgaaatttcatcggtccatttttttgtatattttaaattattttttttttctaaataaaagatatttattgaatgaaaaaactagatctgtaaagtgaatacagaaatgaatttctctatgaaattgcagaagggacaaaccaaagcaagaattagaaatacaaatatattggaaataagacaatcttttgcgtagtatcacttcttatatgtatatgacattagaagtatcacctcttaaactttaatgaagctcaaatctaacacaaagacacaacaccaaccatggatctttgttgattaacaaatgattcaaaaattattttcctgaaataataaacaaaattaaatctttgattttttttctctcgttgtcataagcgtctgatctctgacaacaaaaatcatgagtcttcatcattaaaaccggtagcggccgcatcgcccggaacaactacaaagccaaagccacctgaaaacaacggtggaacaagtcacgaagatcattagcatagtcgcttctctaatcatcatcatcatcaaattcagtgacggacccaaaatttttactttgtgggggcttatttatcattaaaaaatatttatacatatattataa

SEQ ID NO: 97762 - DNA, 3007 bp, Cannabis sativa
tggccaattcttgagtgatctgtcattaccacgtaggtaaaataaggagttaacggggttgcgaatacgtcaccttaaaaatgcaaattgaacaatactttggaaggttttcctactaaaaatttgaggttaaagggttaactgcaagtgaattgaaaagtaatccaatagttattaatttgtgcggcactaatgatagcaaaaatttcatacgcgaggacaatacaatcttatatatatttatgagaaaggttaaaaagaataagtggtgtctaaaactctctttgttgtcatgtcgctattggtacaattaaatattgacttttatataatttaatataataatttttaaaaaatatcactaactgcgctatctttagaaagtgctacaatgataatgctcctatatatattaagggcttagaaggagaattggtgtttcatgaaatgggctatatagtttcaccacatccatctcaaactcaacaacatcacgaagactcctaatgctgtaattgtcttcccaatttctgttcgaatttcccttattttcttgcatatcctctctctctctctctctctctctttctctctctcactatctctctctcattctttctctccactaattacaacagagacaaataggggagagggggtagacacatgctttgagtttgagggtttggctttgctctttccaatcacgcacaacctgaattctctccgacccttctatcttagctttgtctcctctctccctcttcttttgtctctctaatcaataagaacctccactgaatgcaatcaatccttttaagggcatataatttgtttcccaaatccttaacttcttgctagtaacctcatataccatctgcctatcaggtttgggttggtgagtctaatgcatatctgatactagattttgttgggttttcgatatagctggactttaaattatcgtagattgtgaatcttgaattacatgtgaatatgaacaggagatatacatgtgcacagaaaattcattgctaatctgaggattagggtttttgggttaagaaaaacattggttcttgggtttgtttgtgttccatttgtgcttttaggattgggatatcgaggtcgaaagttatatgcttctgggtctttgctggtctgtatatttgtaatgggatttgggttctagagagggtgaatggtatttgtttctgggtctaagtagattgattgagatatgagtcgtagggtgaggcgaaaggtggctcggaaaggaaaagagaaggtgattttgccaagctatcccgaaattgaagaagagatttcgggtgtagaccgaagtggacttgttgattggactagtttgcctcatgacacagtaattcaacttttatcctgtctgaactatcgtgaccgtgcaagcttatcatcaacatgcaagacatggaggcttcttggcatttctccgtgcttgtggagcactttggatcttcgtgcccacaaatgtgattctacaatggcagcttcacttgcttcaaggtgtgtaaatcttcagaaggttaggttccgtggagcagaatccgcggatgcaataattcatcttcaagctaggaatttgcgggaaataagtggtgattattgccggaaaataagtgatgcttctctttctgtgatcgttgcccgtcatgaggcacttgaaagccttcaacttggtcctgatttctgtgaaaggatcagcagtgatgctataaaagccatagctctttgctgtcataaattaaaaaagcttaggctttccggaattagggatgttaatgctgatgctatgaatgctttagctaagcattgtccgaatttgactgatatcgggttcatagactgtttaaccatagacgagatggcattggggaatgtagtatcagtccggttcctatcagttgcaggaacttcaaatatgaagtggggtacggtttcacatcactggcgtaagctccctaatttaattggtttagatgtttcaagaactgatattggttcaactgctgttgcgagattgttatcgtcgtcgtgtttgaaggtgctgtgtgccttgaattgtccagttcttgaaggagacgttagctttgctggcagtaaacataaaggaaaagtgttattggctctgtttacagacattttgaaggatatagcttctttatttgtcgatatgtctaaggggaggaatgtgtttctcgattggaggaattcaaaaagtacagataaaaacttggatgaaattatgatttggctagagtggatcctatcccatacactgttgcgcatcgccgagagcaaccaacaaggattggatgaattttggctcaagcaaggtgcatcattactgctcaatttaatgcaaagttcgcaagaagatgtccaggaaagggcagccacaggacttgcaacttttgtagtcattgatgatgaaaatgctagcatagattgtggaagggctgaagctgttatgagagatggtggtattcgcctccttctgaatcttgcaaagtcatggagagaaggtcttcagtcagaagctgcaaaggtgagtcttttccacctaaagtaatcgcatacagttgatttccataattattgcctgcgcaggtcatgataaattaaaccttgtttaatgtaaagttttgctgtacaataatgtttttatctctattcatgtttgagcatacttttatgtacaaatgccaaaaatgttaattttgtttcttattttcttgctgtttgtttttcttgagaaggctatagcaaacttgtctgttaatgccaatgttgcaaaagctgttgctgaagaaggaggaatcaccattcttgctggtttagcaaggtctatgaacaggctagtagccgaagaggctgctggtgggctatggaatctctctgttggtgaagagcataaggtttgatatcttgaaagtaatattttgtcttgcacaaatatgctgaaaagtat

SEQ ID NO: 97763 - DNA, 680 bp, Cannabis sativa
agacttttctctgttgagcgtcctgctggtttagggtcctcacttccatcagtgaggccgacctcccgtcctactcctactcattcgagccttttctcgccatcgaatttggctgctggtggagactcagagaaaagcttgagtgaggaagagaaacagagattggagaagtttcaacagttaagggtgaagtacttaagacttgttaagagagtaggtggctcaattgaggattcaatagcaagacaggttctataccggttggcacttgtttcgggaaggcaagctagccaagcattcagcctggaaagtgcaaaggccaaggctctccagcttgaatcagaggggaatgatgatttggacttttccttgaacatacttgttattgggaaaacaggtgttggcaagagtgccaccataaactctattttcggagaagagaagatcccaattcatgcatttggaccctccacaaccagtgtgaaggaaattgttggaacagtggatggagtcaagatcagggtttttgatactccgggtctcaaatcagctgcaatggaacagagtgctaatcgaaatattttgtcttcagtgaagaatgtcacaaagaaatgcccacctgatattgttctctatgtcgataggctggacactcatagcagagatcttaatgacatgcc

SEQ ID NO: 97764 - DNA, 594 bp, Cannabis sativa
aatcaacacctaatctaaaccctggggaaaatttcttcgcaccatcaacataacaattgaaatgcctaaaagaacaaacaaacaacaaaaaaaattatattaaaatgaaatttgtgaagaaaaactaaaataaagttgaaaaataaaacagaatacaaatacagaaagaataaaatagtcacctaggatttttagtaagccttgaccaacccaagcgtcaaactttgtctcaatttcaagagagacgggatcagcaaatgaatcgttaagagcataaaggcccttcacataagtaatcatcttaaaatccctctaatcccctcctaattgagaatctgaggacattacctccattggagtgctcctcacatcagtcgacccgaaatcaacaaaaggcgatttcaatgccggtgcacgctttctcttatccaaaagaggagtatcagaaacagtgtcctcagcttcttcatcagtaggaatggcaacagtcttttcaccaacaacatctggattgggttctgggacctaaagaaaaaacaaagtcagaaaataaacagttgcaaaacaaacattaaactgtcaagcaactaaaat

SEQ ID NO: 97765 - DNA, 971 bp, Cannabis sativa
  modified_base (894)..(915): a, c, t, g, unknown or other
agaggagttgttatcatgttgtttattatttgttgttacatagttgttcaagcatgtattaagattgtttgtgtgttgttcaattttaatccaatattatttaaacatatattaaggttgtgtatgtattgtgagaacccaaaaagttactgcaatgtggtgttgaaatctatttatttttatattgggttgtagcttttatttttgttattacaatgtggtgttgaaatctatttaatttgcatattaaagtgaggttgttattgtgttgttaaaatattgttatttagttgtccaagtaatattaaaataataatatgtttaattgtcataagtatatgtatttagattgcttttgtgttgttatacagttgtttgttggttgttaattagatgtttaaacatgtattaaggttgtgtgtgttgtgtttatgtttttttaaagttgtcgacaatattttgttcatgtccaatttcataagtattataataccattaaaaaactaaaataaaaatatagtaaacaaatatcaaattaatttttattttatattttaattgattattatcttaagtataatttttcaaagatatattttgagttaattatgtttaaattatatatataaatgtttaatattgatgtctacttgatttctaattgagcatatttttttattaatcactttattttttaaaaaaattattattttggtgtaattttaatatttttttagtttatgtgtttcaatttttttttatatttattgcattaaatttgtaaatattttttatatgttcaattagtagtttttgtatggtgatgttgcttatttataaattttaattgtgttaatggattatgttaatatttaataaatttcttttgaagtnnnnnnnnnnnnnnnnnnnnnntgtgttgttaattagttgttttcgcataactgttgcattgagaaaagaaaacccta

SEQ ID NO: 97766 - DNA, 665 bp, Cannabis sativa
aatcacaagagcacataaacgagtgtatggtgcctacaatggagttctcatggttgttcgaccatgcatggccttagtttgacaaccatgattattaattatagtaaccctcctacaacaaaatcagtaatagtttttcaaaacttacaaagctaagtggacaataagtcattgacttcgaaagcatattaataatggtttcgaagaagtaaccaattgcttctatcattctacagaaatatcattctctttctatgtattctcttaattttactcatcaaaataaataaaaagtgttcatagcggttttgaggagttaatataacaagggtacttgggcgagtaccgcaaagaaaatcgaaagtctgaggacgagcaataggaagaagactaaagcaaaactagaaggaatgaggcattgtcgcgaagaagaataagatatactttaggtctcacattttagtttgttctgaatcaaggtggaaacccattgggtgaccttaatagtcatgtttatctttcagtttattgtaaacaagtgaaaggtccccacaaagacatttggacccctttttcttgtaaaagcgggattaaacgttcaaatgaatgctttaaggtggatgttcagtctctcctttttttaagaggaagaaaagtattgagac

SEQ ID NO: 97767 - DNA, 816 bp, Cannabis sativa
ttaaatatttttacgattttttggtatatttttatgttgtactcttgttaatttggtgttgatttgtatgatatttttttttgttgatttgatgttgtttggatgttaattttttgttacttttatctagttttcttattgtttttgtgttgcttttataaaactctgtaaaaatataaaaaaatatctttgaacgtaaaaatataatttttttttacaaaaaaaaaaaaaacagtgttttatgtaattatctaaaaattaggctaattatgatctttatctccaaattttggtatgtactaaattatgtttcttacacttttaaggtagttaaaaaaaaatttaaacattgagattgtttgatttaaggattttatccaatattactaacaaaagtctgacgtgaataaaagtttaaaggatatgaattggtatatgtcaaagtttggaagtatattgttagatatcaaagttatggcagcattatttaatacatgaacaatcagcacattaataaaattaaatgaaattagataaaaaaaaaactttaaattatgtaaataaagattttcttaaaaatattttaaaatagaagagatagtactctattttaaactgcttctttattttaaaattttttaaaaatttattatttatatttgatatttataaaatatttttcattaaattaattattttttaaaatgtgtagatatgtgaaaatatttatataatatatttaaaataagtacaatatattagaaaattaaaaaagaaaaagttgatatctcttgagctagcgaatctttaggtcag

SEQ ID NO: 97768 - DNA, 2242 bp, Cannabis sativa
cccacaaatttacaagactacccaagactcatgctcctcctttggagagtagcacgttacgtcacactttaagaaaatgaaattaaaatgaaaaaaaataaaagaaaaagtccataaccaaaaaaaaaaaaaaaaacaaacctatgcgcattgcgcacctctcttcctcttcctaccgttctttcatattatcagtaagaagaacaacaacaaactaccaataccattaccaatacgtttcttcttccatttcaaacctctctacatccaaacccctccaacaactacgactaccactctctctctcgtctttgcgattgcaacgacgtgtcgtttctacctccatggcatcagatgacgtaaccactttacctgccgacgacgacaagtacggcttcactcgctccgagatgtaccagacaaaccttgctggtaccgttgacgcctatgaccgccacgtctttctttgtcataagaaccccgaggactgggcctctcgtgtcgaggattctgcgtccgatccgcttcccaagctcctattctcggctctcaaagctaggaagaacgatattgctcttaaggttggtgtggagtggaactctgattcgtgattttttttttggataggattgggtttggtatgcgttgaaatcttacgtttggactgtttgttcttttaatttatagacgaagttgacgatctgtgagggacgcgatgggaccgagttttcagatggagatgtgctgatctttcctgaaatggtcaaatacaggtatagttatggattggtggtgttttttgattactatgtatctcagctaattttgttgcagagtatggaaatgctccggttctttctttgaatctaatagcatctttgctctgattgtacatgcttgtatgttaagttttagaatattattgttagggtttagcgtatgtaactacagtagtatcagatttttctagttgagcttattagttagagctgaggtttacctttatcaaaaaatttcatgttgactatggaccgattttcgttgaaatgactagaattaggtatgaagtaattatgtacttttaatttacactgtttatcatgactctgttgattttcattaaatgataggatacaactgaaatttctgaaattgtcttttatagatttctgtagttgcagttagtatagtattcgatattcttatattataacaattttgccaatttttttcttttctttcaagaataatcatttgtatttggaagatgttaatgtactggtatttaacatttgggctaaataagaaaattcattgttgaatctgaagttgtttctgttccttcattttaaaggtctttgaaggattcagatgtggatagctttgtggaagatgtccttgttaatggccagacgtggacaacaggagtgcaggaggtcttaaatggatcatatgtgtttgtttgcgctcatggaaatcgagataaaagatgtggtgtatgtggacctgttcttattgaaaagttcaaggaggaggttgagtcgagggggcttaccgatcaggtcattgttagtgcatgctctcacattggaggtcataaatatgctgggaacttgatcatctacagtccaggtgttgatgcaaagataactggtcattggtaagttccaatttgctaacatattttagaactactttgatcatagttgtttttgctgtgtgattgaaaacagtttttgttgttgatgtaggtatggctatgtcactcctgcggatgtgcctgaattgcttgatcaacatattgcaaaaggcgagattatagaacgactttggaggtttgtgaatttgtgttttttttgatattatgctttattggaaagttaagtcgaatacattgatcaatgctgtttaagcctagttgggttttataagaaatggctttggggatttttcttacaatatttgttattttctttaaaattacaggggtcaaatgggggtgtctgctgaggaaggtgaaaaagcgaaagaccagaagattccaaatggagttgaagttgagtcagttgacaaaatcaaggagaaagaaagtgaaactcaagacataagtagttcaggttgttgccagggtgctaatggcggggttacttgttgcagagatgtaagtttggaacagagtgataaaagtgaagaaaagaaggtaggcgtttgcagcaaagaggggtctatctgcaaactgtcg

SEQ ID NO: 97769 - DNA, 715 bp, Cannabis sativa
tatatagatgtgcatgaggattcactcaatgagggatggggtccatttttaaggattcgtgttgggatcgatgtctccaaaccacttctgcgtggccaaatggtggcgtttccttggattaaagatgaactttggcttgaattccgctatgaacgtctaccggatttctgttatgagtgtgggataattggacatgtttttgacaaatgtcaagtgtacttagagaaaatcgatgatggtaaagagcctgatcttgcttatggcccctggatggaaggttctcctcttccaaaatcaccttatgatcgttataggcaagacttctcaaaggcaggtccttggccttttgttactcggctggttaggaacacaatttctcctatcattaagcccccacgacagcctcctgctcttcccccgaacgttactgatcgagaaaaaggaaaggaaataatgcttcctaagtttactgatcatgagtactcctctttaactccatcctttgcagcactctcttgtggtcttaatcatgtttctactgatgggaactctctcaatgatgcacctataactgagaaatgtatctcaacaccatttcctagtgcatcttcagtcaagaaggctgctcctccacagtgccaaccaatgttttctccgcctgaatcatttggggttatatgtcctactactacaacaatgatccctctttcgtcaa

SEQ ID NO: 97770 - DNA, 672 bp, Cannabis sativa
  modified_base (240)..(241): a, c, t, g, unknown or other
ttggtcctctgaactaactctggacctaagtacttcctttctccagtttggtcccaatgaataggggaacgacatttcttaccacacagcatctcatagggagccatccctattgtactctaagcagctataattgtaggagaattcaattagaggcaagtacatactccatgaaccctcaaattccatgacactggctcgcagtaaatcttctagtatctgaattgttctttctgattnnccatcagtctgagggtggaaagctatactaaacttcaactttgtacccatagccctctgaagactcacccaaaactttgatgtaaactttgaatctctgtctgaaacaatagatttaggagctccatggagacaaactatctcttttacatacagttcagcatactgacccactatataagtaactttcactggtagaaagtgagctgattttgtgaatctatccactatgacccatactgaatcatacattcctgtggtactaggcaaaccacttacgaaatccattgcaatgtcctcccccttccacttaggaagggctaatgtttgcaataacccagtcggactttgatgttcagctttgatttcctggcaggttaatgttgggttttgtgccctaaataaaactcatttcagtataatcagatttac

SEQ ID NO: 97771 - DNA, 634 bp, Cannabis sativa
gagaatgaaattcattaaagatagaaaaagcacgtaatatcggcattaaaagctacccgatcagcctattgtctgtaaaatgagaaataattccaagtttaaagaccgcttcaccgttcatgatgtcttaaaaaaggccttacggtcgaataagatatataaagaagagaagataaaaagagaagcatttaaatagctggaatcccaggctcttggttcgggtcttctgggccggcaggagctggaggatctgttgtttgaaaggaaggaacatgaacgttctggctagacctagaagtagtcacctcaggttcaccataagccacttgggaagcatagtactcgatatacatgtcgttgggctcgcccaggtaatcaaaacttgcctgaggattagctttccaaaattcataaaaaatcttgagaccagcgtctctagggcatgtactttctcttctatcctcgttgtctccaatttgtacttctcgacctcagctgtaagctcctcctccttagttttccttttcttcttccagccgacagaagacagtccgaagaactcccctttcctcttgaaggctattcacttctgccgacaaggtgtcgatgatagcttcaagttggtcagaagcct

SEQ ID NO: 97772 - DNA, 506 bp, Cannabis sativa
  modified_base (465)..(480): a, c, t, g, unknown or other
ttttttattttgaatctcttttattttttctttaatatttatcccttaaattaagaaatctgacaaggctttccctttgatggctgctcgcgggtgataagatacatcaaacagtgctagttcagttgaccattttatcaatcgtcctacaacatcgggttttgagagaacttgccttaatggttgatttgttaaaacatggattaggtgtgcttgaaaatatggtctaagtctccttgaggcatggaccaaagtttgtgtgagtttttcgaggggtggatatctagattctatcccaataaacgtttacttacgtaatatactggtaattgggcctttccctcttctcgtactaatattgtgctaattgtattttctgatattgataagtatagaaataagatctcaacaattaccaattttgatgataccggtggagttgataagtgttggaaatattttacnnnnnnnnnnnnnnnntaccatgtatgtttcattaacatcct

SEQ ID NO: 97773 - DNA, 500 bp, Cannabis sativa
aaatggtttccaagtccaaatcatggagaaagacaatggagaaaagggcactgcataattctccttcatgttcaataccccaaaacatggacaagtgacaaaagataacactttgagaaccaagaaggcttccactggaacactcaacagtacattggaacaatgtacagaatggttcacttattgttgtcactccgaaatcaaagctggcctattgttttgctcagggtcagatttgaagttttggtttttcttttttaatcctcaatccaagtagcctcaacaatcaacgtattattccgtcaaaaaaatcatgatcttcttaacttgagatatgtaaaacaagttatgaaaaagaaattttacctttaagctgtgacaataattgtaaatgatatataatacatctatttctattattttttactctcagaaaagagctattctacagattccaagtacttcatgttttccattgcccttctaacaagtaacaacat

SEQ ID NO: 97774 - DNA, 828 bp, Cannabis sativa
gtgaagtctacttaataattttgttgatgtagaaaaataaaatttttgaatggaattcgcactttcctggtatgtttccttttgtttccgattactattatatttttatttaatgttattgtagcataggtgttgatgttagaaagtttcttagtttctttgtatataagactcaatgtgaagttgttcttttgcaggaatcttttgatttttcaaagccaagtacttctgatgatgtccaccaagtatttaaaaatctaactaataagtagaggcgtaatagtgttattattagaaaaatatttgctaatgttttatgcatgtgttaatcaaaatgttaaatgcttaaaactatacttagtccagattcaaatacattaggaaaatttattcatgtttaaggcttttcgtaatcagaatgttttttcttcgtttaaacacatcaagcatgtttgtaggtgcacatttatttatctggaagtttatgcttgcctatgtgcttaatcacacaagtgacactcacaacactcacaaaattaatggctttcaattgattggtttatatatcattgttatctatatatgacattgttcatgacatgtatttatttaactttgtacatgtgctcctctattttttgtgcattgtctctgaataattttggtataagattattgaaaggagaataaaaagttgcagtcctttatttaaatggtaatgattttctcacatcaattttgacagtatttacatgaaatcaaataagcctttttaccatgttcgttgtctttggagaattcagtatgaaatgaatttggtaagtaaaa

SEQ ID NO: 97775 - DNA, 1405 bp, Cannabis sativa
ccaaaaaataatggtacaaatcattattgtaaatacgtgtgtcgtgctactccgacttatattttttgtactatttaaaatgtaggtcgtgctgtggcgaatcatagaaatataagtcgtgtcatgtaacaattttataggataggcccgtcacgacccacaaatccagtaatttcgtactgtgctcggattcaggtcgtactttatttgtggcggcctttttttcttaaattaatataccaacctattttttttgtacgggctcaaatttgtactctatatttttctaatttttattaaaattgatgaactagatactaaaatatatgtattttttatagttttaattagtttattatgtatcttttctaataatagttacaaataattatataaaaaataattataatttttttttgactttggaggagagagtgattccaacttggacctcctctatgtgaagagaagtgtggaactactagattatacctatgaccacaaaaaactaattataattattataatttgaatactattattattttaattgataaataaatatttatcatggttattattatcaaattattgggtttttaatgtgtcatatttttgagctaatttattcatatttatatattgtgtttttgagtttctcgtattgtatcatgtcaaagtctatattttttgtgtcggtgcttaaatttatatttttttcatgttgtgcttaaacacatatttttcataccaatttcatgttacgtgtcaaaaaaacctcttaaaaaacgtggccctatatacagcactagtacaaattagaaatacaaagtttttcttattgattctgttgttatttttataaatatatatatatataatgatcatatgggacggtgcaataagaagatgattgattggtgtgacggtatagctaatgaagtcatcaacattggatctgtatatgatatagtggacatgcatctctcatgtaccctaaattttcaactacagctgctacaagtacagtaagaactactgctctaaatgtgggccgaaatttttgacatgacacgaaattagctggtgcaagttcgagaagtatgagtacgtatagatttagacacgatatagtacagaaaaatatggactttgacacgatacaatatgaaaaaatataaatttaaacacgacacagtacgaaaaaatatgcgtccctcatgtaccatacattttcaactaaagctggtacaactatatactagtactatatatcatttgctattgagtattcaggctcgaggctcggttaaggtggactaggcacatgtgaaggcacatctagtttaggtgctcgaaaacaaaaaatattattttaaaaatacatatattttttaataatttt

SEQ ID NO: 97776 - DNA, 534 bp, Cannabis sativa
  modified_base (236)..(248): a, c, t, g, unknown or other
aaatgcataagataactcttgatactattattgcaaattggaaaaggataggccttcttagaaaaggattggacttccatcttcaatacaattgaaactaagtggggtaacccgtccggatattgtatttcttttcttttttcttattgaggagaatattgtgtttctcatattgttccaatatggtattactcttaaataattgataactgaaacattaataataataataatannnnnnnnnnnnntaataataataacaataacaataaagaaaaagataatatacctgggtgaattgtcgaaataggcctaggagaaagtggcgagtagtgtttctcattgcttgactttggcaacaacttcttttctctagaaacatgcgaggaactcggttcacccaatggcctgtcaaatggttttgctgtaggtggtttattcaaagaaattttatttttaacttgttcaataaaattcgagttttctacattgcttcttggtggtggatggactagtcgatatttggattcactt

SEQ ID NO: 97777 - DNA, 867 bp, Cannabis sativa
atttttaacaattaattgaagtttataagatgtaaataaattttcacttgtgtaattggaacatgtctgtataatttactctttgtgctagtgtttagagttgctatgcatatgtgagctcttgttagtgtttcctataaagtgaataaaaaaatattgaagctgaagctggaagaggcaaagaatgctattttgacgaaattagcagtaacaacaatctgtgaagaaaagagagtacaaaaaagcatcatcgaacccttaagaagaaagaacttgaactgagaagtgtgtggaaaaatgttacttaacatttaaggttacttaattttatgtagcaagggcatctacgattcactagaatagcaacctatatatattcattatggatcaaataatgtaaatatttcaatggaaaacattactttacaaccttttccaaagcaataatatagaaatttaattcataaacaaaaaaacacaacaatagaaaacatacactatttggtttgtaaaagctagaatcatatagcctgttctaataacacaagcatacagaaatttaatttctaaaccaaaaggcaacacaatagaaaacagaacagaacacataaattacacaatctggtttgtgaaagctagaatcatacacttttgcaattaggacatgactctcaaaatgttgttccctacaataccatatacatgatatactattacaataattaaaattttatacttaatccatacttggctcactctactatattcttcccactgttcatccatttccccccattttctcatcttttcaaatttgtttgaaagcttcactttgaaaatttcagctaattcaagagtgtttgccag

SEQ ID NO: 97778 - DNA, 1624 bp, Cannabis sativa
  modified_base (30)..(55): a, c, t, g, unknown or other
ttattttcattgttttagagatattcatannnnnnnnnnnnnnnnnnnnnnnnnntagtaaatctagatcctggtaaagtattcccaacataatgttcatgcatccattgcaaaatcaacaaaattaagtgaaatagctggaaaagaaagcttacccctacaagatgatgttgaagaagaaggtgggaagctcagatcgtcgaaacaacacaaaaatcctgggaagatgatgcttgtgggttcagccttctagagagaaggaggagctttttctaatgcaaatttctagtgagaaaaagtgaagagtaaaaaatgagaagttaaaaaaggttttccctccaaaaagcacttatataatgcatgtggggccctttcttcacttccactacacaacaaaaagataactaaagtggttatttttctatagcaatgagatcaattagtcaagacaaagtgttttaaaaggctaaaaatgcatcaaattttattcaccaaaggctacaatagtcgcgaccacatcaacatagcaggtaaagtccctatccgtacagacatccgtataggaacttggggggcaaatgctatcacaattttttcctcctgacatggcaatcttacataaaaaaaatcaatgtcacgtggcagtatcgctcactgatgagaaagttgagtcagcacctaagaaaacggagatctcgacactcaaacaggcatcaagtgacagaccagctccctcacaggagctgaccgcccacgcttggttagccctatggccgaccagccttgggactgcaccatggcagactagccttcctccacaggggcctggccagccaagaggtgtcctgcagggtttcttgtgtacttctacacgtggataacatcctctgggctgcaaattgggccctaaaagcccaatagaatagcttcgtaatatctagattcaatgacattttggtcttttgtaattaactaataaaatatacaaatatctagggtttcaagttgtaatctagagtttaggcctcctatataaaggccttaactctaacctaaaaagcctaagctcagttaagactaataattgcctccaagctctaagcctaagtttgacaacttttctcttcttcacttcctctctcacacgcctatacaagcattatctctatacttaagtttttccattcttgattcatacattacattcctaagggtgttatagcatatcccatctatagtgagatgaatagtattaactctcgatattaatctaaaagggaagtaggtcattacctgctatcacaaggggccgaacctctataaaaaatctatgtgtttattaattttcattcttatttgtgcaaacacgtggcaaacatcagatctgtacgaccctgctgtcggttgatcacattttgaggttaacaataaccctaatgcttatttcatgaaaatagagcccacaatataaaataatcatatgcaatcatataacataattaattaatgctgttaacccaaatttttgttaaccaaatttgagcctcacaatgataattcaacacagaaataataaaagctatagaaaaataaaatatgaacactgggttttttacgtggtttt

SEQ ID NO: 97779 - DNA, 516 bp, Cannabis sativa
tgaacagagttctccaactcctaatttctagtcctctttccaaaagttgagtcaagattgtatttatagccttaggatcaagatcctaaagtcggtggcggcaagaaacaaggttgttaagttagttagaaaaataactaacttaaccaactcctcatttagcgaagttttcacgttagcttaagtgtcagggccaccaggaacatgactgagcttctgaactcacgaaccaaaggcacttattgaagatgcttccggataagatataagtctactgaagtcgactattcaaaactatcaatccaggaggctggaactcctttctagggaagggctatctattctgaagattgatcttggagagggcatgatagtcatctgggaacacccttccggactcgactatcattccacaagacacctttcgggatcgataatagtgagtgaatagtttcccaaaaatgacatttgtagagaccttttcatttggaggaactataccataaataattccac

SEQ ID NO: 97780 - DNA, 4957 bp, Cannabis sativa
tttatttttataaaactatttattaattttacaaaattatttattttgagttttaataaacatagtttattatttaatgattaaaatgtatggtttgatacaataagtttttaaaatatataagtttttaaaataattttttttgcacattttttgtaattatgttgtttttgttgtacatttatgaaaaaagccctttatttttttacttgggttttgagagagaaaatcaagatatatatatagagagaaaatttttgtgggtgtgcttcagagagagagagaaaacttgaaacgggagcaggctgatgaagaagtgtggaggctctcttggtgaagagagtccattccgtgagaatattttcaagaagaacaatacataagaagaagaagaacaacagacaactcaaattttctaagtaaaaatattctctttttttctttatttattttttctagaacgacataaactttactgggtttttgttgtttttactaattatgttgttttttttttcttttttggggttgtagtttagctctggtttcgtgagtggtgttgttgtatcgtttgatgactcttatgacttatttaattattgatttatttattgttttaatgttgttttattgttgttttctttcattttttttatcacattttctaaatattattgtaccgctctatttttaatagtaatagggaataatgaaatttgtatataagttattttcttcagtatcatatgctctaatatatgttcagttttcctctgttgttctactgttgttttttgttgttctgcttcttttcatttttgatgtcttttcctgtatgttctcttgttgcgccccagctccccacatttgctgcatttgttatattgtttcttttcccatccagcttcaatcctttttttttggtcttttagatttcaccactttaatggaaggtaagactattactgtccatgattctttcattctggttacctcaaataaatattcagtggttggtttaacctgtgtaatttaaaaccaatatttgttaaatatacgaaacaatagtggaacaacccaaaaacaacattaaaaaaccatgacaaccccaatattaacggttttaatgtttatgcttcatctcaacagatttaatggttgttttctgcctgttctggtgttgctatagtggttttgtctgcgggtgtggaagatggagacctcgttttttattttcgatgtttacattataaaagaaaaaaaaagttccaaggcagtataaaagttatttttgccgtatggcagtatttttgtaaagattgagtcaaaatccagtatttttgtaagtttccctaaacatattacatattattataagtgtataccatagatttaaaaaatacctttgttcattcaaagagaagaagtcaaatagcgaaagcgtacctcaatccatatatagtgatgatcttaattcatcttgtagagatgatttttgtggtgattttgagtaataatcttccaaaaatataagacttataaagttttttaattttatctcttgatgaaagaaaatgaaaatagagttactcctgttttttgggactactaccaatatataatgtatagcttggttattaattttaagtatttttaatttagcctcttaataaattagaaatacctttaaagtacccaataactataattatgatgaaatttcaaataacaatacactaatataaatataatcatattgatgattttaatttaatatatatttattgatacattaagtgttaaataatataagttatctttatatatttaaagtgtttatataacataatggtttaactaatttcattcattcattcattctgtttgatcaatttcattcaactttgagtttaaaccacccctaatttcattcattcattccctttgatcaatttttaataatagttatatatttattttttattttttgtcgtctccagaattaactcgatttgttgtacgtctcatgtaatttcagtccattgttaaagaattttattacttttgtgtttttggtaattatgaagtatttaatattgtggaatgcagttgttgtagctctgatttgtccaatgggagagaagttcatatattcaagagggaaagctatatacattcacccagttgtatttcatgtgagtttttcttgaatttcagttcagatgttgattatgaatgtattgttgatgtctcgtgtgatgcaaaatcaactcttttttaaagtctaaaatctgaatttgtcttttcggaagatgttgattactgtttcaattgatgttcattaggttcttaattgaagttatcttcaatccaatgctaatttttgcaatctagatcattcagttgtgtagaccgaacaatcaataacagatgaattcttatgcggcgtagtagacaactcaacttttggtataacatatttttcttttctttcttatcactctgcatcaactcaaatctcttatatacatacattatacatatgttcatatattcatacatacaaatatgaattttcccaaagttttctcaatttaacataaattccaaacttttaaataaaaggaaataagtgggaggattgttcaagcaatatgagttgaaaattgaaaccgtgtttttaactctaatgataataatgtgatctttattgcataattgtatttttagaataaatatctcattagttgtatgatattatagctttgagcattttttatttctttgcagctacttaatttggaagtttatatagcttaatgtttaaagagctttttttgatcggatggtgggttttagattagagagcaaaagcagtttcacatgaagtgaagggttatctcaataatcgaatgaaatcaaaggtgtgaatctgcagctaacggctaccccaaaggatctgtttgataatcaaagaggtggaagatttagagctcttatggcgatattggtctctcatgtactgatacaataagaccattgcctatgttgcttcatgtatgcccgctatattctcagcctatcatagcgttcccaaggaggtaatttcttttaaaaacttgattactcatccaggtttctcatcaaaggtcaagttatggtgccatgaccattactgagttcgaattattgctgatatgatacacatgtaaactttgttgtttggtaagtcttgatttatgactgttagctttgaacatttttttgtttctctacagctactgaatttagagttttaaatgaaaagaaaagagagtttcagaataactctgatattgcttagtttcatagatctatcaagatttgcttaaagtcaatctatctacagctactgctttttagctggtgtatatctcaaattttatgggagttgatttatttacataaaatttatttatgactcctacttctaattattcaattgtgatctattatgaagagaagggtactgagtttttctcaataattgaatgaaataaagggcgtgaatctgcagctaacggctactccaaaggatctattcgataaccctttgaagtgtgtggaacaatcacaagaggtagaagattagagctcttatatagatattggtctcatgtatagaaaacaataagaccataaacattggtcagggggatgaagtacgatatttgatattagtttttcttttgaataactttatgttattaatatttaaggataaaaaaaactgatcttatggtattattattttttttttttatatttttaattatttctataggtttgctcccgaagatttatattgattttttttcatttgaatttgattttttttatgcagaagtataatcttaaaattaattataagtcttatggaaaataaatactttctgtagtaatattgcaacttcgtcaaaaataccatagacagattattaataaaaaaaagtagacaatccttgcagacctggacagattaaaaagtgtaaaatacaaatattacactattttctttccagagcaaaataacattagaaactgttaattatgacttttttttttctacaatttttaagcaaaatgtaaaatacaaatattacactattatcttgttcaaaaaaaaaaaaaaagaagattagaaccaataatcatgttttttttttctttttcaatttttcacaattttacatgattgctttataacagatgaagtgaaaccaatcctacaataacagatgaaattccaatatattaatagactaataaaactaaaaaaaaacacattttgtgatgaaaacaaagggggccttttgttttttttttttcggcatttttacaattaaatttgtaagagggttcaattatgcattatgtgtaaagattgatttattctagttccaattcccgtttttaattttcctttgtgatttgcttgcagatttggtggagctactgaaaagaaaaaataataattcttttttcaatttagatttgggttaccattatagtgcaagttttttcgagatttagattcgagagcatattttcttttaatttttagaattagaaagattttttttttaaaaaaaaaaattcaaaatgtaattgttttctcattttgtaacattttgcatctaatttactatttttaaaatttcacgtattttcaattaatatttttttcaaattaagcatataactaaatatacttgcacgtaacttctgcgtagtatatatatgtatatgaaatgtctatagtggagaccttggttttgtccctacggtaggtatacttttctagcccttgattattgatctaatggtaatcttgttaaggaaacataatagtaataatagaccctagcttatagtatttttacaccttttttttttgtctttacactattgtcttttt

SEQ ID NO: 97781 - DNA, 535 bp, Cannabis sativa
actacataactgtggaggatattattattcttttatattgacgaagaacggtttactaatattttcttattaatataggatttaatccattacttttaaataagtattttgtaatataaattaaaggatcatttataagctttatttcttacaagagtcaaagtgtgacctttgaccacccaagttatgaatattacacatctgccacggtctaaggcttggatcgtgacagaaaaatggtttcacaacacttgatttaattacctcggattgtgtcaccaaatagtttagatttattttaaataataatagtaataattatcttggtatttatatgtataagatatatttataatattagcatccaatcctcactacctgattagtttttggtcctcaaacctaagaaaatgcctccaaaggaaggaagacaaggagaacagttagagaagatgtccctcaaactaatgtccaacctccacaatctgaattccctatgaacgccattctaaaagccttaagagcagttcccgct

SEQ ID NO: 97782 - DNA, 1099 bp, Cannabis sativa
aatatggtttcacttgttttttttctctatataattacataaattttactattatcatacatatgcgttaattatattgatgtagtaataataatttaaatttaaaatttatacaattgaagggatggtttagtatatataaatgatattcaaattttagtacatatatatatgatgagcattattaaaatataaaaatatacaataattagtaaaaagttatatgatattcatataacatgtatcatttttggtttataacaatatataattattgtataaatacgaacacatgaccacacatacatataattggtgctacttcaatctgaataatattagtattttgaacgtaaataaaattaaatataagtattttgagatttattatactgcggatattggaatctttttaatttggttttaatttttatttttatttgttaaacgatttgagaattaagccgttgtctatttaactcatttttctaaatcgttccaattaaagtacaaattattattttaatcgattactatattaataaaattgcattatttaataaaaaaaaaacatttctttcagctaccggacataagtactttaaatttggttagaaactgcttttaaaaataattggtgatatatttgttaaaataataataataataataattagtagtagtagtagtagaagtagaagtagtagcagttgatgatgacatttaaaaatgcaatctattaatttggtagttgacttgaccataaatgtacgtgtgcatggaagacaggttttattcaagtccaatttctttaaaaattttttgagccaatatatatatacatacttatatttatttatatttttagtttttatttttacgatgtctatgtaaaaaaatttataaataaaaaaaaatacttattaattttttaatttttaggaaaaaataaatattaaaaattttaaaattttaaaaattaaatataaaatttaataatattaaaattaaaaataataatattacaaataatatattaatatttatatatatttgaattaatttaaaattaatgtaagttgaattaacctaaaacaaa

SEQ ID NO: 97783 - DNA, 1192 bp, Cannabis sativa
tttttgtgaaataatccctaaaatgacttttaaggcctcatctaacggtcttattgtgggcttttttaagtccactataacctcatctgcaattagcctatttttactagaattttatctatatatttttatgatcaaaaatctaattaagattacaaaaatatggatctacactttttttcttttgaaatttttgaccaatttaatttttttcttttttacaaaaatacctacggttattttttatgttgtttcatgttgtttctttttatgttcttttaaaaacaaggttccaaatttagtttttaaaaatattatattttatatttttactattatttattgaaaaaactataactattttcttaaaaaaaatccctaatttattttgtaagatactccatttgatattttgttaaaaaaaaaaacctaattatatttttaaaatactatatgttatgattaaattttattactactatacatacaaaaaaggcagagagatgagttgtgggggaaagggtgaaattcaaatctcttctcgactgcatcgacgtttatgtggacagataaggtttgcttggtcttgaactcgctccctgctcgagagtgaatgttggaaagtactcttcgatgactaaaaattgtccaattatatttttttgcccaatgccccaattagcgtaaaaccgagcaactacaaaaaaaaaaaaaagttatctttagtgatgatattttggtcacaacataatttttttgtgactaaatgtgatttttaatcacaacaaaaagttatttgtgactaaaatataatatttagataagagttgtcactaatttaattttagtcacaacaaatattgtaactaaaaacatatttagtcacaacaaattgtaatgtttgtgactaaaagtaagattttttgtagtggaacttgattatttcctattattatacaattatttataaaagaatatattaattattgttaggattgaatttagagattaagatgagaaggttccaagagacaaaggagagatgaagaatgaaggaaacacaaaagtgaaataatgaaaaatgaccaaaaaccaaagatatggtcttgtgagttggtaaccattttaaccacttctaatcctattagtaatttctctcaacacatttttataattaaatattttttgaaaa

SEQ ID NO: 97784 - DNA, 573 bp, Cannabis sativa
aataaaatttgaatttttccaggcttttctagcatacttacagtccaagatggcatgtttcactgtctccgtggtttgatgacagatcgggcaggcaggggaaggaattgtgtgacgaaaaaataaggaggtagcaacagggattgagtgggacaaaactctccaaatcaagtgtttaactttaggaggaacatttgaagaccaaactttagtccaaaacaacttactactatcaaaggaggagcctgaagctatactacggtctgtcaaagcaaggtgataagcactcttcacactcaaaattcctgaagattcttggcccaaaatcagactatccgagccacatgcaccagaaattggaacattgaggatatgggttaccgttgaggagtcaaaatgctgattaagcctatctaaatcccaaccacccgatgatgaaagaaagtaagaaagagtcgagtcaggaggaggaggggaggcatagaatttataacgaaggccagggatccagtgatcttgaatcgcatgaatattcaagccatcgccaagtttccaaattaaccctttcttcat

SEQ ID NO: 97785 - DNA, 657 bp, Cannabis sativa
caaccccaaaacctcaattcatccccaaattcacaaaaacttccagaacacctgtgtgcaccataataaaccaatcccaagcagtaaagttcaacaattcacataaatttccaatctaccattaaagctccaattgaactcccaacttaaaattcaatacaaacatcaagatattcacttagcttagcttataacaaggataacaaactcaatttaataccaacaactaacctagacaaaacccaaatcaaacagccaccaatcttcttcaatttcacttcaaaacctaacctaaactacaacaaccttcaagaaagggttaaagggaaagattaccttgaacaagctttaaataccacttgaattcctcaattcaacacaaatcacaatccccccagctgctgcccaagagaatcgaaagagagagagagagaaagaactaactcctattgttcttcaatttttccttcaagcttaagaatccctcttcattatctttttttttcttctttttatttattattatctaattaataataaaccattctcagccaacatttgactacataagtcaagagaaaagtcttacaaaaagacttccttgcccctccattaaatataaataataaaaacatcccaagggtaaattggtcattt

SEQ ID NO: 97786 - DNA, 733 bp, Cannabis sativa
attaaacaaaaataatagtcttactattaaccttatactcatcgtctggagagtccaaatccagcaggagagtccaaatggaaatggcactaaaccaagtgtggtgtggtgtggtcttatttaataatagaatgacaaacccaataatctgctttggatatggctatggttatggctagtgactcacaaagcatatatacatacatgtattttactttttacttttctgcatttgtataataaaatatttgaaatctagtattaagctgaaatccaaaagcataagacatgtgcacttcaattgtttttttttatatatggaattttgagtgcaattgaaattagtcagaagttcaatagtagaatgactagtgaaataagaggttaatatagaacagtataatgtatgtattttatgggatatagtacattagatttggtagcttgaatgaacgagtggacattgtggtacccaataatcctatatccctctttcaccatctcactgctcttctcttatttaaatataattgccaattttccatgttcatcaggggttttgcaaattaaaaaaaaatatataggaatcacttcaaaagcatttagtgttgtgtatcaagtatttagtgttgtgtcactgtgatactgtattagaagttgattgtgtgtttattgattttaatattatgaaagtgaatgttttgtagtattaggaaatctctttataattttc

SEQ ID NO: 97787 - DNA, 771 bp, Cannabis sativa
cctctttgtgactgcgtacacttgcgtatattaatttcacaacatggatcaatgaacaaaggtggtgcaaagtcaatattgagtttaactatcttgtagtcgtccaagagttgtcttttgaactgaaagatagaaatattttcttaaaagtttattaaatagtttacgaataatgtagcttactattaagcaagatttatttgttttattttttattgtattttgcaagcaaacaatattttcccagagttcatttatgtattaatgaagtcttacattcttatgttaaaatatttaagaaaaattaaaaaaaaaaaacaatttagagattttccaaattacttttgttttatatttataaaagatgtataccaatcatcatatacattgtgagatttcagaaagaaaaaaatcatcatgttcattgtaaacattacaattttgtcgccaaaagatgcaaatgttcatgtgtaatttttagacaatttatataatactcttattcttaataagatgtctgttgttgtattattacaaagaaactatggtcattttggtttgttataatggtaatggtaatagaattgggattacaattgcaatatttggttttttaaaactaaaagtgatgtaatagaattagaaatataagaaaattttcattatattgaaaaacttattgttgtgatattttgcacacacaagtgtacgtatcgttacaagtagtgaactcacgaggagtgaggtcgatcccacgaggactgtagttaa

SEQ ID NO: 97788 - DNA, 3523 bp, Cannabis sativa
  modified_base (27)..(43): a, c, t, g, unknown or other
aattttccataattaaacataattaannnnnnnnnnnnnnnnnaaactaagcggtctttacagggtaatatttcgattaccaagtgttcttgctaaacaatcatagagaaaactttatttaatggtgaacaaggatcaagaagtaatacctgatgtcgaacaacaagataagattcattgagacccttgaggaattgcagcacttgatcatgattgtgatattcttgagttcttgcagcagcaacacaagtgcaaggtatctttgggcaaagttgatgaatttcatcccaaatggcagtcagttttgtgaagtaagtaatgactaagtcatctccttagtgaaggaaagtaaggttttcattagctcgaaaatacgtggaccattaccttgattgaacatattgttaagttcagtccacatttttgcagtagtatcaagatacatgatattgctcttaatttcagggaaaaactgagtgaaggatccaagattggaccatttgattacaatgaatcagagaactgtataatggatcattaggaggtggttttggaagcgtgccatcaaggaagggcattttgttacgcgcacctatggaaagcttaaagtcttgagtccaaggttgaaagtttcgatctgtcaagattggagtgacgagatctagacctgggtgatctacagtgctgaggtagtagggactttgtacatcctcataagctggtcgatcgccatggacatggtgagtagcaacggcctgaacagggactcgaggtggaattgtcaagttttgagatgctagaggagcagaattcggaggagcgtcatccactggattgttgttgagatcactggaggtagcagaggaattggctctcgtgcgcaccattgttgcaggcaatggaagcttggtgaagattactgttcttggattatagcaactgataccatattagtgaacaagaaaacagagtaaaatagggaagaagaaatcatattgtgttattagaatagtaaattggtacaagagcttatatagtgtgttaggtacaagaggttagttgcaactaactaatcgacctattgaataactaatataacagaaaataatagaattctaataacctctaataaagtgaaaatattttttcaaatcatgttctataaaattattttcactttttaattttttaaatgataatcaaaattttaaaattaaaattttgaaaattgaaaacaaaaaaaaatcactttcaatatttttcaaacagttctttaatcaatactctggactctgactagccccagatcggacccaaactcgtccccggccctggcaccgaacccagacccggactcgaccttagacttagacccaaatttaataaaataataaaataaatatgaaaataaattttacataacatacttttgtattctatttttaaaattaaaaaacaaaagtagttatagaacgcatttttattttataaaaaacaatattttaaaaacaaaaattttactttcagttttgtgattaaaaaattagaaaagaaaagtattaccaaacggcacgtatactttaacatgaaatttttaaaaactataaacttcttatctgttacagtatctaggagagttcttttagtctatttttttttcatgaacgtgtacgttatattatttggggtactatgtaaatttttagaaaattttgaataatttacattgttaaaaataaagtttaagcagttgcttactacacatataagaaaaacagtcacttgagcaaaaaaatacttgaaccttatttttgacattgtatactattaaaaaaaatttaaaaatttacagatggttctaaataactaaaacacatacgatcttgaaaaaaaaatagacttttatatgtgctgaagtagataaggggtataccatatccttttttaaatggatgtaccctatatatagaataaaggaaaatgtatagtacaccctcttaaaggggtgttccagttgaccctttacctacttcgttctaatttttttttcatgatcatgtacattgtaattatttaggaccatcattaaatttttagaaaattttgaagagtttacattgtcagaaataaaatattaaatattttattgcaagcgtgactattatttcttataagtatagtaaataattatttaaacattatttctgcactataaactatttagaattttctaaaagtttataagtgatcttaaatagctacaacgtacatgacataaaaaaatacactgaaaagctctcatgaatgtcgaaacagatagggttgtctatcgaaataacttggaggtgtactacacatttttccaacgagagaattaagatcatgagctatgaataaaatagccagcaacatatcaaactaagaaatctttaatgaacggttgctggtaagaaatatgtatattagtgcaattgccgatcttggaagatctttgatggcgattagattgttgattaggtctgaaataccttgtatttaatcaaggtgatgataatatacatattctcggtgagatcaatcacgatcaagaccaatgtgagccttttgaatagtaaagtcacgaagaacattatcgattagtgaaattatggatcttaatatctttggtggcgatggaaccgtatattatttttaaaatactttgtatttatttaaggtcaaaataatatacgtcttcttggtgagataatggtgattaagaccaatttaagccttttcactaataaagtcacgaatactactgttgattagtgtaattgttgaccttggaagatctttggtggcgattggtctgttgatttggtatgaaatatcatttatttagttaaggtgattattatatacatattcttggtgaaatcaacagtgatgaagaccaatgtgagcctttttactagtaaagtcgcgaagaacactgtcaattagtgaaattatggatcttagaacatctttatggttatcacattgtagattaggtccaaaatacattgtatttattcaaggctagaaaaaacatgtctccttagtgagtttaatggctatcaagatcaatttgagccttttcactaatgaagacacaaagaacactatcgattagtggaattattgatcttggaagatctttggcggagatcagatcgttgattaggtctgaataccttttatttagtataggtgggcataatctaagtcttctaggtgagatcaacgacaataaagacctacctgggtgtaataactgcctagttaaattatggaaattagcagataattaaagatttaattattaatttattattatgtgcttcttagtagaaactagggtttattgtcagaattaggccatataaaaataatttctcaaatatagagatacatttgaatataggtatattatttatgctatatgtgaattttaatatttttacaaagttcacgttttatgtccagtaacagtagaatg

SEQ ID NO: 97789 - DNA, 514 bp, Cannabis sativa
  modified_base (367)..(374): a, c, t, g, unknown or other
gtaaaaggagctgatgagatttttttctaatttaaatttttagaaggacaaattaaaatatatatacgcaatagagttagattgaatactatgaacaaattattatatataaataaaaacaggattgtgtaccttcaatatacttattgatatggacaacattgatctaagatctgcaaagtaaagtgaacaagattagtctcataattagatcattcaaactctcactaatttttttggatgacgttataacttataatgaaggtgtataaactttggagcaaaacttaaattatgtcagctagattatttctcaccatattgtgtgttaattattttaagaaacttttttatttttacactttannnnnnnnttttttatatatatttttacaaaattttacataaactcctattgcaactagcgctgcaacttaaattgcattaaaaaatcatataacaacccacattatataataatatacatcaactttaaaaactcaaaccgtaaatt

SEQ ID NO: 97790 - DNA, 514 bp, Cannabis sativa
caattttatatttatagtagagtaatcgtgaaattaataaacaagattatttgattgatgagattcaataaataaatctagttcattggagattaggattatgggtctatggtccctagatcacaacggttgaccttgaaaagtgatcaactgacaacgaggttgtatggatctgatgcttgccacgtgttacacaatgagaatgaaaaagtaaagaacacacataattgttatagaagttcagccccctttgatagcaggtaatgacctactccctttttagtagtattgataccaagggttaagactattcagatcactataggtgggatctgatatagcacccttaagtatacaaagtatgaattaatgttggcaaatctcaagtgttgagaatgcttgtatgggtgtatcagacttatcagacttaggcttagagcttggaggctagtatcagattcaatgacttagttaaagattttaaacctaattctcacttagtgacttggttatg

SEQ ID NO: 97791 - DNA, 840 bp, Cannabis sativa
gacaaatcaagacaaagctatgaaagcagccattagtgatgtttttccatatacaagacatcgcttttgtctatggaatatcttaaggaggattcctgaaaaacttggttatgtgataaagacaaatgaacattttataagagatttcaacatttgtgtttataattcatgggtagctgaggaatttgaatataagtggtcaactatgatagagaaattttaagtcaacgagaatgagcggcttcaattaatatttgaagatcgcaaatattggatacgcacttacatgagaaattcctttttcgtaggtatgtctacaccacaaaggtcaaaaagtataaattatttttttgataaatatgtatgtaagaatacttctttgaaagaatttgttgagcaatacaaagttgctttacaagatagacaggaaaaggaagttcaagcatgctttaatacacaccaaaagaaaccagctttgaaatctccatcgccatttgagaaacaaatgtcaatgatatatacacatgaagttttcaaaaacattccaagttgaggttttgggggtgtcagggtgcttctctcaaaaagaaaaggaagatggtcctgtgtcaagctttattgttcaatattttgagaagaaaatgaatttcatgactagttgggatgaaagaaagctgaatgttaattgtctatgccgaatgtttgaatactatggatttctttgtaggcatgttatgcgtgttcttcaatcttttagtattttcaatgttccaccacaatatatattgaaaagatggactaaagatgcaaagattttatactcagctggtcatattccaa

SEQ ID NO: 97792 - DNA, 4143 bp, Cannabis sativa
  modified_base (46)..(47): a, c, t, g, unknown or other
atctttattaataagtaaatccgattatattgaaatgggttttatnnagggcataaaacccaacacatgctcccaacattgattccaacatctaacatgtgcaacagaagaggaggttgttggacaaagaatgtgcccaagtgctcaaagatgaagtcgagaggctacgagcccatgacttcataacggaagcattctatccactttgagtatccaaccctgtgctggtacccaaacccaacaaaaagtgaagagtgtgcatcgacttcactaacctgaacaaagtaagtcaaaaggactactttctgcttccataaattgaccagcttgtaaatgtcacatcttgccataaaatcttaagtttcatggacgcgtattcaggtttcaaccaggtaaagatgcatccaccaaatctggagcatacaagcttcatgacagacttaggcctgtataactacaatgtcatgccctttgggctgaaaaatgcaggggccacgtatcagaggcttgtgaacaaaatgttcaaagatcttatcaactgcaacatggaggtgtatgtggatgacatgcttgtcaatttcaaaaggctaggggcatgtggcggacctaaacgaatgcttcaaaatcctccacaactacaacatgaagctcaaccccctcaaatgttctttaggagtaggcccgggaaaattccttggcatcatagtcaatgctaggggaattgaagcaaacccggacaagatccaagcccttttaggcatgaagtcgcccactaccactgaggaagtacaaagcctaataggacgcattgctgcactaagcaaatttgtgtccaaatccacagacaaatgtgtacccttcttcaacattctcagaggcaacaaaaaatttgagtggatagaagaatgtgaaaaagtatcttgggagctaaaaaacaattggctcaaccacctgttttgtcaaaaccccttaacaatgaagagctagcgtgtacctagcagtcacagaacatgttgtgtgatgtcctcacaagagaagaagatggtgtacaacaccttatatactacaaaagcaagagactaatcgatgcagaaagttggtacccactcatggagaagctgacctacagcttgctcttggcttccagaaagttaaggtcatacttccaggcacacccgataaaggtgtacactgatcaaccattgcggtaggttttacaaaaacctaaggcatcacatcgactactcaagtgggccattgaacttggccaattagacatcacatatcaaccaagaatggccataaaaagttaagcacttgtagaattcatggttgagtgctcaaactcatttcttgacatctttcaagatttaggagaaaagaaagagccagaaaagaagcaagagcaagagcaacagcaaaaacctaaagaaccaacatggaaactccatgttgacggaagttgcacaggccaattgtctggtgcaggcattgtccttataacacttgggggcaaaagttgcacgaagcaataaaattcagcttcaaagcctcaaacagtgaggctgaatacaaagccttaataactggcctcaagctagcacatgaagtacaggctaaccacctcgacatattcagtgactctcaattagtcgtcaatcaagtcctaggagaataaataacttgaggtgaaaaaatggttgcctacttgagcaagatccaagacttgcaaagtcagctcaaaggctatacaattaggcagatccccagagaatagaatgctacatagatacacttaccggtcttgaaagcggaaccattgccaataaggcaaacctagtgccaatacagttcataaaggaactaagcattatcatctttgaagaagttgacatgccaatacagtccaacatggatgacacctattacagcttacctccgaattggagccttgccagaaagcaagaatgaaacaaaaaagataagaagaaaggctgctaggtatctaatcctaaatggactaatgtacaaatggagcttctcaatcctgctcttaaggtgtgtcgccaaggctaaggtcgagcgactaatgatagaagttcacgaaggcttttacagcaaccatgccaaggggcaaagcctatccaaaaagatactctaacatgggtactttttgccaataatcatcaaaaacacaatggaatacgtcaaaagatgtgacaagtgccagagattcttaaagattctaagagctccacccaatgagctcacgatgatgcagtctcctcggcccttcacatcatgggggatagaccttattggtcaactcccaaaggaaaaaggaggggtacaatttactgtagtcgcagtagactacttcaccaagtgggcagaagctgaacccctggcaacaatcacctccaaaaaagttcttgactttgttgtcaagaacatcatatgtcgattcagactttcgctaaagattgtgtcaaacaatggaaagcagttcgatagtgacatgttcactaatttctacaacaaacatggcatcatcaaaagcttctctgtcgtggcccatcctcaagcaaatggataggtagaagttgtcaacaaaaccctcaaggacaccttgaagaagtgccttgaggaagcaaaaggaaactggcacgaattgcacccagaggtcttatggtctcacataactactgagaagacagacactaggaaaactccattcgctctagcttatggctataaggcaatgttgcctatagagctggtgccaccgtctcacaggaggacaacctatgaccaagatacaaacaacatcctgctggcagagtcccttgatgaagtagaagaaagaagagatcaagtcaacctaaagttttaggcctactagctaaggttgcaaggcatttcaataaataagttaaggacaggaaattcttcataggagacctagtgcttcgaagagttttcttcaataccaaagatacaacaacatgagtgttcagaccaacttgggaaggcccttatcaagttacaaagataactagtaagggagcctacaagctgggaaggtacaacgagaacatggagctcattctcctaccaagatatttgaatggacggaaccttcacaaatactattagtaaccagcttacagaacactactttgtagtagcagttctaccaacccaacattagagtgtaaaagagcgagtacccacaaccttcttttgcgtgacctcccatcattcttcaatggtggcctctgctatgtaagtcaagtaggcgtagccatttgatacctagaagcaaaaatttgttatataagcttatagattcaatttatgtacgttgcacagcaacaatgaccaattaatgagtaaaaaactatgtttatgttcaaattattgtgtctaaaccacttactaataagattaacttcttaaaattattgtttttcagttccacatgcgtgcaacaggtagtaccccaagaaaattcccaggcaaggtctatgaaacttggtgaattgcatttgaccacgagaccataagtctgcgtgctcacttgggggcacccacactatacaatacatcgagttagcatagagaacttatgcagagaaattttaacgctcaaaataagctactaaacctacctctgagtcaggtgcaagcatacttcggcttgacataaagaaaagtaaatcaagatacttacatatcaaggctataagaagatagccatgattaaagaccgcctagtcggtctcacaatccatgataaaaagcaacagggctaaacaatagtaatgttcaaaaatagagtgcctataggccaagagtacgaagatgaaagccttggggctgaaaataagtagggttcaaaaagtaaaaggcccataggccatacagaacatgaaaacaacgtttatactataaaaccataaagttgaattactaataagctgaaactacatgtgtgtaggtgtaggtggggttgaattggaacctgcaaagtctagatcactagagtgtgggccaaccatagcctacataagctggctggccaccaagtcaaggccctggccagccacctcctaagcaggtgggtcagccatctcttcatca

SEQ ID NO: 97793 - DNA, 558 bp, Cannabis sativa
aaaaaaaaaaagacatacatatataatttaaaatttatttgagaaagcaatatagaaattaaagagtactgctatgagttattgtgatatctctagcaccttatgacacgttattttataattagttataagcagttttttataatttttattaaattaaaataaatagtatctaatattaaattgtattagtaacaagtagacaccataaaggtcttttaacatttctcatctaaaaaacatttgtgattaagctaatttgttctattatcaagatagcgatcgaataggcgagggcactttggtaaatactaaatattcttctttgaaatgtttttggaagcaagtaaaagctattggtctttcatgtattgaaaaagagcaaaattaaacgacagaaaaattagagaggcttatatatatcaactatgatcatcgactcatcattatcgatacattttaatttactaggtgattgttacgtgccaagccacgtagtgttagttttatttaatattttagttttttattttaattaataattaaaatagtataatt

SEQ ID NO: 97794 - DNA, 1130 bp, Cannabis sativa
cctcagaacaagtgggtagagagagaaagttctggaaaggggtttgggtttgaaggagagaagagaagaatgggtgttgatgttgatatcttgtgggtgtacagaagaggtggcgtatgatagcatgagggaagaagatgttgttgttgttgtggttgtagtacaggtcgccattgttgaaagaaagagctctctctctctctctctctgttgtgtttagtgtttgtgaaaatgaagaagatgaagattttggtagaaatgttatctatccataaaaaaaaattggagataagaagagagaggcttttttcttgtctatagtacagcactctttcactatttaaggttttatataccatttttatggtatatagtacaatattctcaacaaataaatcatttttaacataaataaattcaataaataaaaaattaaaaaaaaaaatacgacataagaccatctccaataatattttttaaacacacgacttgaaaaatgagatttgggtgtttataaaatactcaatttaattcaattcgcattattcaatttaatatgcaaagtgtgcacttgtgcagattggattggattgaaaaataaaaaatttacacttgtataaattaaatgttgattgacatataaatataacgatcaaatctaattcacatatatttatatatatatataaaaatttatatatatatatagttgtgttgtgggaaaaataattatagttatgtttgagaaaaaacagctacataaaagtatagaaaaaagttgaacagagtgtttggtaaattataaattttaaagtgttgtgagttgttaaaattctattatattgatattgataatgttataatctagttgattacaattacaaacatataaaaacttatgttatataaaatttttagattttttttatatttttaattattttcttctaaaagtataaattcagatgcatttgataaaataaattatattatatttttattacatgtaaaaaaattaaaaattcaaatatatgaaaaactctaagttggtgtggaatattaataataaaaatataaaatataaaatattttttcaaaacaaaataaaaaaaaaaagaatatttaaatat

SEQ ID NO: 97795 - DNA, 977 bp, Cannabis sativa
aagtgtatttttaacgaccttaaaagttcagagggcaaaaatcctaattagcctaacataaataatgttgactaattatatagaattctaataacgtgacacctcaacaactatatcttattatcaaataaattacttactaactaattgaaaaaggaaactggctatttcatttcataaatgtaccattttcttccataaatgtaccattttgttgttgaaggaatttttacaacaccaaaaataaataataacaataataaataaggaatatacgcgagtactcaacctaaaatggcgagtatttgaatcattagcacaaaatactttagcaaaaactggaaataaaatgaacacaacagagtatagtagttcagccagatcacggtatgcttaatccactattgcaaggatttctctcttatttatttcacggcggatcactcatttatatacaaagcaagtgtcctatcatttacacaaggattgaattcattatcaatccgttcatacattgaattacaataattaaaccaaaaaacgtaaacataataaatgaagaacaatttccagtttaattcactaaatacagcaacgtatgcgacttttatagtgcgagttggctgttcatattcttgcataaccttgcaggcttaggatgcattcgagattagtcgagtctaggatgtctgcgtcctcttggagttgcttatatcgacatcttataacaagctgataaaactaagacatgggaatctatatcagtttatccgggcagttgggtctatgggaccagctcgtaatatggagaattgatctctatgtttttgcaggaggatcacggtgatactcgcatatatcctgatgtatgcgagtttagaatcgttccatggtcctacataatgtgagccatacgaatgcgattagactcggtcatattcgcatcatctcgttgagtctggtttaggcgaggttcg

SEQ ID NO: 97796 - DNA, 1030 bp, Cannabis sativa
tatatatataaaagagaaatataagacggtaacgtgacactctaaaatggcttacaatctgtttatctatttttttctaattatttaaaatctatttatctattttctacttttttctaattatttaaaatttaaaattcatctattttcttacttttttctaattttttttttaatttttctaattttttaaataaaaaccatagtattttttttttttttttttgaaactttataaatatctaacaactaagtttaaaaaaaattaaaaattaaaaaaaatctatctatctatatatttatatacaattaaaaattagtcaatatatttttatctaattctctcaattaagattaataaaatatatttatatacaatatataccaaaactattaaaactaacaataaatttaattgtatctcaaataaaagacttataaatcgtgtaattcaagatcattttttttttttaaaaaattataaatatctaacaactaagttttaaaaaaaataaaaattaaaaaaaaaatgtatctatctatctatctattctatataaaatgtgattttgtaataaaatttttggtttaatagaatattcttggagacataccgacttttcttttatatcgacaacttcaaattattcatgatttattcattagcctcaattttctattagtatttataatacaatagattactaattattgtcaatattctctctatttttttttctattatatatagtctcttaatctttctttgatcactcttcaaaatatttctcaataatttggaagagcaatttgcagtgaaattcctttatgttttaatttttatacatttaaccccttatttttttggtggcaaaaccctcttatgttttaatttttatacacttaactcctttatcttttttttttttgtgtgtggtaaaatctccttatgttttaatttttatacacttaacccccttattttttattttttggtggcaaaacccccttaagatcggaagagcggttc

SEQ ID NO: 97797 - DNA, 533 bp, Cannabis sativa
gttgatggagcttgattatttggaaaattaattacatgtaccatataactcgacgaaatgaaagatatggagcacgctcaacttattggaaaaaataagatgtgggaatgattttatatttaacctgctagtttttgcccctataaaagaaaggttaatataacattgaaatgacaagtccctttttttatgattgaggagataattggttttgccttaaccgcgaggctttatgtaataattgaatttgggttaaagacttctattcaagtaaagttgtggtgtaataattaagatgctctttatatagcctcaaatctcatgttccacaagaaaacttagcacatttagattgattgtcattttgttcgtgaaaaaattcaacaaggcctgatctccatagaaaatgtgaagatcaaagaacaatgaaaagatatttttacaaagactttgaatgggttgcgggttgattatcttagtaacatgttggacatgattaacatctatgatccagcttgagggggtgtgttaga

SEQ ID NO: 97798 - DNA, 830 bp, Cannabis sativa
ttcagctgtgttcttgcacaacactcctaataaaaatactcttaattgtaattcatttttctggataattatttatttgtaaaataattttacatatgtatactaactatataatttactattaacctcttttcatatacagtaccaaactactcagctaacaggagagtagttttcttggataaagcacacactaaattatagtcagattcaacttctacatctaagaaacccaaacgggagcaaagaagcaacccctgcaaagtcgccatggcttcaactatcgggacaacaaagcctggattggcactgtcataaaagcaagagatgttggatcttattttactagaatcttatttactaattatgtatattgattataattaataacataatctaacatcataaatatacttttacataatacaacgaattaaacacataaagaatataatccttacactgagatggcagcagaatataatattggctcttatgttctaacactctaacctttaatttatttttgtagcaaggttttaaaaaaaataagtgtagaatagaatgtggatattctttctctgagttgttaattgagatctacacaatctttcacaatttcttgagtaccaccttcacaagtgtgggctaatactcgaaattgagagagcgagcttttctgtctcaggtttagttgtctgatggcttatttactaagtcctcttctatttctatttacaaccaaaagttaggtttatgtttccataatatattattattttttaattaagaaaataaattaattattctatttaccaataaaagactat

SEQ ID NO: 97799 - DNA, 876 bp, Cannabis sativa
tcaggtcccagtctggttccatttatggtgccgggtcacaagctgggtcctaggttcaagttaaggtctgggacaggtcttaggtctcggtcctagttatgtttcctaggtccctatcctgattctagatccaggtcgcagttattgtggggttttaggttccggtctaagtttgggttcgagtcctagtctcagttcggtttgatctgggttcgggtttgggtttaggtccttgtcttggtcgtagtcctagttcggttctagttccatttgcaattgtgagttcgagtttgggtttgagtttggttcggagttggagtgttggtctgagtttgggtttgggtccggatttaagcctaggtctagatcaggctccgggtgggggttcgcgtcctgggtcttagtcgatgttgggtccgagtccgaagttccaatcccaatctgagtctgtattcagttttgggtttaagtccttggttctgatccttgtctgggttcgagtttgggtccgggtcttggtctagctttgggtctgattctaggtgtgggtgtttgagttcgggtgcgagtctgtgttcgggtttgtgtccaggtccggaccccgatatgggtcttggttgggtcccgagtgggggtccaagtttgggtctaggtcaggatctcggtccagatctaggtccagcattttgatccgagtcttggtcttggtccgagtctaggttcgtattcggatccctatcttggtccaagtcagtgtttgggatcgggtccaagatttaggtccaggtctgggtcttagttctgttatggttacacgactgtgtgcgggcctgagttcgagtttcagtttgggtctgaggctaggtctgtgttcgg

SEQ ID NO: 97800 - DNA, 617 bp, Cannabis sativa
  modified_base (577)..(592): a, c, t, g, unknown or other
taaaaagttaagaaaatgtattatttttatttaaagaaataaaaattaattagattttaaataaatatttttattaaaattaatgtaatatattttatgttgaaatattttgtttggatttaattttatttgtgtttgattgagaaaatagtatttgaaaaagaaagaaatcaaatataaaatgtggcaaaaagatggcccaaaacatgaaaaaatagcatttttgaagcccaagaaagcagcccattcgacccattttctccctctccagctaacacagggccacgtggcgccttcggattaacgcatcagccacaggccccacgccagccccttgtctccctctctcccttccaagcgcgcgtgaggcgcacggccaggggttttctacccaatttcccttcaacctccataagtcaacttgctcatcttttacagccatttaaatggtgacacgtggcactgcctcatacaaagcaaccaatcaacgggtgccacttgtcactccagttttaaccattattatttatatttttacccgcatacaatttataataaatttaagggtaaataccannnnnnnnnnnnnnnnttgcaaaagttacagattggaccct

SEQ ID NO: 97801 - DNA, 1690 bp, Cannabis sativa
aacaatatatctaaaactaatccaactttcaagaccaacccaatcttttttatcaattggagccttaagaattcccttaatggagaaaagggtttgacccttgcatggtccattgaacaccatagagcttgcatagtatgtcccttttgggatcaaaacaacacctcttccactatatgcacaagcttgcttccatacatcaacaaatgcctataacaaacatatatataaatatattaataagctttgttttaagatacaatacataacaaaattttacaataaatttcattgaaatgggtgtactgatatatttttatctgtttcagtatctaaaaaaatatttagttcaatttttttttatggacgtacacgttatagttatttaagacatcctgcaagattttgagaaattcaaaaaaaaattaacacgctaaaaataggattcggtttgaacattgaattctatattgtaaattattctgaatatgttaaaattttacaagatgtcttaaataattacaatatacacgactataaaaaaaaataaactaaaaaattattctatcttgattgtaccagtattgtaaaaataccctaacaaatatatatatacctatatatatacataactatatagcactaataatgaacaaatgaagaagaacaaaattattattattaccttgctattatcagtttttccatcagcaacagcaccaaaattgatcacattgaaaactttattatcagattggactttggtgattatcactaaccatgaaattaagaataatgtgaagtgaccaactaatgttgaacccattttatttagctttcaaaatatatattatatttataaatgtaaaatgtttttcaggtttctaagttgttaggcttaatttgtgttgtagtgttagtgtattacatttatatataatgttttatgtgaacaaaataggaatgtcttaaaatcataaaatccttttttttaatacaaaaaatcaatttgatatctaattagcttttctaagatagaaagagtatccactaatatttaatgtatttcaagtaattagagtatagcattaatttgagatttttaaccaatataattatgacacatcaattaaatctaattttagtaaaatttgctccccaaaactaagtttcctttattgctaaacaatttttttgctacaaaataatgttcaagataaatcaagtcaactaaaaaataaatcaaaattattgtaattactacaaactaaaagaaaatcagacttgcaaaataaattaagtggattttttatttataaactaaatcagaatgattaaccatttgtttttaaaaaaataaatcataagagtatttaaacgtaattattttattctttgaaaaaaaaaaacacaaaaaaaaaaaaaacataatacacacaatattcataaaaacatgaatatatattcacttcaaaaaaagaaactcataaaaaaaatcattagcacatattctaactaaaacatgcaatgcttacatttatttatataaaaaacacatataagaataaaccctcaataaaaaaattaaaacaaaaactagctatgaaataaattaaaaaaaaaaaggctaattaagatttttgatccctgaactttgacatataccaaatcatgcttcctgaacttttaa

SEQ ID NO: 97802 - DNA, 641 bp, Cannabis sativa
aaatcacatgattgggagagaaagaatttcacatctccttttttatcttaatctttcttctataaacaataaattactacttgaagaaattttcaatagtcgcttaatctttcaatcatctaacatcactgatctcactgctcatgtagtagtttttggcttcaaatccacatgtccatcttcaccctttaatacattaaccacctatattgatttggtcaaaaagataaaaagtgcagaatctatcaatcttggcttgttttggatacggaaaaattaagctaacttgaaagtgaaaaattaggctaacctaattcatatacatgtgtttagaagattgatggtgaatgcacatcaaaatatcccactatattttctgactacatttaaaaataaaactaatataaaaaaaatatcttacttctaaaaaatttaaaatattttcacacaacataaattaaataattttagttaaaaaaataaaacaaataaagatactatataaaaaaagatgcaatctaataaaagaacattttaatcttatgtttaaagacttggatatgtttattctcttcactattaattgataaatatattaattattttttattatgttcactcatcttttgaagctcaaaaga

SEQ ID NO: 97803 - DNA, 570 bp, Cannabis sativa
cttaaatatgtcaattcattaatcccatatatgtcaattcattaatcacgttcaccgtagcttcaagcccctgataaattttgtaattagatttgtcaatgtatttctacaacttcgttcaatatttgtcttaatggaggaacagttagtagctttgtctttgagtgtggcataagacgaaaaaaaccatcctcttatctcgttatttgggttgctaatatcctctggagtattctcgagaatacttttagaggttaaaagagcttatctatgcagtttgatctaaaagaattcaatctatgagattgcaatttaagattgtgcaaaagctaactttatcattgagctttgatatatttatatacagggtgacacaaagaagaacagggcaacagaaaaaataagagaaaggcaagaaaattaaagctgctacaagagtcggttaatacaaacaaataacggtattaactaactaagggcagtttagtaatagtagtagttgtatcagaggtgtgcataaatcaaccaattcaatgacaaacgactaatccaattacaaacgaccgatcc

SEQ ID NO: 97804 - DNA, 539 bp, Cannabis sativa
  modified_base (277)..(280): a, c, t, g, unknown or other
agaataacaaaaaaaaaacagtagaatgtgagaaaccagttagtaaaataactaaaataaaaacaaacaaataaaaactagattcttgatataatcaaataaaaaattaaaacttaaaactcaattatgaacaacaataaaaaaaaaaaacaaggtatgaaaactagttattaaaaaaaaacaagttatgaaaataataaaataatatgtgtgtcaaaaattaattagcatcctatatatgatatataattttattagcatcctatatatttttatnnnnatttgttgttattattatatatatttctattgtaagatatatattttatgttatatagtatatgagttttattgtatagtatatcattttatactatagataatgcatgtttagtttttattttagcatacataaatgtgatatatgattttgttaatatgatatatatataatttttttaataatattatcttattcaaaaaaaattatattattttgtttattcaaaaaaaaaaattatattattttgttttatttt

SEQ ID NO: 97805 - DNA, 1178 bp, Cannabis sativa
  modified_base (61)..(65): a, c, t, g, unknown or other
  modified_base (1111)..(1152): a, c, t, g, unknown or other
aaatcaaccactagaaaaaaaaaacatgttagtttgaactttatattttttaaatagtcannnnnattatatgatatataaatatataacaaaaacatacaaagaaaaaaaaccctcttaatctggtcggtcaggttagttcgggttaaagattgggcgggttatattttcgtcgggtttttcgatttgtattttttgtcgagttacttcggtttggtttagacaggttattcggtttgcgcggtttatgaaaaattatgtagagacctacataaaatgtagagataattgtattgtatacccacttttcattacctcatttaacttttagctttcttttcctattatttaatttatacccacttttattagttaaatcccaataatacccttaggtatgaaacaaacaattcgattatcctcttgagaacgcctctactaccacgacaatcgaccatacctcgccacctttgttcctcctaatccaacacgatcgacgatcggcaccgtgcgtaccttcgtttccattccctccgtccttcatcactacgatcggtgattccagccctcctgtgatcggattgttgagcccgagtttagattctgcccatttttcgattcttctctctgaactttttgtatctggttaattacaacattaaaaagaaaaaaaaaattgactttatataagtgtgtatatctataacacagggagatcctaaatttatcatattagctatatattatatatatagttacctttaattaaatcatatgtataaaatgtttgtcttttgcacaccttaaaaattgcaaagttgaatcaatggtacagaaaagtaattagctaaacgtgctcatgatttcgccatatgcatgcaaccactacaaacaaattttaaaccaactgaaactaatccagaaatatttaaagctctcactgttgagattgcaactgttgaggtctagtgttgatggtggtgatggaggaggcatagacggacgaaggctgacagtggcggaggaggcagagacaaacgactgctggcagtggcagaggagttaggaaaacgatagcattagtgaactctctgttggaaattattttacnnnnnnnnnnnnnnnnnnnnnnnnnnnnnnnnnnnnnnnnnnaaatatgaactttctaaaacgatgca

SEQ ID NO: 97806 - DNA, 2331 bp, Cannabis sativa
tattgcattgtattgtattagtattatttaatacaattttatgtttggtattgacttgtatttagattatgtaaagttataatatattttcaatatactcaaccccaacaccgactacggtctgggtcctgggtctaagtctggatcccaggttcgggaccgagtctgggtttgggtccgggtccggatctgggtctaggtctaagttcgagtctaagtctaggtcttaagtccaggtttggagctcggggtccgagtttgagatcgggtccgggttcgggaccagatttgagatccaaatcttggtaccggtccaattcgaggtccgagtccaggattgggaccaggtttgggcccgagacctttttttttgcaaaaggtcaaataaagtatggaatatctatttttgcactcttactttggtagcaaaattatagggttttcgcctgtgatgtgtacaatacaaactagatggacatgaaccaatgactccttggcgactcattagtactcaatggagtaatggcaataattaaattattaaaagacacaagcagtgtataatttctccacaagatatttgtattattattagtatatttaaatactatttttatatttctttcaaataaaaaaaaataccaattttatatagtttaatttaataattattaacatacgtacaccactttgtgatggtacctaacaatgctccttttatgcaaacatggtgtataagagttgtatccaagtagtacaaaacatgcatgaagaaaatatgaacaaaccatacatatctccaatactttagggagaatttccaatgttttcttatttgtgtctctttcagaatttgattaaaacattggaaaattatttaaattgacactgaaaacaaacaaataatatgatgaacattggtctacactaaagtaccaaaattatcttagtacagagttggcctaaaaaggacagtggcaattaaaaccaagttgcccgttttgtggtcttatcaagatcatcttctttgtgtatcgtatggtacagccaaaaccatattatatattcaatgcaactttaaatgtcagagagaagaaaataaatgcaaaacaggcattcacagctctgatataaaacatataaactaatgggattttgcagtgagttatgattagactacacctatccatttaatccaacataatggccttggaatggctcacttcaggtgcttcaatttaatcaccaccagaaagggacacacacccttttggcagtgctctcatttcatcataatcttgaatgagaataataataaagatgcccatgaaaacaggttagaccaagccaaactagctacaattgtatttttctaagattttaaagccaatatgatttcacttgctgatgttgaagaacaggtggctggtaatgttaccaactatgtacaaaagaaaatatgctttgttgggtctcttcttaccttttcctttccaaattttgtttactttcccttgcaaaaggggaaagtggtggaccagatttagccaacttgcccatgttaagtgtcaactaaatcaaaccattgtacccaacaacagcaactaccttgattccgataaaaaacacaactacctcgaatgctctgttaaaattacagagctaagcattctaataggcaatataagtaaatatcgacatgatatccatatcgaaaagttcactaatagacatcaactttctccagaatttatggagcttgcttctgaaagcactagggtgactgggcaatgatcacttccatagaaacctatccaaagaagacactaaaatcagtcatatatattagtgggagaaacataacaaataattcttctgacatgttaagaagacacaacacttgtattttgctactttttaaagggttattagctttagggtgaaacatttcaggattatctactaaattcagtcattattgtttcattaagacacttttctcagaaattgagttatccataagattttggttcagcataataaatggtctccacaaactttgggagtggattatctacttgggatattagtttcaagttgttaattactcaagaaaactcataagaatgaacaatatacaccccagacctgtggtttacccctacaaaatttgagaataggatccctactgagtacctacgtagcaattaatataatttgctattcctcaagttgggcgagaagctcggtttacaaaaacaaagcatcgacaaagaacaataccttgtaactcaatgccttttccatgcatctcacatgcaagaatcctgt

SEQ ID NO: 97807 - DNA, 536 bp, Cannabis sativa
  modified_base (482)..(483): a, c, t, g, unknown or other
tttatttatttaaaataaactaaaatctgatacaatatttaattttaccccaattaataattttattatttaattatataaaataaagtaaaatctgatacaatatttaacttcacttcaattgattattttattatttatttacttaaataaagtaaaatctcataaaaaaaatgaaatgttaaaaagtatttttcccaacggtttataactgttgggaatacttagtattcccaacagttatattagtattcccaatagttataaattgttggcatttttttttatatttcatttagtattggccacagttttccaccgttggcattagtttttcccaacggtttatttgcttcagctctaaaccgttgggaaattttttgttgatattttccaacggtttttataattgactctcttattaacagttgggaaaaggcttttttgtagtagtgtcccttccaatatatactccatacatnngatactggtaaactttaccaattccctgaaaagaacataacacttatctaagg

SEQ ID NO: 97808 - DNA, 579 bp, Cannabis sativa
tatactatttacaatactcgcatatattatacactatattctttgagtactcgctattctaagggagtactcacatttttattttttagtatccaagcaacctcataaatactcacacaaaattagtgttgtctaaattcctccgacaacaataagctttggacatatcaagtttaagcccaaaaaaatcttccaatccttgattcttcttaaaagagtccatagtctcatggataatgatacaattcttggcaatccatcaacctgagattaaagactaattaaaaaaggctagatcaaagatggcaagctaatcttcaatctgttggcaatgatcttcatgattatcttataagtgaaattacaaagacttataggccaaaagtcattaagaccttgagaaccaggtttcttaggattgagaacaatgaatttttgattggaagtcttcacaaattccaaatttagaaagaagtgaatagtagtataatgacgtcttggtcgatgatgtccgaatgcgctataccatcagacttgagagttttaatgtaacaccctaactaatttaggcgtattacg

SEQ ID NO: 97809 - DNA, 1638 bp, Cannabis sativa
aagttcatattcaggatgttaaataacatacttattagtaaatctaagatcctggtaaaatatttccaacaatgagtcctccactatgtttcgaaaaacactttagctttggcaatgtttgtaacctgaaaaaaattattgtacggtctcaagcaatctccaagagcttggtttgaatgatttgttaaggtactaaagcttcatgggtacatacaaagtcaatccgatcatactatgttctgcaaacactcaacagaaggaaaggtagccattcttatagtatatgttgatgagattatactaattggtgatgattcttatgagttagagagtttaaaagaaaagcttcgtggagaatttaaaattaaagatttgggtgttttaaaacactttcttggattggaatttgctcgatccaaagcttgtatttttgtaagtcagcgtaagtatgttctgaattaatttattaagggagacatgtatgctaggttgcaaacctacttaaacgcatattgaacccaacatcaaactacaacctacatagtcagttaatgtgaaggataggagcgttatcagagatttgttgaaagacttatttatttatctcacactcgtccttatataacattttctatgagtatggttagtcaatttatgcattcaccatgttcagaacactttgatgttgtttgtaaaattctaagatatctcaaagggaaatcaggaagaggcctcttattcaaagtacaggggcatttaaaaatcgaagcctatactaatgttgattgggttggaagcattatagatcaacggtctacctcaggctactacacgtttgtaaatggtaatttggtcacatggcacagtaagatgcagaatattgtagcgagaagtagcagtgaagctgagtttagggcagtggctcatggtatatgtgaaattttgtggataaggagattacttgaagagctaaagtcattataagtatcacctacaaatataaactgcgataattaagctacaattctaattgctcaaaatctggtgcttcatggtcgaattaagcatgttgaagtggaaaataacttcatcatagaaaaaataaaaacctgatatgtcttgcactgcgaaccccaagaagtttcttaatgctaatactttctatttcgttgagccctagactatgaggagaacaacgggtctctaccgactctcccccaagcagagaataggcatgtcgactcactcgcatatattgcttcaatgctgggggaatccgaagcccgaacaatcccgatcgagttctaacctgagccaagcatagaaaactgaccttgaaagctagagatgagatataggctagctaaattccctaaaatttgtgtacaaaaggttcgcgatcctgggcagtacatggataacatgactcagtaagtgcttaggaacgtgtggtgaaggcagaatagagtttctcgttgaaatgaggacttttggtgtaaccaagtttgaaggggtggaatgctaacaaactagggctacaacacttatttatcccgaagatcctccaaattagatgtggaaaaaggatgaaaaatcttgatggggtttggatttgaaggtgggttggaccctttactg

SEQ ID NO: 97810 - DNA, 833 bp, Cannabis sativa
aatatatgaagtattgaagcattattactgcttataagttatatatgtagtcggtgaaactaatattacttgattaataatattcatcgaaagtgcatggagattattgttaaggtaattggtaatcatcccatcataatattcatatgtatataggtgtaaaaagtatggtccactgtcaaaaagaacaagaagatgaagacgtgaatttggtccaatcaccatgaagtaaattatagcttagtacacgtttatatgtagcttgacaaaataaatgaaagtgaaaaaaatagtaaagctagcaacgttttgtaacatttttattttttaattttttaataaaatttttattttaataaccacttataatatatattataagggggcattattttatctttctaacaaaaccaaatttgcaaataaagtgtttttttttttcggcttaatttgacaaaagaaaagtacttgtaaggacaaatccatgctactttcagtgaaatgttatggacatattaattaattaattaattagctagctaggacggccggctcattaatcaaaaccctaatttaaatttgtggattccaacctatttatattggtcatcatagcctcatcagcatgctctatagtacaatgcagatttatttaatttgttcatgtaaaaacatataaaggatttgtactattttgagcgtattattattgttgaaatataaaaaaggaatattgatattgagcttaaaattggtcaataatatattaaaaaaaaattatttgaacaatccttgggatcctgtatagattattgcgaacgagtttgtgagga

SEQ ID NO: 97811 - DNA, 1499 bp, Cannabis sativa
atacgacacgtcgtttaatcaattatgaacacacttattgaacagagatgaagtcttccatacacgtagatatagtagagacgtagagtgagattatataagtatagttgaaattaaaatatgttcctatgtatcagaccaattcgatgaatgatataaaatttgtgtgaaatgctaattagaaattttgccttttaaattttgatatatatcaagttatgttcctgaacttttaaggtcgttaaaaatgttccctgaacggttaagtgcaggtcagtactcatgtggaagtatctcattgatccacgtcattattttttattttaatttttattttaaattattaaaaaaaattaaaaattaaataaaaacatcatttattaatgttaacatcgcttttagctaacgactgtcgtattaattaaaaacgattgataatagttaaagaacagaaagcaaaaattataaagtaaagaaaacaccagatttataaaggttcgacgaagttggtaatagcctattctcctttttattgaattaacttaggagatgaagaatgaagtattatctcttgaaagctcttacaatgatctctgagcaaattactcttagattgtgatttctctttgaattatttcgtgtccctgaataatagagatgagaccactatttataggagtcaattacatgagattggtttcccttgaacaataagaaataaaatgggaaattagtctatttccataattacaatgaaaaaaataggaaacctgggttgattgcctttattttttgaagatacgaactaatcccacaaatgtagggattgtaccgtgatttgcaagttagagatatacgagatacatcttagattttgtcgactcacactccttggtcggtgtatgcgagctacctgcttagtgaagctagtcggatgcctgtccacgatttgttcggacatcctaccacctgcgagtgactttgagactcataacagcctatacaacctactaggagtagaatcattcgcccagtttatggaatatgttacacgtgtcaccttaggtgaatgccacaccatagtgcaaaaattaggataacattttcccctaagtccgcgcgggatcttcttggtcgcacgtggacttattcgactaggaagctgtccaaatgggtgacacgtgtctggttgtcatctttgatctgatgtgacttgatcaaaggtctcttcggtgtctggggcattaaatacctcttgaaagttgtacctcgaatcatgcactgacggttgagtgacagctgtactatttgtaatgagtactaacgttcacttttgggggaaaaacccaaatcttcgaattttaaatgaattaattaccattttaagatgcatttaaaatagattaaagcttttagggaattctatttgtaaggccctaaataattaggcacgctacccaatatacttatggaatcctaatcccctaattcgggattac

SEQ ID NO: 97812 - DNA, 889 bp, Cannabis sativa
  modified_base (442)..(442): a, c, t, g, unknown or other
  modified_base (492)..(497): a, c, t, g, unknown or other
aatgtgatgcaaatccaagtggggcccaataacacccatggcctgccacttgtgcatgcattttccaattattattttcattattttaataccaattaattaataacctaaacctagcagttgtctataaatagaaagtgaaggctcacaccaaaagatgcagtgaagcattcaggaaactgaaaatttgagccttcccttttctctctatagccgaaccatatagctcttctcttgctcttccaattttgaataccctagtgaaaagagtagtgcccacacacagcaaacagaacctcaatcatagtttggaagattgtgaaggatccaactccaagagaaggacatttagactcagatcttgattatactctgcaacagaaaggatacaacggtcagagatctgagtagaaggagacatattattctgctgcacccaatntaaggtttctcatactttatgtatttatttattatcgttttagaaagttnnnnnntaggatgttaatcaacatactcgtgagtagatctaagatcctggtaaaattaattctaacacactattccttgtaccattgggagaattgaaggaataaatgcactatgtgatttgggagccaatattaacttgatgcctctgtttgtttttaaaagattgcagtcgggagaagcaaagccaacattggtaattctacaattggcggatcgatcactagctcatcctaggggagttattcaggatgtgttagtcaaggttgacaagttcatctttccaactgattttattcttctggatatggaagaagataacaatgtcccaatcatacttgggagaccattcttggcaactgaccaagctttgatcaatgttcagaaaggtgaattaaag

SEQ ID NO: 97813 - DNA, 511 bp, Cannabis sativa
tataaatgaaattaaataaaaatttataataatattgcatgacgaaagaaaattatgataagaagatttgaaaagaatataattttaagaagttgaagaaaattaattttagtgtgacaataaaatgattatgaatgtgatcttgcaactaacaaaagaatcattaatagattttttattgacattcaatgaaaaattcatcattaaattcaatttacatttatgtatatatggtcgtgagttgtggatacatatagaacttatatatatttatatttatatatttttttataaacgtgtaacacgattatatgtaatttttttttaatcaataacaataaccacaaataaaaacctattaattaataaaaaaaaagtgaaaacattcatttgcattttcataattatcaaacttggactattcaaaataaattaagttttttttaataataaagtacattaaattatattttaccaataaaaatgaagttattttagaaaaaaaaaaaaa

SEQ ID NO: 97814 - DNA, 572 bp, Cannabis sativa
taggttgtcattactcaatttttattgaaaaatctttgaataatttttattaaaaggtgtgatttgtcacatatttattcggattgaagatctaacattctttgcacttttttaaagcttcaccactggcagcttattattttttagttgaaggtgttattagaggtttctttccaattattgtaaacggtttgatttgcgtacttattgattctggtctatgagcgatatcatgatgtaatgaattttgtctgatttgactattaatgataatttttttaaaaaaagtattcacatctttatttttttatgaatataatttacaaatttgattaaataaacataaattatatttgtattaatcaatttatttgtattagttttataaattatatttataaaaaaataaatataatgcttaaatgtatttctatctttttatataaactcttgactttaaaataagcagtgatttttgtatggttaaaacttggttgtggatttaaccacttgaggctagctcaagtggccataggtggatgtgtgtgtttggaggtcctgggttcgagtcc

SEQ ID NO: 97815 - DNA, 4476 bp, Cannabis sativa
tttgagtttggatttaaggtagataaacctatctttagacaaaggcttggtgagtaagtccgcgacttgatctatgcttggtacaaaacgaacagagaggtgcttgtccagaatttgatccctgacaaaatgtaagtcaatttcaatatgcttagaacgagcatggaagaccgaatttgctgcaagtgcagcagcactctggttatccacccagataacagggcattgagaacaagtaatgtgcagttcagagagcagtgaaacaatccatttaatttcagctgcagtgttggccaaagcacgaaattcactttcagtgctggaccgtgcaactacttgttgctttttagcagaccagctgatcaaactatcacccaaatagaccagatatcccccagttgaacgtcgatcatcaatgcacggcccagtcagcatcagagtaactggtgacagtgagagaagttgctggtttgatcaatagtccctctgagatggttcctttcagatatcttaacaaacgtttacaagcttcccagtgagaagttgttggagctttcagaaattgacttaatttgttaatgacaaaagctacatcaggccgtgtgagtgtaagatactgaagtgcaccaatgatacttcggtataatgttggatcatcaaataactctgcatcagtaagtgataattttgaagagctgcttatgggagttgaacatattttagcaccttccatgtgaactcgtgacaaaagatcagagatgtactttgtttgggacaaatacattccttgagtatcacgatggatttcaacacctagaaagtaatgtacttctcctagatctttgagagaaaattctctgttaagatcagtgactaactgtgaaatgagagaggtgttggggcctgtcaccaatatatcatcaacatacacgaggagaatgagaagagtgttaccacggccatagacaaataatgatgtatcagattttgagcattgaaaaccccactgaactagccatgttcgtagtttgtcattccaggctcgaggggcctgtttcaggccataaagagctttatggagaagacagacatggtctggtttagtttcatcgacaaaacctggtggctgttgcataaacacagtttcagacaaggtgccattgaggaatgcattactcacatccaattgagtaactttccagtttccagtgacagcaagagtgagtacagttcgaactgtaacaggtttcacaacaggtgaaaatgtttcctcgtaatcaattccaggagcttgtagatatccttttgctacaagcctggatttaaagcgatctagagaaccatcggcattgagctttatgcgatgtacccatttgttcccaatgatgtgcattccctgttggtaagggacaagtgtccaagtacctgccttcttcaatgcaaagaactcagtttgcatggagttgaaccacttcggatctttaagagcagcctgcagagatctaggttcagatggtaagagggattcaggcaagggatgttttgttgctaaataagctttaggttttacaataccatttttagacctggtaaccataggatgggaatttgtgataggtgaagagtcgacagaaagagagcctggtaaattttggacagtagttgtgtgagaagtacctgtaggttgggattgtgtttgatttaatggtggtacttgggagtcaggtacaaacaggggatgggaagtaggtggtgtgttggatggctgatttggtaaaatctcagcaggctcagacatagcagtgggaacatgaggttcaacagcaggaggagcaacaacattcgaagtagcagcaacaacactcgaagtagcagcaccagcattcgaagtagcaacagggacattagaacaagtaggaataacacttggattagatgtgcagaaagttgcagtgggaaaatactgagtgttatggttagaatgtacctgagtgtctgtagtgatgtgagaattgccaggatagtgttgttcattgaaaatgacatgccttgcaatgtaaatacgaccctggctattttcacaaatatatcctttgtgagcaggggaatagccaaggaagagacattgctgtgatctgaagtcgagtttgtgggagttgtatggtctgagatgaggaaagcaggcacacccgaagctcttcaaaattgtgtagtcaggtttgtctttaaataggcattggtatggactaatgccttgtaaaatgggagtaggaagtctgttgattatgaatgttgcagagtgaaaagcatgccaccagtacttcagactgagattggcttgtgctagcaaagttaggccagtctctgtgatatgcctgtgcttcctctctgccctcccattttgttggtgagtatgagggcaagggtgagaaaataatatcccctgatcagccaagaatcgagcaaatggcttgtattctccaccaccatcagcctgtacacttttaataggcaaaccaaactgtttttctaccatgcttttaaaggtaatgaatttgtcaaatgcttgagatttggttgtgagtggataaatccatgtaaacctactgtaatcatctaaaaaatgaatgtaatatctgaatccatctttagatggttcatggctaggaccccataggtcagtatgtatcaactctaagggttgactggctcgaaattgagatgcagaaaaagagagtcgatgactcttgcctagttgacatgcactgcaaaagtgaatggtttttaatgaacctgtatgtggaagagaaggtaataactgttgcaatgtagattgtgcaggatggcctaatttgcagtgccataagttgatgtcaataggtgtggaaacatgaaaaacacactggggagacagaaaagagtaagagtcatttttatttatgaaattggtattacaattgttgtctgaataggaacattcagacacattattacatttagtagtacaattgtatatgctatgagatctatcatgagtggctgtttgactgggcagatcagatttaggcaaatgagatgtatcaccaaggaggtataggccatctttaagtcttcccttgagaagaacagttcctgttgtcttgtccttgacaaagcagcagtttttatgaaattcaaagaaaatgtcattatcgttagtgagttttgaaacactaactagattctttttaattcttggaacatttaaaactgaatgcatttgtaaagggcaacaaggattgaaagaaggaacagacacagatccaatatgggaaatgcaaagtctcttaccatctccaatagctaaggattcagcgccattaaaaggggtagatgagtcaagatttgcactatcaaaagtgacatgagtggtggccccagagtcgacataccatgaactatcttcaccaaaatcttggatcatagtggtgttgtacgcctgaggatcacagtcaaattcaacatcagttaaaaaggcacgattcacagatgtacctggtttgggggtagtccagttcttatcaaaacggtaatggcacacagcagttgtatggccaatccgcatgcacacttgacagacaattctttgattggagaacttaggaggaccacggccacgaccagtgaaagaagaatggggatttggattgccagaatttgtactggcaaatggtcgaacacctccagaacgaccatttccaaatgttaagttggcctgcattttagatgaaagatcactcattgctacatgatgctcgatgcgactttcatgagagaggagaagtgcttgaacttcttcaatggttagagcatcgcttcttgatgtgatgccagaaacaactggatcaaattctggaccgaggccattaagaacttgtaaaacaagatcttgatcatccacgggtgaaccagctatggcaagagaatcggcaagattttgaactttttcaatgaactcagagatggaaaggccgcctttctggacatgggagaactgacctttgagctggaggcgtcgagcctttgtttgagaagcaaacttctgttcaagcgcacgccagacagagtgagaggttgtatagtttgcaactgatgcaagaatagattcggacatcgaggaacgaagccaagacaagaggagttggtctttcttgcgccattgaatgtaagcaggatttggagtgttgttaacgagatgttgaggtgggggaactcctgtgaacaagatctcgtcgagatcgtggccgatgacagtaggggtgacttgagatttccatgacaggaaatttgcacgatcaaggcgaaccgtgagggaagaagacaatgaattcgagaatggattccaagatccatgtgcagcggagtgtgtggcaggggcctgaggatcggaggttgacgacgacatggtcttgtgtcaagactcctgataccatgtag

SEQ ID NO: 97816 - DNA, 2079 bp, Cannabis sativa
tctatctaaatgaagtcacttgtaggatgttaaggctgttcttcacattttgagtggtttaacaatgtgttgcccatttgttaaaaattagcccagctggggtttgaacttgaacctcgtacttaataatgtgtcatgtcctgtttagttttgcagctttggttttttcttttttttttttaaggaaatattcatctgtattgatttgtatagttaaaaaaattattgccattgttttctttttcgttcactagaaaacatcatttcttagatgtatatttccttattcttcaattggtgttctaaatcatataaatttgaaatatagtttttgttttggtcatgtgtctttcaatttgctaatatcggtttgtttttgttcagattgataagccattgcagagacatggtggcaggcttgagcataatgagacatactgtggatcctgctatggtgcagaagcggtatgcttttcattacgaatctatgttgttgagatgatactatagaatgaagttttgtttatacactattggaacaacaaacgggacgatcaactgtgtatatattattgctcaatctgttaccttatccctctgtactattaaacacttttaaattattattgtaatatacgtaatcctgttttaaaattttctagtgtgaaacattcaattacaaaacataataattctgtagctatctaattgtattttgctatatttagtaaatcttttgatcatttgaaaagaaaattttattcaggttaacgaaattgactatgaatcatctagttgcaaaaattatctataccatatgttcatttcgtgtataatgttgtgctggggcttttaattatatttcaatagcagaggaaattttaatgtcattgttatttaattgtttctttgttcatctttacaagtgaacttttttatgtcattttgttaaacttggggtttttgttgtttttaaccccttcagtcagatgatgattgctgtaataattgcgaagaagtacgtgaggcataccggaagaaaggttgggcattatcaaatccagatatgattgatcaggtctgtaattgcaagtccctgagccatacatcgcaacatgagtattggaataatgctcttatgccattgcacttgtaatttgttatctttcaatttacaatcccactttctaccattgtgctacgccatgttttaaagcctaagcatgttgattctcttataaattttctgggacataagtatgtattttctagattaactatattgatttattatatagtccagcatattaaagttgtctataagattgcatatttttctccacaccaagttgtcaacttatctggttgaattcttttggctatattctctgcccctgtgagtgcctaactttacaaaattcacaaacacacatccgtcacccctaccctcatgtctatagataaaatatcatttgattggagtttatttactataattttgtaattttttttttcaagaacctataattttgtaattgataatattatgatagtagcataattgtaacatgattattatttaatttgtatatctattgttatgtttacattcagtgcaaaagagaaggtttcctacaaagaatcaaagatgaagaaggtgaagggtgtaacgtatatggattcttggaagttaataaggtcgctgggaattttcattttgcacctggaaaaagtttccaacaatcgaacattcacgtccatgatcttctatcatttcagaaagatagttttaatgtaagacatgattcatggaacttcagtttcctttttatttttgagaaaattgtgtgcttttgtattacaattaaccttcaaatatcttttaaatattttatatttggaatgctgttcttttttctactgtattttaatagtagcttccactattgcttcgttcaatgaaatttatttatgatgcatgattcagataagtcacaaaatcaatagattgacttttggggactattttcctggtgtggtgaatcctcttgatgggttagtttctctctctctctctct

SEQ ID NO: 97817 - DNA, 974 bp, Cannabis sativa
taagaaaccctaaaattaattggtaaatgtggaattttaaaattagatgagggcaattgggtcaagtgaaaaattcattaaaccaaaattttagctttacttaaaagctaaaatcacaaagctaggatgggccaacttttcctaaaagctataaattttacctaaatttttcaaaagctattttttcaattttactaaacacatattaactcataatttttttcaaaagtgattttagttttttaaaaagctcccccaaacgaggcctaagtagctcaaaagtcactattcataaatttacctatataactacataactaaattattatgaaaatgagtagaatataattagaggagatatttgcaacgatttgtataatttggtagaaatttttgtagcatagaaaagttcaagagataaaatttaacgagaatcataatttagaagcaaaaaatcctatttattcattttattatgaaaaattttaagagataatttatgacattattattggtgtaaatcaatatggaatcctacataatttgatttaattaataatagaaagttttttagttttacattttaaaataattttatttatatttttacgaaaattcacattgtaacccaaataacaattaatagagcaatccacataaaaattagtagaccaactcaaatctcaaaccataaattttaaaataaaaaaataaaaaataatatataacttaactcccctatatataatataagaaactgttaattcgcaaattaatatggtgttacaccctatataacacataataacaataattatatttatttatttatttatttttactgaaaattatatttatttatttatagtaataaccaattttggaagagttgaaagcaaggcaaaacagattcccaataactgatgacgtgtcaccaacccttttcgggcatcaagtctctctctctctctctc

SEQ ID NO: 97818 - DNA, 552 bp, Cannabis sativa
gtaagaatcatacctcagacctcatggaatgctttaaaatattaaaaaggtataacatgaagctaaaccaaaaaaaatgttcctttggagtctcatcgggaaattttttggcattcattgttaacacgaggggtattgaggaaaatcctgaaaaaaatcaaagcattaatagacatgccatcgctaacaaaacctaaggaagtacaggccctgacaggaagaatggaggcacttaacatattcatttcgaagtcaactgataaatgtgtgtcgttcttcaacatattgcgaggcaacaaaaagttcgagtgaacaaaagagtgcgaagacgcctttcagagcataaaaagacatctcgcaacgcctccagttttggcgaaaccaataactggagagacgttatttctttatttagccatctcagaagatgcgatatagagcgagaaaagagcaatcaccagaaacctatttactacgtaagtaaaaggttactaggggcagaatccaggtatccccctctagaaaaactcgcgttatgcctagtccatgcgt

SEQ ID NO: 97819 - DNA, 568 bp, Cannabis sativa
aagaatctagaccttatatgtggcatgtttaagaaaataacaaggtttgtacggatgaaattagagaaaattaggtacttataccgttaaaaataaacataaagattataccacttataaatttaaaactgtaagtacttgtggtgctatttaccttttaatatatttaaaaatatctcgaacaaatttttttaatattttttatttaacttattaaattaaaatatactcaatataaattaaaattatactaatgacaatataatagaaagtggggaatctagcactaacttcaaaaaacaaattgcttctcccatacaagtgcgtgcatagattatattcttctatctggctgggcctcttaacatattaattattaatattattatacaataattatatgtatggacatatattatatatacatatagtttataggcttagatataatgtgtaatgtgtgtatatatatatgtatggactagtgtccattatatgttatggctcatatgatttcatgttccacttatctttcattattaatcatttgttctctagaaaatatata

SEQ ID NO: 97820 - DNA, 595 bp, Cannabis sativa
gagaattttttcattgggtttcatggaatgtagatgcaatattagaaatttacatgattttcccattgaagggtgcactattttttttatcatggtttggttctattcgctgaagccgtgagtgtaagggaagctctcagttggatcaagcgacgacattaacacaatatcattttggagactgattgtttaggtgttattcaagctttgataagtaatttgtttatgatttctttgtttagtcatgttattacagattgtaagtcattacttttttatttgagaaatatttttgttctattttttaaacgatcgttgaatatgatagttcaaaaatttgctataacttgtatgttatatcctaattgtactttcagtttggagtttatttcaactgaattgttaccatgtttggtaacagaagtttatgcataataaaagtattttccattcaaaaaagttacctaaattaaaaagaaaaaaatatataatgaaaccaatcatattataactaaataaatataaaccactagatctaaaattagctagtttagaataataaactgtggaggattgaagatgttgctttattagc

SEQ ID NO: 97821 - DNA, 648 bp, Cannabis sativa
attattattattattatttatagttttaaaatataaatttatatgctaaaaaatgatttgggtccaagttattgtatttgaaatattacattaaatttatttgcatccacaggcatttaaaaatttattaagctaattcaatagtactcacctttcagctcccacccccacttgaaaaaaaaaaaaaaatacttatcacttaatctaggacacaaaaaatctccattatagttatttttaagtattttttttttctagattatttgtgtgttgttttactttttactttttttttttttctgagttgacccaatgtgttgatggttaattattttaattccatattaaagtcaggttattattcattatttgtacatggagatttagttgttcagttaagatcaaattgagtatatgtttatttgtcatggtataagtgatttgtagttgtttttgttttattgagataaattatatgttgttcttacgtcttttaggttgtcaacaaaatatattgatatttagctaacttacatattaaagctgtgttgttgtctacttatttttttaattgtacttgagttgtccaaaaaagataaacaaaatgagtatatatttagttttttagatatatttttgagtagttat

SEQ ID NO: 97822 - DNA, 753 bp, Cannabis sativa
  modified_base (463)..(467): a, c, t, g, unknown or other
gtaaaataaattccaacatcgaggccaacaaaaactaagaaattaataaaatattcctgaagggggagcatagccccagacatcagatgggtttggctctaagctctgaaccccccatagttatgattgggggtctcctcatcccgaggcaggcggtggaaggtcccggaggctgatggcttgatgcctgccaccgttacgatcttctcaagctggtggggacaagttagtgtggaatggagctcgtccgcctcccaaccgttggcacgagacttaaaattttcctgggccacgggacccttttcatgacctcttgcagggtggccagttgaactgcccccttcttggaaaacttggagctagatgcagaagcagacattttggttctgaaaaggttagaaaaatccaacagttaggcccaaaaccaaaccctaatgtttaaaaagggaatgggggtcccctnnnnnctggaaagaggcccccttcggatgcttgcaaaataagaaaatccaagagactttccttggcaagcatcgggtgcaaaaatcccaaaggcagtgacattgcaaaaagaaagagaaaaaagggaaaaaagacaaagttcagaaagcacgaaccactctaagccctaaaggcgttattatgaaagataaaggcgattctcaaaaggaaacgtagtaaaaagaaacaatcaaggcacaagaaaaggagattttatgcgttacacaacaaactcaggcaaactcattccca

SEQ ID NO: 97823 - DNA, 814 bp, Cannabis sativa
aaaaaaaataataaaaaagaaagaaagaaaagataataaggttactatttttaagtatttttatagtaagggtagcatagcatctattaaaagatttttaaagctatttattagagatactctaaaaggtataagtaatgattaatgttatattgctattagtataattagatattagattttacataatataatttaataactattataaaatattactaatcaattacaagacgcgaataacaatactgttaaaaataagtatttctacctaaacatagcaatgatttatttcaaaaataaaaaattgaaaaaatagcatgtatatataacattatatgatcacaactatacatgaattggttgatatatgtgattattttgaattggtatttgtttatactttctagaaaactcaatataatgataagaacaaacataaatatttatctatttttatttttttaaaaagaagtaacaacacaactttccttgggtcaattcacactccaacattttgcaaaagataaataaaatttatttgatagggtaaattcaaatattcaaacaagtgttttatatatgcttatttcaacaacttgatattcattatatttttatactctttcgtacactaataggattctttcattatcaataaacatacaaacaaactaactttcatttaaaaaagaaaacattgaaacattggacaagaaaatgtcaagtttaaccaatttaatactttaatatttcatatttatatataaaataatatttgagtggaaaaaaaagaagacaaaatgatcactat

SEQ ID NO: 97824 - DNA, 1161 bp, Cannabis sativa
aaaaaagacacaaatttctaattttttaatctttttagtaatatattgagttagtgtattttatttgttttataataaaaaacaccaaaaaaatattcttattcacatatatacatatacataaataaatttaaatatatatactaacttatttattttagtttaaatagtatatatatattgagatgtatgtatattggtttgatttatatataaatggagatggaaatagataattattggagattaagaaataatggccttttttaattttttttttctataatatattaaataatttatcattaaaaaaaaataaccgatccaatccgcactattgcggattggagtggattggatttaaactattatgcgtatcggattggatccaaaatatgaaatctgcatttaatgtggattgaatgttgtttgaccaaaaaagtgcgaattaaatcgaatgaatacccctaattgaaggagaccctttcatttaaaggaactatagcaaatgtactaactactaagaacaattgacaaaatgagtgagcattaatgctatcttacctattctctccatcaataaataaataatatagatgattcataaggtgtagtaggacatcaaatggaatatgtaatcttccgagcaaccgaaaagaaaaaggaatatgcaatctataatctattatagtagttgatttttttaaaatataatggcattatgttttagccaattatttatttgagattgaaaaataatattaaatggcatacatggcattggaattttttttttccatgaatgtgaatctagtcaaccagtacaattctaaatctggcattacttaattagctgtacataaattgatagactattgggctccataatgtaacaaaatggaaatggttatttaatgccataaactaatttattgcattttgtttttgggttatcttataactagaactacttactttctattcaaacttcaatcaattactttttcccctatttttttagtattagctcaatattgtgcaaagcaataaattatgatacttgaagagccagagaaagaattatccccaaattaaatcatctcactattaatttaggcatttttgtctcaaactttgacatgatttatcatgctacctaaa

SEQ ID NO: 97825 - DNA, 635 bp, Cannabis sativa
gatttattagatgttattaaaataaaaagcactaactagttgatttatcaacttatattttaatatatgataagcatatgttttttttactgttattagataagttattcgaaatcaaaaacaatcttttagtttattttatatttagttaataaaaattatgtaacttttttacctattcgggttagctaactttcaaactatagtttcattttcaagttatataatgttgttgatcaagatacatttacgttacttttttttatatagcaacttttacattactttcaaatataattaataaagctacaataaaatataaaaaaaaattaccaaatagtttagtataaaaaatataagtatagttttatctttttttttttttcgtagtataatcattgcatgatatttaagatatcacttggtatttcaaaaaaaaaaaaaaaaaaaagatatcacttggtttttttgtaagttatttttagaaatttattaaaaataactctataaaataaacttatataaaatacataccgtatagtaacttttaatatgaattaacaaataatttttagtaatttataaaaatagttgatttttatattttgtttaatttatattcgttatttcctttt

SEQ ID NO: 97826 - DNA, 2173 bp, Cannabis sativa
  modified_base (29)..(31): a, c, t, g, unknown or other
gaaaactttttcgtgtgacagtatttttnnnaaaattaacccaaatttcagtatttttgtaagtttctctgagaataacacataaggcccattgaggtagttagaatgactaacgatgcccaatgacgcaagtagactggatcaagggtccatattaataaatgaatgaacccatgggtcatgcaaatgactaacttgacttgaaagccaattctacccggtcaaagggatcaagaaaatgtggcaatagattaattggaaggaatgtaaccctttctacgatattcatggaaaaactctgatgagcgagtcaaatagagccaataggaagaagaagtaacaacactaaatggggtgaataaaagggagggagacggaaccttcagagaatctaagatcttacactcactctgcatgactccatacgaggacatcttgattggctttcacttttgccactttgttctctattgacgccagagacagttctttcccaccttaatgaccttggcggggtctattttattgatgcagacttcttccatgtcctccattagtttgatctttctctcaaaccccactaagagatctaactcatcttcttcccggactaccatagtaccagttgagctgatattctaggatttgattcttcaatgtcttttctcaccatgaaaactgctttggcggagacactataacacttgtgtgcgcttttttgatcacgcctcaccgttctagtacttttatactcacatgaaaacttcatgtatagtgtctgatggaagtcgctgctccaaaatcaactaattgtgtgtaatttggtgaaaatttgtgttaatatgtgattttgcgatttcataagtcttataatttgtttgaaatctctcctgatgcgaaatcctaggctacacataactaatgacatgatatagactatttttagaatatttgagcattttgagcctatcttgttacattctatataactagttgctccattgcacttaaattatcaatttctttgttagtcacttgtagcccagctttaaaataactttttcattttttttaatttttaccttaagcactttgatgtttttgggcatattttgagtggtgtcatttaggaaagtgtgacaggagagttcagaatttttttatttgtttgtataaaaataaaatgatgaaacttggtgagagattgctttatcttcttttcttgtttcaacattgaggaaaatgttgattttaagtttggagtgaggtttattctcattttatatattaatatttgtattttttttaaaaaaaaagattgattgaaaaaaaagtgctacactcaagtattttattgcaaattctaagttcgggatgtagtatctcaaaaaaaatgaaaaaaagtttaataataagtgtgtggcaagggaagtgattatgatttttgtgtgagaaaatgattgtgagctctacgagtcctagaatgcttaacgtgattgaggtaatttgagccaaaaattgaatctttaatcttactttcacccaccttaaaaaaaaaattcttaccttcatccaagttttacattacaaacttaaaaagtcttaattatgtgtttatatatatatatatatatattttgaatcaaagatgattttattcataaactttcagcataaacaatagtctttaatgcaaaaggagcatcatgctcactgaaagtacaatctgacttaaaacaagaccctcgagcaacacagtgtgcgaccttattagcagatcgtttaacaaaaattacagaaatgttatttaatgaaaatactaaatcttgacaatcacgaacaagcaatccaaactgggaaggcatagcaattgaacttttaagagcttgaacagcaatcaaggaaccagtttccaacgccacatcaatccattgcttcctcttgatccagcttaaagcctctttgataccaattatttctgcaacttcaggtttaaccacaccaggtcgacttcctgaaattgcttcgataagtgcaccattagaatcccgggcaacacaaccaaaactaaacttattctccgattgaaaaatagcgccatcaacattgaccttaaccgtatttgtcattggtttccgccaatgctctttaacattgttaatatcatctacta

SEQ ID NO: 97827 - DNA, 1597 bp, Cannabis sativa
ttatattaattaaagagctataagcacataaaatatataattacccaataataataataagttaattaactaactagttaaccaaacagccttctgttgccaactagaattatcccaactgaggtacaaaccatctggtttgaccaaccaataaacagaagtatgaccaatatctctagctgggtcaaacacgttgactgcagcatacaaagatgcccaattggcttgtaagttaacaatattattattttcattaacatcaaaatgataagttggtccaccccatgaaagtgtggcttggattggtgtaaagcttccatctttattgcttacctgaattgtgtaaacactttggtttgtgttgtctttaggcaaagcattcgaacttatgtaaacaacgacacccgaattctgactactcttctcattatcaattgaatttattcgaccacctaatattgttgatgctgaaattaacattaatactaaaataaacaacatcataatatttctaggcatcaaagacattattattttcatcttttgatgatgatgatgatgatatatgattctaataattctgattattgtgctgtaaatatcatgagtatatgagtgtgtatatatatacaacttataagatttgtttaatatgatgatcgaaaggaaatctatagaattgaatgtcttaattatttaagattatgcatgcgattttatttcgtgataattaatttgatacacatgataggtataatttttgaggatttctttactaaataattcaaagtatatgaatgtgaaatctgtaatttagttagtatatatataatcttatattatttttgtgagaatgaattttataaatatatttagacaagtatgtggtaactattgtgttaaggaaaaaacaaagttaaagaattaatgtgaaaaaaaatgtgaatacaatatggaatatgaagatatattactcttaatatttttaaaatggcactaaggcaaaataatcatcaaaaataagaagatatgtttaagatcttgaagtaaattcatttaatagcgttttacattatatatatatttatatatttctatttttgatatatggaccaagtttaataagtaatgttttagaaaatgtacataatgtcacaattaattttttttattattcaactttttcttattattattattttttagtttgaataatgttttttttaaagtgctgtgtggtaactttttaaggaaaacaaaaacaaagtgaaagaatcccaaaacaatattgtcagaatatttgttggaagattttatttaatgattaatgttatttcacgtttgtcgaatctgaacaagtaatggtttagggttctttagaatgaaaaaaaaaaaggcaatggttttggatgttagaaattagatttaaaatagaaatatttgcaccaataactattattattaaattatttaagaatttgcccttagttattttaatacttaaaattcaggtaattctttttgagaggtataccaatacatatttattggttctctctcctaagttcggcctatacgctagcttcttcttcttctt

SEQ ID NO: 97828 - DNA, 522 bp, Cannabis sativa
ggaagaaagttactcaggttcattaggtgcatcttctggataaactgttaacatgtacatatccttcttgggctcttttgcagggtcttctaggatgtcaccctaccaaaaaagactttaattaaaggcatgcttagctagaccatgaacagatttattatcattgcgagtaacaaatattacctcatgactaaggtgccacaagttaccatctctgctataaatggatttcttagtcactggtacaggcacattgtgtttcttggcatattcaatagcatcctctctaccagtaatatcccactccctccaaggaaccacaacatgtagtttgggatctagagcaaagaaagtcaactcaaaccgaacctgaagtgaataaattgaaacaaaaacagaactgagtaaaaaaaataagcacaatgaatgtttaattcatgttttcaaatgcttaaaattgttaaacatgcctgatcatttccttttcctgtgcatccatgagcaacagcatcagctccaact

SEQ ID NO: 97829 - DNA, 580 bp, Cannabis sativa
  modified_base (533)..(533): a, c, t, g, unknown or other
tgcaagaggtagaacaaacacttcctatacaatatttaatgtatagtgttcatattgtaaatagagttagattccgagaaatattaaacacaaagaaaggttttaaggtttatcgtttgagtattattaataaaatagtgaaattatttttattgtgattaaatgacctaaagtataaattgtaagtcatagtgtctttctctaccaagaactttattccaaaatgaattcataagttcaagcaaaaaatcatccatgaacatgcaaagcagcactaccactcctagtagccacgtacgccactactcaccaagcagcaagcactgagatttcctataaggaagcggactactaacgagcgtccaaaaagactaagactcagaaacgtacatttatgggatcttttcctgaagcagaggaatcacctgttaggaaaacaagctacaagcgagcatccaaaaggactcaaactcgagatcgtaggccatcaggtcccccacatgaagttgatagtgttggattttgtgccctanataaaacccatttcaatataattggatttactaattaataaagatta

SEQ ID NO: 97830 - DNA, 1956 bp, Cannabis sativa
  modified_base (285)..(289): a, c, t, g, unknown or other
aaaatatatatatattttaaagtgtaaaataaaaaaaaaaaatcttaaattatcaatacttttattatagttagaaattaaatttctcaatttaattatatataataataaatttatttattatatggtatgattattagtatatatactagttatatcatactattataaaagtagggacacgattttgtcccgtgatgtatttcatggaatgtattccgtggtacattagatgagtctcatggtacattaaatgagtgttagggtacgttactattttttaannnnnattacccctagatcaatctcagccctcagatcaaataactccctcatctaacggataacgtacatcacggaatacattctgtgaaagtacaatgacgggacaaaatcatgtacctataaaagtattataattatatgataattataatggcaattttacttctttttttttttttgatagtcaactcttttaccaattttgtcttattatgataattttttttcttaaaatttatggtttagttttttaaggtagtttttccagtagttttaagttgctataaagattttggttgcgacttgctatttaagttgctttattagttataatagtaatttttatatgtaattctacaaaaaaaaaaaaaaaattattttaaaatgtaaaaattaaaaaaaacccttaattatttaagtgaaaattgaaaagcagaactactgaatgtagtattattcattatataaaacaatcaaacctgtgctgagtctcataatactacaatatttgatcatatacatatacaatagtggtaaataaaaatgcatagaataagatgagtcatgatgataatcctgcgaagcattccatacaagcaatgcaacacttggcagcacaactgcataatcacacatcatacataatcagtcactatatatatatatatatatacgtatgtaggatttgattaagatgattcttcttcttaccttgctttggacaaaccatccttggaattggtttcaactctgttttgtggttgggcaacagcagaggcgtccatggtggggtaaccaaccggtggtggagccacatatgggccttctccggcggaataacatgaaactgcccaattaatatataatcacataaattaattaaccaaaataattttccaacaatatgaaatgataatatgattgaattatatttcaagtacctgatggctgagcagaactcatatttggagattgatgaagatgatgatgttgagaagaagaaaaaggattcaaagttatgttgtgaaactttgatatgaagaatgaagatttttcatacattatttatatatacaattttatatacaatttttttaattttttttaaaaaaatttaaagtttgattgttcctatggatataatattaattttaatgtaataattaaattaaattgtatataaaataaagactatggcttcaaattttgaatctgccactaaaaattatcaaatgcaatatattctattattaaaaaaaaatgcaaaatattcacttaaaagaataaaaaaaaaattattaatttaaaattatgttagtcatagaaaattttagtaaaataattacatttacaaatattttagataagacaaactattaattagaagacaaatttatttagcattgactttaataagtagtgttattgtaatgtgatacttattttattaattggctattttaatttttttgtaatgtagtttaatatgtattgaaaggtaattatcttttcatataggttgtagataaattttagtaattagtggaatttgaaaataaatatggactcattcttgttcatttccccaaactcccttccacctttactctatttaacttggcaaatacaccaaaatgtaataaatataaatatctacatactgtgattata

SEQ ID NO: 97831 - DNA, 840 bp, Cannabis sativa
caacgacaacattgaagagctacgattacagtttattgaggatgcctcactggagttagaggctaatctggagattaatgaagaagtttcaaagacaggagtcctggcttctttggttggttctcgcaacctttccaagggtcgggtgaaacaaattctcacgggcatttggtccatgattgggaactggagaatcaaaacgatggaacaggggttgtggggatttttcttcgacaacttgactgacaaggaagagattttaaaccggagaccgtggatagtggcgggtcagcttttaaacctccgtgaatggccatctgatggttactggcagggtgtgcccatgaataaagctgtgttttgggttgaaatacacgggcttccaaccccttttctagcaactcagaactctacagttataggagctaaggtgggtgagtttatcgaaggggatggagcggacaacagagtaatcgcaaggaggggttttttgaagcttaaggtagatatcagagttaaccttcaacttccggccggattttatcttagtatcaccaggggaaggcgtgaatggatacagttcaagtatcgcaaactcccaaagatttgttttaattgtggatacctgtcccatgacagcagtggctgttctaaggcccgagattttgcctatcctctggtaggagaggctgtccccctttacggaccttggattaaggcctttgttccgagtcgaagctgttttgatacgagaggccctacccttatccgtcatctcagcggccggccgacgtcactttcaagaatttcgaataatcaagccgtgggtacgaatatcag

SEQ ID NO: 97832 - DNA, 591 bp, Cannabis sativa
aaatgtccgacttcgatagttgcgccggtttgggtattaaatatgaactatcaaaattattctatcatttattttttaaaatgttttatttggattaaatgtaattaatgtaataacgttcttgtgtgactgattgtatgaactgaagaatcacttactttctataaaggagtaatctcattcgaatatgactaatcaaaaattatttactaaaatagactaagcagactgagttttgactggatcactatctgttagaaaatagttgttgcagaaaataaaaggaatgaagttagcgaattagaatctgggttgagccgcggactcggtcgctcgctttaagacgttcgcggaactgcccagatatgtgcaagaagactatcagcgtcgttgtccccatgatataaaatagcccagtcgaacacactgtatcggaactcaataccacacccaaaaatcgactactgctcggaatatatatgtaatataatcgtatgtatatatcgtatatgtttttcagtaaaaaagagatatgtttctccgattggtctagatgcattatataagcaatacactgaaggtagtaacagg

SEQ ID NO: 97833 - DNA, 1602 bp, Cannabis sativa
cagaaaactgttttcagtaccagttttattattccgcatttaattaaataatcaaactgggaatattaaaatacggaatttcataaacaatgaatgaaaatttagttaaatatgccaaaataaactagaataggcatagtatagccatatatgccaaataatcttacgaacaagacattttatgtgagcaagacatctcattatatttaaatctttgacaagtgcatatattattatcgaggtttactatgtaagtttgtaagacatgttacagtcatgtactttgtatacaaccagatttgatgtctcaacctggaagaacaataaactaattaattaggttgttattttataggcacacatatgtttgaaactaaaattaaattgttgttccaatatacgaaaaatagactaataggtttattggcgtacatcattatgttttgttataatttaatttgtattgaaaaaaaaataaaatcttattccaacaaacagaaaatgataggtttattgacatatataatggtaggctatgaaatgaaatgaattattgttcaaatatataaaaataaaaaaaaatttaagccaaaataaactaatagatttattaccatatatgatgctaggctatacaaaaaatgtaaacaaagaatgaaaatttatttcaatttgcaacaatatcccaaaataaactaataagtttatttggaatatatgagtacaggcatatctgattatagaatatctggtctaatcatcatctattcattaaaaaaatttattattttattaaaagtaaccaattggtatcttatcgaaatgataactaatttgtccaaaaaaaatgtgtcttatttgtaatgatttaaaacttatctataacttgattctttatttaactattcaaatgcatatattaatttatatttaaaaaatatgattgaaataaacactcatgatatatatattttttttaaaatatagtttactaaaatggtagcttactggatgataacttattagttttgaaaataaacttgaaggttactcaaatgtattaatataaggttaataattaattgatttttaaagtgtatacatgtaaattttagaagtaaccaaaatgtatctcatattacataatataaaagtgatactttttttttttttatgaaaaaattacttatttgtttcttatcaacatcataagtaactaaaaggttactttcgaaacacaggaaaattaaaaaaaaaaatcaggattcgttttatttcaggcatattattttagaattaaggtattttttaatgacgtggcaagacattattgtaattgagatttgttaagttatttttgtaattattttgtattttaagtatatttttgaaaaaaatcccatttaaaatgaaatgggctgaatatcaaaaggaaaaaaaaaaggaaaattacatgctatagcctttttaacacagtacatctcatttttacctcctttttaaaattatttaatttataccctctttttcaagtattataccaattatgcccctgtttcaaacctattaacacaatacttttcccatcccaatattgataaa

SEQ ID NO: 97834 - DNA, 752 bp, Cannabis sativa
gctgcttgtgagtacattaccaaacgagttagaaactagttctgccttaaaagtacatatttgacaaagtgaaccaatagccaagatgtgttgagagagtatacttaccttccttccaaggcttcaggggcgaggagtccaaatcggttaatgaattcaaagaaaggtttgcgagtaggatatccagcacagctgattctgattgcctctagaacaccctacattgatattatacaatgctatgtgaaagaataaaagaaaaagaaaaaataagggacttagaatttcttttgagtatgactttacttacaccacaccgcagttgttgcataatgttgacattctcaaatatggcaggttttagaaggttgtttggctttacacatctgatgtagtgaggctctgtggaatttagtgtctccattagttgctgaagttgcaactgcacagtttaagacatgaaaaataaatgtcagttaacttgtagcagcagaaacatcaacatattcgaaatgaaatgtatctatatataccttaaaacgagaaccaattgaagaaaacttggaagatttagctgtctcttcttttaatggggggaaaaggcctgctacaaaagaacatttggaaacacctaacaagtcttgatgctcagggaccacatagtccttgtttttgtccaaaaattggtcagattgatagaggacctgaaatgaagtgttgtgttgataagataaagaaaaaatgaattcaaa

SEQ ID NO: 97835 - DNA, 687 bp, Cannabis sativa
  modified_base (288)..(295): a, c, t, g, unknown or other
agacccaatgatcaagaatctagaccttatatgtggtctgtttaagaaaataacagggtttgtacggacaaaattagagaaaatttatatgtgtatataaataatttttgaaaaagataacagttttgtcaagaaaatacctagtattcgcgacactcctatatgcgataattttatagaccgtcgggaattctttactcgacggtgtaaaaacattagaaaattataattttgcagcagtgttcaatggatatcattcattggttactaaataaatttaactataannnnnnnntttaaaaatattaaaccatttgatttgatcaaatgtcaaatcataatagagaaatttaaattttcatgcttaatttatctacttaattttttttttaagaaaaatatctcttttaatactatatcaaaatatgtttacataaaaaaatttaagtcaaactcaatttttttttttgctgattttttttcagccaatcgaacaacctcagcctctataatgtgaaaatgagatattttcctaattagatagaaaaattaggcataaaaactcaatttttttaatactacccattcataagtaatatccattagggtaaataccattttggatcttgtattttgtaaaagttaccagttagaccctttattttgttaaatgacgaaatagaccct

SEQ ID NO: 97836 - DNA, 3065 bp, Cannabis sativa
  modified_base (56)..(64): a, c, t, g, unknown or other
tgtataaatgtttaatgggccggcccaaagtatttttgtaattttttttttccttnnnnnnnnntttctgtttttttccctaatttttttaaaagaaatttaggcctatctcgacaagcacatgtgagcccgccgagattgctcaaattttaagttttaaaaaataagaataacgacgggtctatattggcctaccgttattgctatactcagaatttttttaaacataattcaggcctatctcgacatgctcacgctcgcccgctgagatagggctgccgagataagccttttttttgtagtaaatagttatggtttaactagtagtctaatataaaaatagattttatttgtggatgtccaactaagataaggtcttgttagcctcgttaaaggaatctagactccaaaatattaaggagttactttactatatactcttagtatttaaagagttacaaattttgtgatctcatactaaagttcacttttgagataacgaaagctaacatatttgaggatgttgagtttggggaaaaaaaataaaattattagagatattgttcttgagaagaaattggtgttaaactcaattttaaatatcacttttaacaatgtttaagtttctaagccatccattgatcgagaagtgaatcagaacattcataaaacaatctaaaaaaaatttcccattaaagataaggcaatttttttaaaacaaattaacaaattcccattaagaaaatccatgagtaaacatatataatgaaataaatggaatgataggaaacgatctaatcaactcttatcatgtcatgaaggtttggtattctcaaaatcagattgatgtcataaataaggagtgtaaattgatataacaataaagtttggtattttttctattactagaggtgcaaaactaattgattataaatgaatatttatgtcaaaaagacgtaaattgaaatgtagagaaatataaggtacgcctatttaaagaattactcataaagaagacacttaattaaataaacttcttttagtttaattgaaagactaacaagcatgacattgactgcttattatggtttttgcttaaatcaaatggattattaaattatcatttatctatggtgatattgatgacaaaaattatgtggtgcaaccaaaaaacattctgtttaaagttctaaaaaatataaaatattatattatattgtagcagaactctacaaatttatactgttgttgtttaagttagaaattaacatgatttgactgcttcgtctgaatttttttctttgagagctaaaacctacatagacatgtggctaattcacatgggttcaaatgaaagcatcataattttaaatatacattgatagaataattgaatgagtgttgggaatcctaatttttattaatgaacacaaccttttcaaaaaaaaaaaaaagaatgagtgttgggaatctctgctctgtcattgtgcccaaggaaatctgaaaactaggttttctgtagccaaagagacaaagttttgttggtgccaaaagatatttaagactattatatatggtcccctttctcaccaccaacacaaattagcatttcattatcaccaaaaagctacacttcaactcattttattattatatcatctaattatttgcttccctcgtgttccaattttatgggatatacgtacaaaagatgaatgaattaattaattgctggtattgtatgttctctgtattactctaaattaaagagataattaataatgatgatgattgatgagctgctcggaatataccattgcccatgaaaagacgcaaaggaaaattagagtttaggatcctaacaaaagttaaggtgtagaaatataatactatatataagggtgaatttaatatgtgaaaaaattttgagaaaaaatgtatattcattttaattagttataatatatatttataataaaagttaatgtatttgaacattatattagtttgatgtaataattaaggtagactcaatatgattgaggtaagggttaaatctcactaataacactttttattttcttttttaatttattttttctcttgccttaaaaaaaattatgacctccatttactataaatcttggatctaccactatatagagggtcgtcttaagcttttgcggggatcatagctaaacttttaaatggagtccctataaaataataaaaaaaaatcttatacaaatcattacatctataacctctataaaagtgagaatatttttgagctttccactaagtaaattacacaattagcttttactagatattaaattacaagaaaaaaaaattcattattttgataaccacaaaataaataaataaataaatttgctaatgaaacaactataaatatacacaattattatggtgaatcttaatatttctctcctattaacattttttaattaatcctttcattgttttataatctactataatatttttttcttcgtaaattatgtttttaaaatacttcttttttaaaattaaaaatttatttcaatcctagaaatagtttatttattatttttaatagaaaagacaataaaaaaatacacaatttgcttatacaagtgtcattttttattagaataattagcatttttcccttctgaactatcgacactacttgattttaccctcactacgaaaaacagttacttttagtaacaactttttagtcacaatataaatttttggtgactaaatgggcctttaagtcacaacaaaaaattacttgtgactaaaacatagtattttgacacaagttgtcactaatttagttttaatcacaccaagtattgtgaccaaaaatatatttagtcacaacaatttgtaatttttgtggctaatacttttagccacggactttttagtcacaatataagaatggtgatttgtaattagtaacaactattttacttttagccacaaattttgttgtgactaaaagtaagatatttttagtgcccctaaaatttgcggcttgttaaaaaatt

SEQ ID NO: 97837 - DNA, 740 bp, Cannabis sativa
agaaaaaaggcgacgtagtgtatacgacaatcgatatatagatgcctcttcaaggaacctgtgaaatgttgcattagatgttagtaaactatgtaaataagcagcctcacgaaatgtttttacaatggttgaattattagttttcaactcatcaaaagaatgtagacctttgatgtgattcaaaaggaccctcaagtaatatctttcaccttccattggagatgtgctaacagttcgtccaatgatattttctcgctttcatggagcccatattttactattagattcccaaacaaaatgttctgggaattctctatagaacaaagtccgtgcaaatggattcattgaatttattctaaaaaaaacaataagcattgatcttgcaaaaaaatatgatgacataatatttgaaagatcatttctattatcaaaggtaataagttgtttattctcaaggtgtaaaggtaaagagtaaacagtaggatgtatttcattcttcacaaacatataaatgagccacattgcttcagcagctgaaatccatcgaccagcttggaatgtatcaatttcattaatggtagtagcattatcaaaatcggtaaggttgaatgcaacacaatcatggcctttgtatatacatttataaagatacttaactgcctttatagtagaacaaacttctacattcatatgacagttaaattttgctagtaaatatagattgtatggaatgacccaac

SEQ ID NO: 97838 - DNA, 1000 bp, Cannabis sativa
  modified_base (347)..(355): a, c, t, g, unknown or other
ctctctcttcgtggtggtcgccggaggtctctcttttcgtggtggtcgccggggttggtcgagagattggggagaggaggagaccagggttttgggcttcaaggcttggggatttcgattttgtggtctcctagtctgttggtggctccgacgacgcacaagaaaagaaaaagggtgggggagtcagggttgtcgccggcattagggtttgctagggttttttagtgaagtagaagaagaaaagaaaaaggaaaggaaaattagggaatgaaagaaaataaaaaaaaatatataatttatttatttttataattttttaattatttttttaaaattaatattacgtnnnnnnnnnaaaatttgccacgtgtacaagtgtgtacacgtggatagtccaccgtgacacttaactgtgatttttggacggaggagtacagagtaaaacggaatgagagtttaggtagttttgctccaaaaaattaatttttgtggttaaatgttaaataatttaaagttcaaataatttagccgtcaatatctttttgttatttaagataattaaataaaatataaactgaatatataattactgccaaataaacaaactaatatgatttctatgttagactactcttaagtaatgttataatgtttaatatgatcttattagactcttatctcgtatgctcatcctatttggttcattttaatattttatgttaaagaaaataaaaattctataaaaaaaaaagctaatattgcataaattatactattagtttcattaaaatataaagaaagtgcaaaatagagtgtaaaatagagtgtgattaacaatttaacactcttcatagatcaatagattattaatgaactatatatatacttgatgttacctgtaatagttaatttttttaattagatttaattagataatgttaagtaaaattttatttcttttagttagataatatatatataaatatatatgttttttttt

SEQ ID NO: 97839 - DNA, 533 bp, Cannabis sativa
  modified_base (463)..(491): a, c, t, g, unknown or other
taagtgaaaaaaatggcctttttttttttatattaaataaatatatatttaaattaataatttttgctcttctttttccattattactttattcttacgacttaagaactagaacaacacacacggtagcttctttggccaatataagtaccaaatcaacattaatttacaaaaaaagtgattcctatttttatatttacacaaaaataaaaaaaaactaatactactattttagcatcattttaacctaaccaatttaatttgatcacgcaataaaatatgacttcaaaatgacacacaaactagtcccctatttcttattccatcaaattttgtagtaagaaatttgtcaaaaaagaaaaaaaaaatagttaattagtaatttttctatccgaactttgacatgtaccaaataataacccctgaactttttttgtctttaaaaattctccctgaactattnnnnnnnnnnnnnnnnnnnnnnnnnnnnnaattttagtaaaaaaattctaatatggatgaaaatttagggg

SEQ ID NO: 97840 - DNA, 701 bp, Cannabis sativa
atcatttatctaatgactatgaaataacttttcaacatataaagcaatatatacacacatgagtaataatacataacactcccaaattacacaatttttgtacactattatatgtcattgtttataatcacacaaattaaaatttaagaatctcacttaaaagtattacatggttgataatatgattcatcatttcgtagaatacaaaaaaagtgagcaaattcaagagtgcgtattagtcatataaatctttcaaaatatacataatcctcttttgattcaatacgaagtgtcaattaataaagaataaataagtatttttccttctaaattttgtcactagtaagatcgtgttctaaaaacatgacaatatcagtaatagtttcactatgttagaatttgaaagtgtgtggttaaagtgcatggggttctatctcaaaacgaattggcaatgagaagagtagctcatgtatcttatgtatagtatttagtgtccacacaatatcaatgtaagactctctaacacactaaaaaattagtacacaatatttaccaactctagcgtcaacaagcaaagaggattggctccaagatggaagtgaaatggtaacaaagctgcaactagctagaggggtttgggttagggtcaagtttgatctaaggggttagaagccttcaagccttaggaggcattgagcaag

SEQ ID NO: 97841 - DNA, 692 bp, Cannabis sativa
gggtttcttgcaccatacagaggaacaagatatcatttgtcagaatggcaacatggatgtgcacctacaaatgagaaagaattttttaacatgaaacattcatctgctagaaatattatagaacgttgtttcggtttgcttaagattcgatgggctatattgagaagcccttctttttatccaatcaaaactcaatgtagaataatgactgcttgttgtcttcttcataactttattaggagagaaatgtcatatgatcctatggaagcagaattagatgcacaagatagttcaaaaaactaaactcttgagcttatagttgcttaagttagaggttaaaggggcattttgggaatttgaggtgtttgttaaggtggctgcttgtgaggttggcaactggccatatcatttaatttcaacctaattttcttaggattatttggtttaatcaattaaggaataagacaacaaaggaaaaaattgggaacttccatcttgttctctctctccttcgaccctaactagaactagaggaaaacatcctcaaattgctgctatttactgtgaattcatcaaaggtctgaggaattctaaccgaggtaagagccctagcttctttttgttgagtttaaaagttgttttgttaagattaagcatgttgatgtggtgtttttgctactattcgagttagg

SEQ ID NO: 97842 - DNA, 685 bp, Cannabis sativa
attgttggctttgatgtagataaactcccaagcttaaaaaattacagtataaatatttaagttttttaatggaataaaaacttaagcttttgataattgtaattccattaatacttattttgaccattctttaagttgctttaaaaaatgctatgtgttgatgttaatttgcagtataaatttccaagttcttgagtttaatgttgcaaatttttgagcttgagaatttatttgcatcgaactcaataatttgaggatttatgccacaaattaacatcaacatgtggcatatttgggagcaattaacgtaatggttaaataagtactaacaaaattacaaattgagagcttgagtatttatgaaatgatcggatagttaaatcatgagaattagcacataataaagagatttaattattattattattatgtgattttgtgtctcttaacaaaaattatggcttattgtcagaaataagtcttaggaaaatattttctcaattacggagatatagttgaacattaggtgcattatatatgttatatgtaaatttttatgaattgtatgtcttatgtttagtaacattagaatgcaatatttggcctatagagtcacttagaaatggtttagtatcttaaaaatagaggggtgacataattagacatttagaatgttgggattact

SEQ ID NO: 97843 - DNA, 1079 bp, Cannabis sativa
agtaggggtccaagaggtgctctttgggtttctccaccatccgtcttgacgtttaagagattgactaatctctacaaaagggtcttctaggaaaggttgaggctttactccctgctcccgggcagctggcccagatcttggagatggattttgtgcgtggtcaggacctaactctaagcatggtgtaatgttgccattgtatccatactttaaggaaattgtgaactattatcacattagtccaacccagctcactcccaaaagtatatagcacttgtttgccttgttcgtgttgtatgcttcccaaggatggggtcaaccatccgcccacgataccaactagttgtttgacttgaagtccagccccaagtaaaatagatctaggtatctctacttttcctagatcgaagaaaaatggttaagtggcaccacagataccaacgtgtccaaaattggtggctatgtggaggactattactttgtcaagggcatgaggaccaatcataccaatttctagcacatcccttctttctgtcggcctccttttactttggaactcaagaagagggctcagaagatactctaactcccttcaaaggctcaaaatatttgacttttggctactgaggccaatttcattaagtataagctttatccatctaatggaggtcaagggatcgagcaagtggcagaaggagttgtatccaaataatgaaaggagatcatatctgagcaagaaacaccaaagaacaagaaaaagaagaaagctcctcaagatgaccaagtacctattgagcagcctatcaaaattagagatggtcttaaagaggctactcatccttccgtccgggtggaaggaaaaagaaagggtattgtggttaagcagaaaaaagaggacttttttgatgaggatgctcattctttactttttcggaagtgtgctcctatacatgtgtagggtagaccattttttcttagctttatttatccgtactcagtttatgcttttctgacatatgtttcctttatttgtgtgtagttatgtcttaaaggatgttgcgcgcactaaagaagaggtc

SEQ ID NO: 97844 - DNA, 664 bp, Cannabis sativa
tataacaacagtgatccattgcctgctataaactcccaaaaaagagagtaaagtaatgaagctaaaagctaagatgcatatttaataaaaacaaacactttattttcacttacacttcaagccaaaagaaaaagaaaaaaaccaaacaaaaaagaagaaaaagataataataaatggtgcttgtagaaataggcttaccccactagatctcagagtagtgaagccaaagagaataaacccaataaactgtccttagatgcaatcataatcatcattctcttaagctcaaaatctcactgaaaccaaaagaagaagaaaataaatcacaacccccacattgaaggaacagcaagctgtccagtgacccaaagccataaataagtacttaaacaaattttccatcttatcagactaaaaagtaaaagagaaaaaaaaaaggtaacgaataaataaataaaacaaaaaacagagatagacccaagtgcaataaagcattaatagacacaaaaagtgtaagcttcaatgaaagaaagaggaggagaggtggtggtggtggtgggcatagtttgttttttttggagagagaaaacttgcctgagatatggtcttcttcttcttaagatgttgttgggaaagggaaagagagaagaagaaaaggcattag

SEQ ID NO: 97845 - DNA, 884 bp, Cannabis sativa
tgaagccatgttatgtaggttgggttttcatagtcactggatatcgttggtgatggaatatgttcgttcggtaaagtattggattcaatctagtgggcatacggtgggacctattgctcctactcggggtattagacagggagatcctctctctccctatctgtttattctgtgtgcggaaggtctgtctgctttgatccgaaagtttgaagctagaggttggattagagggtgccgtgttgcaaggggagctccttcaatctctcacatgttctttgctgatgatagttatctctattgtcgtgctcagaacaatgaagctcagcgtatcgtggaacttctaaactgttttgaaagagcatcgggtcaaaaggtaaatttattaaagtcctccatttttttcagcaaaacacacggaggttttggtgaagaataacatatgtacaatccttggcataccggaagctagtgagcagagtacgtacttgggtttgccaaacacattgagtaggaacaagaactccattctcgactttttaaaggagaagatgcataagggtattgagggttgggataataaacttctctctcgtgctggaaaagtgatcctaatcaagtcggttcttcaatctctccctagctatgcaatgaatgttttcttgttgactaaaggaatgtgtcaagaaatggagcagttaatgtgtaacttctggtggcgtacttcgaataaaaaggttaactgcatacattggatgagttgggaccgtttgtgcatcccaaaggatcgggggggacttggttttcgcaatctcagggattttaatatggccttactcggtaaacaatgttggaggctgctcgtttgtcctcaatcgctggcagcc

SEQ ID NO: 97846 - DNA, 797 bp, Cannabis sativa
catggtattaaacataaaacttcgggtaggaaaggagtggctgctatgaagttggatatgagtaaagcgtttgatcgggttgaatggagtttcatcaaagctgtgatggatcgaatggggttttctaatagatggacgtcacttattatgacttgcttgacaacaaataaatttacttttcttttaaatggagaactaacaggcttagtcacaccatcccgagggcttaggcaaggctgtcctttgtctccatatctatttctaatttgttcagagggtctctcatgtttattgaagcatgaagaaagcttaggaaatctccatggttactcactcacccgaagggctcctccaatttcacacctcttttttgcggatgatagcttactattttgtaatgctacagagagctcttgtcttgctatcaaacgttgtctggatatataccgtcaagcttctggccaagtattgaatcctgataaatctatcctctctttctctccaaacaccactttggcggctcaagttcagtttcatagagtgctttccatgcccatcagtgaatgccatgaaaaataccttgggttaccagcatatacagatcgagacaagcagcagttgttcagcgaagtcaaggaaaaaatatggcgccttatgagaacctggaatgacaaactcttttccattggaggtaagaaaatccgacttaaagttgtggtgcaatctatcccaacttatttaatgagttgtttcaagttaccaataactctcttcaatcaacttgaaacaatgatgtc

SEQ ID NO: 97847 - DNA, 984 bp, Cannabis sativa
attgtaagtgacaacaagagttaacattattctgagggtggagggtttcaccacaagactaaaggtgtcgaaatagtctactccaggtgtttgttgaaactcctttgccacaagacgagcttttaacctctccaaagtgccatgtgccttgtacttttttgttagaacccatttgttatcaagaacattcatatcagaattgtagggaacaagaacccaagtcttgttcttaattagagctttgaattcagtagtcatggcattattccattgcgggtctgcaagagccttctttatagattttggctcaataaaaaattggttagtactagtaacattagcagctagagccttaggtttatgaatacctgattttgaccttgtttgcattggatgaagagagggaggaccatgaggcagttgttggttactagtggaaacaggaagagattgtgggatgttttgctcagtttgagatgggggtctgtctacggttatggtgggttgtggcataggagatgtaatatgtgtttgttgtggagatggagagatatctgtggacctgatttggtgagatggtgggggagaagtatggggacaggtggttacattgatgatagggacaggcaactggggaaagggaatagcagtaggctgaatggaggttttgggagcaggtgttgcactaggaaataaagaggagtaaggaaaaatattttcatcaaatgtgacactcctagctatgtaaactcttcctgaaggatggagacatctatagcctttatgagagaggttttaaccaagaaagacacacatggaagttttaaaattgaatttatgtttgttgcatggtctgagaaaagggaagcaagcatagccaaaaacttttaaaaaggtgtaatcaggtgttctatttagcaaactttcaaatggggagatgtatttattcttttaaacaggcagcctattgatgagaaaagtggc

SEQ ID NO: 97848 - DNA, 762 bp, Cannabis sativa
gaaaagcctaataggaagcatgtttgtagcatgatagctgaataggcgcatgttttaatttctaaaataagcagtaattagtaaattattcttgatcgtgatccgaccaagctagctcttggttttccaggctgttctaatagaatggacgctaggaaaaacatgactagtcagggtaactcgatcggattcagtggttgtcagggagttgagattcccccgtatatacgtggccaaggcagggcacgcagttagggagatgttaacccgttgcagtctacccaagattgggaaaacaagtttgtagcaatgcaagccataattaatgaacaacaagaagaaattgaacgtctgaggcaatagggtgctcttgtaatgcctgctctagagatgcaggtggcgcctgcccctgttgtgtaggtagggctgattgttgcagtgaattggacagaaccactgtatgaaaggttctgcaagcaagcacctctagtctttctgagaggtcccaatgtgatcaatgtcgagcagtggctgccagttattacatgaatcttgaatttcatgggtgtcaccgacaacgacagagtggcctgtgccacattccaattcgaagaagatgccctagtttggtgggacacggtgtccctgactcgggatattactaccattacctgggacgagtttcaggaattttttaatgtaaagtattataatgaggcagtcaaaactgaaaagcggaaagaatttacccacctgactcag

SEQ ID NO: 97849 - DNA, 695 bp, Cannabis sativa
ttaaatgatgtatgtaaaatataaagaaactgtaattgtaaaaatgaatggcaaaataaataaaatatgttttgggtgagaagctgattttgacacagattttatgaatagcttacccatgttaattaaatatttagccaaaagaatttccttaatttttttttttttgaaaggggaatttccttaagttttcttacataaaataatatcattaaatttctgacatatataaaaatattaataataaattctatttcctaaaaaataagtaaataataaattctacaccgtattttccctaaaatagacaatatgtaatttcgttcagattcaactttctctaattgattggttaaaaactcttatttattttagttatataatactcgacactgagcctgtcacatatatgtcatcactctgtttttaagtgaacaatagagatttgttaaaaaagaaaagtaaaaaaataaactgtacgttgagatctattacttgataaagtgaaaaatttggtgtcgattaacaccaaatatcatttattttaaatattttgtgtgtggatattggataatgatacaccgtcacaagaataaattttgtttacatttttgtgacaggtaagataactgatgggagtaacgccgatgttgctgttgatcagtaccaccattataatgtatgttttttttttt

SEQ ID NO: 97850 - DNA, 519 bp, Cannabis sativa
  modified_base (121)..(123): a, c, t, g, unknown or other
gtcccaagttccaatcccgatctgagtctggattcagttctgggtctaagtccttggttctgttcttggtctgggttcttgtttgggtccgggtcagggtctagcttttggtctgattctnnntgtgggtttgagttcgggtccaagtctgtgtgcaggtttgtctccaggtctggaccccgatctggttctaggttcaggtccaggtcaaagttcaggtcacgagttcgggtccaagtttgggtctaggtcaggatctcggtccagatctaggtccaccatttcgatcccagtttgggtctggtccttgtccaggttcgtatccggatccctatccaggtctaagtctgtgtttgggatcgggttcaagatttaggtccaggtccgggcctcagttccggtccaagtacgcgaacgtatccggacccgagttccaatcttagtttgggccttaggctaggcctgtgttcgggtgtaggtctgggtctgggtcctggtcacggtcctactcttgttcta

SEQ ID NO: 97851 - DNA, 1144 bp, Cannabis sativa
ctctgcttcctgtaaattcaatgtcccgtgtttgtcctctgtaccacaaagaaccatgacccgattcttgcacttatggccgacactgtacttttcatcgcacgtgaaacacagaccacactcccgtttatctctcaactcggacggcgtaagccatttaacaggcagaattatttcggtgctcttgttgccaacaactgaatgtggacgtgaattattggtagatgatggtggagaactcggtcccgagcttggtggccccgatggcaatgatgtcttcggtacccatccggatctcgtgttgctggtgcgagatggaataagcatatcatcattccgatcttcgaacagctgtgctttggccatcgcatcggctagatcacacggccgtgaaatcagtaattcgcggcgaatctccagcttcaatccccacacaaaaaaattcaagaacatctgatctggaactcccgtgatcttcgtcatcaactcttcaaattcttcacggaattgggaaactcgacctctttgggtgagtttggcaatccttcccaacgggtcatcataaatcgatgctccaaatcgaagccgtagagctcgaatgaatgcatcccaatcggtaaaaccgccccccttctccatccattgaaaccaagttgatggtgctccgtctaagtgaaaagcaaccaccgacaatctcaatacattgtcaatccggtgaagatcaaagaatttgttgatcttatatatccagtcatccactttggtcccgtcaaatctaggtaccttaacccgcaatgatttgaggatggaattcacttcacggcactcgtcttcggcatccgaacgtcttcccccagaacggtgtggcagcagaatagaactgccattatcaaccccctggcccggcgacagtggaggtgaaacctgtgacagtcgttcatctaagagggcacgtaattcctccatttggaggttggcttgttgttccagcttgaggtccaattccttgctcatattctggaataattgagcaatctcctcgttcttcatcctgaaaaaatggaggtcaatgaaagcaccaatgatacaaaacaagccttcatcgagacaaggtcaatcttcccaaaatgctactgcataacta

SEQ ID NO: 97852 - DNA, 840 bp, Cannabis sativa
aaaacatgaaacaaatgatgaaaatttgctttttcttttcttttcatttctttttttctctttgcctgaaatgaaaacagctttatcgacaagagaaaacctaacagaatctcaatgattaaagttacaaattcaaaaaattgaaaagaaattccatttacttccatgccgaacagcttatgacaaagacaaagaaaaccataatcgaaaatcagagattagaaaaatccaccaagaaaaataagaataacaataaaacaagttcattgaatctgaaatctccaatatttattatcaacagaggactcatcaccctctttagcaagctatatttacagaagaacacatagatagagatacagaaaagctaataaaaaaacaaactgaaagaaagaaaagcaaatggaagatacctattagaaattatgattttcatatctgcccataattataccctaactccttaatttcttcttcttcttcttcctttacaatacaaagacatacaatggaacaacacgagtcaatacccttacaaattcacatttacagagcatagagacattaacagctccaaataaccaaacccattttcaaacccagaatagaactcaactatttcccaaatattacatactaatcccaccccccataacaagtttctttctaagttatcctccattaacccataatcaacccataaacacgatgaaaaaccccttttctgaaatctaatttgtcccgtattttctcgaaatttcagatctattccccgttttcaaaaaacaacggaaagaatcagaccttgaagccgagagagatacgtaactgagtaaaaga

SEQ ID NO: 97853 - DNA, 532 bp, Cannabis sativa
cattttattaattgtaaaaagtttcaatactgcttctaatattcctataacaattataggtacttatctaagttgaagtcatacgttcgaaacaaaagtaaaccagaaggttatattgctaaaggatatctagctatgaatgcttaacatttttgctcaagatatatggaaggtgtggagataaaatttaattgtcaacctagaaattacaataacccggaacaaaatagagaaatgctacctattttccaaacgacagatcgacatttgagaaaaattgatactaagactttagatgaggatacagaaactaaggcacatcgatatatattatttaattgtgatgccgtggactcgtttattgagtaagtgttatgaaatatatatctaataataataaaatattgaaacatcaagtaattatgtttaatgattattcattttgtagggagcatcacaatatcattacacaaggaaattctcgtcaaagagcaatgactgtagatcagattcatagccaattatttccttc

SEQ ID NO: 97854 - DNA, 841 bp, Cannabis sativa
tgtttctttattgatgttaaataaaatagattacatttaaatggagttttaattagggcataaaacccaacaagaatctcttataaaagttcaagatttgtaatgattccacttgtttaatttgtcatcagacagaagatgtattaaagtcattaaagtttggcttagttggaattagcacaatcctaacaataatgtatagaatacaacaagaagtgaggaatagaattaatgtaattttccctaagaaaatgaaaaaacaagatatagaatagtttgctcaattgtaggtttatacatatgcatagcatgaaagattgtctcttctaatacctgttgttgcttggtgttgtttgttttttcagctatcaacaaaggaggagtgttttaatgagttgcgggtgttgtttgagaatgttatagctttattgtctaaattttcgggagcacttttgttccatatggcttgcgatatgaatttttgcagctcatggttcgataaaccatgtcctttggttagacgatgagctatcctagttcgaggaagtgtcaccactaattatggagtgccgcgttattaatcatgtgtgattttgatcaccgcatcaaaaaaaaaagtcaatcattcataaaaaatggagagaatatcaaagaagacaaaaatatagcatatattattcatgaatagatattattaagaaaaattgagtttttcatacttaattttgttatctaattaaaaatatttcttattttttttacataatacagagtaaagttgttccatagatgagagacatcgcacaaaatagttaggaatttttacaaaaatattggattt

SEQ ID NO: 97855 - DNA, 808 bp, Cannabis sativa
tagccatgaatatcatgttttttacgtgtatatttataatataaacgcaataaaactatctttttcaggcattggatcataatttagtgatccatctttagtaaaaaatgtcaatttaaatacttattgcgaatttatttatagtgcgtctgaaatttttattgaattcattttcacaatgcatatatttatttatatatataaaataaaaaagtatattcgaaaatattttctgtacaacaatgtattcgcattaaattatttaacaaacgaaaaaattataaaaaaaaaaaaagaaaaattttaaaaaaattgttgtgtttggaattgaaagtaactatataattattaagtaatagaatttagtaaggtgataattacacaatttaataattataatttacactatggacttgtttgaaaaattacggtataattgaagataattagataatttaacatatttttttactataattaattgaaaataattgagaaattttcaattacatacactttttaattttcatgatttcttatgaaataaaaattaaatgtaattatactatataattactaaatttttttaatttaaatattaactgttgatcataatattatatattcgtgtaatactaattatttttaatagctaatatctaaaatgtaaaatttttaataattacactaaattatctctaattacataataaaaatataattaacaaacatactaaattaaattaaattatgtaattagagataattacgccataattttccgaactatccttggtgttatttatta

SEQ ID NO: 97856 - DNA, 962 bp, Cannabis sativa
gaagagcgtcgaaacctataagatttatatcttcaaggtcttgaaacaggttcatccagatataggaatctccagcaaagccatgggtattatgaacagcttcataaacgatatctttgagaagctggcacaggaagcttcaaggctcgctcgatacaacaagaagcccacgatcacttctcgggagatccagaccgctgtcaggctcgttcttcccggtgaattggcgaaacatgcggtttcggaggggaccaaggcagtgactaaatttactagctcttgaggccgtaatctttgtgtgtttaggttagggtttgaatgggttcttgactaattgtttgaacaaattagggatagggtttttgtggtcattataattatgtcatttgtaatgatatagatagttgtagttacttactggtctttgataaatgattcaaggaaatgcttttgaagacattttaatatgttttgggtctttatattcatttgttttctttttaaacattttaggtggtgattttattttgaagggtatttcaaattggactatgggaagccgagtatggctattcatgactcagatggtttcagggatttaaataatccatattcaattcttccaaattatatgtgaactgtcaaaaagataatatttatatgagtaattagtaattttttttttcaaattttgacatgtattaaatcgtgcttttgaatttttttagccgttagaaatttcccgaactattaagatcattaaatttaaggatttttgtttaatttttatgtactgaaccatcatctccaaattatgatatcaactaaatcatgccctcaaattttgatatgtatctttgaattttcatctatgttaaaatttttttactaaaattagacaaaaatcttcaaaatgttagaaaatgaaaaattaatcataataattggagaatgatttacga

SEQ ID NO: 97857 - DNA, 722 bp, Cannabis sativa
gtagcgagctaaacagagcaacagtgatccaattagcaattgagaaaaaaatatttgaattttctatggataaaaagatgataaatggatgaactgaatttgaattttctatggataaatttccaaaacaataatgattatcacacactcaataaatttctaaaatttttcatttaatttttcaagtactggtgcatgaatttcacattgatatagcaatcagatagttggatatagcttactcaatgaagacattgagatgacaaatgaggtttactcaattgacaaagttgatttagtatgattatgttcttttttcctttctctattcttcttattttttattttataaatcactaaaatatttatacaaatgacaaatgaggtggaaatgtcaagtgtttagtgatttgtaaaatgatagagagagaggaccatgtaatatgggatggttttcaaccttattttctttgtacgttgtattgtattaaataataagtaatattatattgttcggataaaacattgcattgcatggtattaatcattatgaaatatatattttaatacaatgcaaattttattatttaatacataacaagtgatttatattagcgtgcattacaatatttaaaaaggatctggggttggggattgaagcctagactaggatcctagaccctaccctaatgccggacttgcacccaagcacggacttggac

SEQ ID NO: 97858 - DNA, 667 bp, Cannabis sativa
atgatgccttgttgaacctttttcctcaccaaatgacagtcgatttctgtgttttgttctctcgtggaacactagattagctgctatgtgttgggcagagttgttatcacagtataatagagcaggcccttcatgttcaaccttcaattctttcaaaacagatagaagccaaaccacttcacaagtggtgttagccattcctctatattctgcttctacaaaagaccttgaaatcgtgtgttgcttcttacttttctatgagatgatagatgatccaataaagatacagaaactagtagttgatctccttgtatctgggcatgctgcccaatctgagttagtgtaggcatgtaatttgacttttgtgttggcaacaaagacgattccttgtccaggacagcttttaacatattgtagaactctttgagctgcatgcatatgtgtgactcgaggtgtggataaaaactgactcagtttgttcactgagtaggaaatgtatggtctagtgattgttaggtactgaagtttcccaataatctttctgtacagtgtaggatcagctaacttctctttttcatctaggctaagtttgagattggcttttattggtgtattcataggcttactccctaaatacccaaaatcttctaacacttgtaatgcataa

SEQ ID NO: 97859 - DNA, 770 bp, Cannabis sativa
  modified_base (735)..(738): a, c, t, g, unknown or other
tatatatgtttaagtagagattgtttttttttttttattttatttataaattgattcataattattgttcttcatgtatattatatatttcttaaatgggtgtcataaaaaatcttaagcattcttaatttttttatttgctatgagttggtttaatttgtttaagtatatattgattcatgtaagttgataaaatacatattaattagtttgcataggccaacctaactgaatatatactctttataaatatataacatatattaagaatgattttcgagagtgtaaaatttattattatataattatatatatatatttataaataaaaaaaatgttttgaatagtgagatattttagtttttttctttaattattagttatacatttaaataaaatggaataacgaattaacaatcacatatatttttttaaaaaaaaatggtataatactttatattaaaaaaataaagaaaaattatttaattttcttattttttttaattatatataaatattttattcatcatttaatcattaaatatctatatctattatctctctataaatctatatatatctatatctatataaaagagaagtatgaggcggtgacgtggcggtctcaaaatgctttaaagtcatctttcttttttctccttaattctctattttctttaattttttattaatttcattcaatatattaatctactagatgagagttacgtggcnnnncacgtaaatattagttttatataagttctagt

SEQ ID NO: 97860 - DNA, 1251 bp, Cannabis sativa
gagagagagagagagagaacatccaacccaacaaaaatctcttactgaatattaagttaacagaatcttaccatgagaccatctaacttttcaaatgacaattcatccaaattcaagcatctcgtctaaaacctagtctgtaaattaatccatggcttggacattgcccatagtagaattattcaattttcattcaaacaaattcaggtcttaactatcccaaaattatcctcggaccaaaataacaacttgaataagttcacacccaacaaaaatctcttactcaaaattaagtttacagagtcttaccatgacacaatctaactttacaaatgacaattcatccaaattcaagcatctcatataaaaccctagtctgtaaatgactccatggctgggccatagtagaataattcaattatcattcaaagtatctcaaacaaatgcaggacctagttatcccaaaattttcctcagaccaaaataacaacttcaataaaccaaaaaataaaagagaaataagaaaacccaacaaaagtctcctactgaaaaagaagtaacattatctaaccatgaaacaatccaactttccaagtgatatttcatcaaaattcaagcatatatagaaacctagactgtaaatgagattatcccaaaattcaaagtatcccaaacaaatgctggactcttaattatcccaaaattatcctcagaccaaaataacaacttcaataagttcacacccaacaaaaatctcttactgaaaattaagttaaacattaaatcttaccggacccttctctccaactatgcacaactcgtccgagtcactcactgcatcatcattaccaaccagagtcttcttatctgggtcaccatccaaaactacacaatcctcgtccgcatctctaaccgtaggtttagaagactttgacctagacttaggcttgctctcaccaaccacaacaacatcatctgaatcattatccgatcccttatctccagcttcaagatactccgctaaccaatcaaagtcatcacctttcgtctctgtcaaagtaaattcttcctcatcggagcttatatcgaataccacagcatctcgctccatttttccatataagaatctttacccaaaaaagaaaattggaaagctagggttcctaattaacaaaaacctagaattcccacaaaataaaaactggtataataaacaaaaatcatgaaaataaaatgggtacaaacattgaa

SEQ ID NO: 97861 - DNA, 2090 bp, Cannabis sativa
aatgggacaaaacccaatttgaaatatttccgtatttggggttgtcatgctcatattcttaaacctaagactgggaaacttgctcctagaattgaagtgtgtatgtttgtgggatattcataagaaactcaaagatcatacttctataatcatcaagacaataaagtgtttgtatcaacaaatgatacttttcttgaacatgactatatgaaaggtcacaaaccacgcaatcatcaagtggttattgaggaaataaaaaatgaatggatttttgaaccatcaatttcagcaccagttgaacgaccgacaatagttaccacaattcctaaaaaagaaatccgggtacatcgtcgtagtgggaaggttgtgagacagcctgtccactatgaacatgaagcacatgttcttatctctgacacagacaatgatgatgcattgacttacaaagaagcaatggaagaccctgactcagacaagtataacaatgccatggatcaagaaatagcttctatgtgcaccaacaaagtctagaaatataaaactccacatgaggatattacacccattgggtgtaagtggattttcaagaaaaagagaaatattgaagggaaggtagagacctttaaagcaaggcttgtacaaccaaaggctacacacaacaagatagggtcaactatgatgaaatcttctctcttgtggcaatgcttaaatctattcgcattcttctttctataactgtcacttatgactatgagatatggcaaatggacattaagactatttttctaagtgttaatcttgatgaaatcatttatatgaaacaaccggaaggatatttgttactaggggaagatcaatagttgtgcaagttgcttaaattcatttatggattgaagcaagcctctagatattagaatatcacatttaatatgactatttaagagtatggcttcgaacaaaataaagatgaagtatgtgtatataaatactatgttgatgatattctacttattggaaataatgtagaaaggttatcacatgtaaagaagtggctagccgaaaaatttcaaataaaagatttgagagaagcaagttatgctctcggtattaaaatctatagagatagaaagcaaagaacattagcccattctcaagaaacttatatcaataaggtgctcgaaatattctcgatggataattccaagaaaggacacttaccgtctagacatagaattactctatgcaaggaccaatgtccaaagactcctcaggagatggaagacatgagaaagtatccttatgcatcagcagttgggagtttaatgtatgcaatgttgtgtaaggcctgatatatgctagggattgttagtcgttaccaatctaatccaagtttggagcactcgatagctataaagcacattctcaagtatctttggagaacgagagtctcatgcttgtgtagtttggtggagagttaaattctactgggtaaactaatttttattttcaatcaaacaaagatagtcgaaaatcaacatctgggtcagtattcacttttggtggtggagttgtagttttgaaaaacattaagcaaaccaatattgcgaattcaatcacggaagctgaatatatagcagcttgtgaaaccgttaaagaagaggttgaagaaattctacaatgatctagaagtagttccagaagtagaaaaattactggtactttactgtgacaatagtggagcggtgaccaactttaaggaactaaaaagccacataatcaaattgtaactggaggggtatatttgtaacgatttgcatagtttggaagatatttttgcaatagataaacttttataagataaaactatacttaaatattatagtttggaggacaaaaatcttatttattatcttattaactaagtattgagtagtgaaccaaaaataaagtaacatgttaatctatttattatttatgtatttattttttttttttaaaagacagactacatgaactttaatgagaagaattgtaacaaaaatatatataacataaaataagcttgaggcaatatacatatatatatatat

SEQ ID NO: 97862 - DNA, 1357 bp, Cannabis sativa
acactaaagtcggtggctgcaagaatttaggttgttaagttagttatgtaataactaatcttctttgagtgagatctccacgtcagcataaaaagggtgcatttgagagtgagtatgagggctcccaaagtcacagatgaatgcactcgcttaaagaccttcccggataggaacgagccaacaggagatgactatctaggactcctttttggaggaggactagcactacaacaaaagatagtattaggggcgagaaataattgcctctaataactcattattagggacgatattcattagtcgcccttaaatgattattcttattttttatttcaatttaaaaatttaataggggcaatgtttaaaatttttagggccaacttatcacccctaataattggacaataaatatttgatgtaaaacaattatataaaaagactttgtggaaataattgttattaggggtgcctttttaaatttttaggaacgacctttgtcgctcctaaaattattttttgtttattattaatattattttagtaacatttttattttttttaataattaatatttaagttttttattattaattttttttcacattttataaataatgataattttttttaaaagcaatagtggtgaaattttaaatactaaaaagtctaaaacccatttcaggatttctaaaaaaaaatcatattgaggaaaaaataaatgacaaaaactccaaacccatttgtgtgttcattcccattttatgttccctctactcagctccgatggagctccccaacccctaaaatccaaaacgcctacgctcttcttctccctcatggccatttcttaccgtcgacagcatttgcagtgtgtgattggtgaaggcaaagatcgattgaaggagatatagagtaaatcacataggtaaaccctgttcacatccttttgattttgaattttgatatatgtcggctgcagctcaaattggttgagtgctactctgttgttcacatccggctgcatgttaggctatttttagcctacgttttgggtcactttttatagttgttttccttctttattattatatttggaataaaattatgcttgttttctttgggttcaggtttcacacttggaatatatcaattgatcaaatttcggaaaataacaatctatagaatagagaaaattttgcaagaaaataaagttgaaacttcaagcttaaatttgactatgttctcattagatttcggaaaaattcaaaacataaaagttttatatttctttttcttctttttaacgcatcttgaatcaactcatttagagtttgtatgtgaaagttatgcacatttt

SEQ ID NO: 97863 - DNA, 3085 bp, Cannabis sativa
catataatacaaatatattttaaactgaatagatcgaatgtacactacaaaaaacagttacctttagtgataactttttagtcacaatataattttttgtgactatgtgacttttggaactaaaacataatatttagatacaaattgttactaatttaattagtttttgtcacaataatattgtgactaaaaataaatttagtcacaacaaattgtaatttttatgactaatatatacttttcgccaatgaccttttagtcacaacataagaatactgatttataattagttataacttttttacttttagtcacaagttttgttgtgactaaaagtaacattttttgtagtggtatattctattaattcatctatataaatttaaaataaaattaaacatttctttatatatacaatttttttctttttttgcatttgctattttatttattttaatttgctgttggggatataaaataacaattacttattttatcttactgctagttacgtgaaaaaaaatatgtttttttttttcaaaaatattaaataatttaatattgaaaaataactgatccactatgcaaaacgattggattatatttgagctatcatgtggattggatttgatccaaaatatgaaatctgcacttaaagcagatcggatgcactatgagcaaaatagtacggagtagattgaatggatactcctaatctagatctctctagaaaagttatactctcgtctatattgtctatcattcaatccatgtatggtatgaattacttcaccgatgaacaccattattggtcctccaacgttagtttgaggcattttctctacctttatatctcaccctgaaaagacaagagtactttccgtccttgaaccaataatcatttttttagcctttctcatctcttgagttcaacaaggggtagtatgggaatattcacctgttgtccattgactaaatcttttagcccttacgttaggccctgactcaccattcgtagaaaaagactaaaatgtacaaagttacaatgagcaaggggaaaggtggtactatctattaaatgaaaacaccctaatcatttttttcttatatattttttaagagaaatgctaaagggcaccagtagtgcctagcacccttctatgtgtcaatatcgctattggtccaaagtatcgcgcgtgtcccatataatttaatacaacagcttttaggcagtatcgctagccaatcgcaacgcgatatgtcgaaaaggtgctagacaccactgatgccttataacaatgctcatttttaagcccgcgcattgatcataaaactagaaaagcataatttttttccaattaaatcattataatatttataataaattaaacttattctaattttcaattggaaagtaattgtataatatacaatatgttgaacaagtacctttgcatgaaataaaatttagcacaatgaaaaataataattaatataatatgtgaaataattagatttctaataatgtataaattaatatgagactatgaatctatactaaacaaggaagctgctggtattagaggaaaataatgaaagtgaaagatagaatgacacaatacatgaccgagcaacaactgaaacaatgtaagtactttattaatattagtcattataatttgttgactctagttcttcttcattgtatcaagcaagacataaaaaatatatagaatgtttttattttgcctaagattggttggagaaattatagatgatgacttgtatataaatcatgtataaataagtacacacagacctattgatggtgttgataagttgtaaatgatgttttttgttgtaatacaactcaactgttgacttagcaaaataaataaataaatatataaatcaaccatgcttgtatatatcaattaggtcgtcataaaaaaaagtcattacttcataaaaattaaaattaattaacaagggactttaatctacaaaagatcttcaagaagagtaaaaaaagtcttctcgattaaatcaaatcaattagcaagatttgcatatatactgctcattggattgctatgtctaaccacacatacctctcaattaataacaccacacaacacaagtacttattctatacaatagattaaatttttttacaatgaactctttaagagtgatgtattgatgtgttcttatcaatttcagtatctgagagatttttttaatctatttattagattgtttttagtattatttttaaattaattttagtgtgtttttaatttacttttactcgtgtttggagcaattttacgcttttattattttttatttttgtagatttaaaataaaagaagaatagaaaaaatcgacagaaaaaaaaagatgaaaaaaaaaataaaaagatcaaaaaagggataattgtgcagatggggaccatgcctatagacatgaaaatcacatgcctaggcccgtgtcatgtgaagcatgaagacgtgtgaaaagctcggcacaggcagcggcataaaaagggcatgtcgcggcccgcctacgtaattaaaggcagaataggagttttcaacgtgggcttatctttcctatctaattcgaagctgaataatttttctgcatgtgctatcttatgctatcttttttatccctcattggctatataagaagtgaactttaattgatttcatcaagcaattcagaaggaaatgggaagcaatcaaggagtatgaattttggaaactcgaaggcttttataacggagttttcaacatttcttctctattttcttcttctattctgaattaatatgtgtgaatttgctacaatgaatatgagtagctaaacagttcattagggtctagatggagattgtttgatattgatttttggttttaatatgatttaattttccctcaattattatgtattctattcatttgtacttaattacttattattgcctaatcactaattaaatgtctatgattttgatgcgagatctgagaagtgagttgtcgattatgctatagtaaaatagaaccgaatttcgatatag

SEQ ID NO: 97864 - DNA, 1435 bp, Cannabis sativa
ttttttttaattgtggaaaaattacaattaatgtgcaaaatcaaatcaactaaaacttaatcaataaataattagcaatgataagattaataattcacacacaacaattagagattaaaataggaatgagtagaatattaaaactagaaacgataaagcaataaactaatagaattaacaccaagatatatgttggttcaagtcatatagatcgatgtgatttatggtcatattccagttctgaaataccaccaaatcctctttattgattgagcaagaacagagtacaatacaatcgagatcaattctcttttgtattctctcaaagtatttatctttcacactcttatctaagaatattctccatttacagaagattcttcatacaaaacccaaactcaatctctcttttctctatacctccctctttatctctcaatctttctctctcaagatcacttttctcgaaacttgtctgaactcattcttcttctaaaagataagtgtcggtggtatttataggtttcagggatatagatcttaaaatcggtggttgtaaatgctaagcagttaagttagttaagacttaacaaactcctcataacaatatttccacgtcaacacaagtcaaagggcttccagatgagacaaatgctttcgggactaaggactgaagcaaatactgaagggacttgccggataggaagagcatagttggagtcgactatttggaactcccttccaagagggaacaactagtcatctggaactccttcccagaggaagactagctttctcgaaaactccttctgggtggaaccaatagacattcgggacacctctccgaatggcttttgtcattccacgagacttcttccggatggacaagttagagttcagagaacgttcttccagaagacatctaacgtgccataaataaatttttttttttaaagatcttttcatttagaggaactataccccatttcaattatattatttgattcaaaagttcaaatttaataaattaacaataaaaatataattgaaaatttttaactttatatgattttgcttttcttttaggtttacatactgaatgtaaattgcaaatttaatctatttctatgtttcacaaatttttgttaattacaaatttgatttattactaagtctcacaaattttgtctttagtcataattttgtatgttagactttttattttagcttacattaatatttattggtttcattaaaattaggttgattggatagttctttattgtgttagtgcataatatcagtggtcaatagttaatggacttagtatctctgtgtgtgtaaagtccaatacttgaagtagaagtgtgagcttttctaattaacttgagcttttggtgagcatgtctaatccaactagggttacgtagctaag

SEQ ID NO: 97865 - DNA, 542 bp, Cannabis sativa
gccttgtcggtatcctttgacttcccgtcgatacttagaagagtacctactaagctgtcacacacatttttctcaatgtgcattacatcaagattatgtcgtaagggaaaatgcttccagtactcaagctaaaacaaaataatttttttagaccatatttttttgtcgaatcagataagttgtattgctcacaaatcccatatttacaaactatacagcaccatacaaggcctggaataatctatacatttataaggctataaaccattccttttcttcctttgtaatctttgtatctacataaatttggactctttgcttcactcctttcataactagttgtgcacaactctcaacagtttgcatcctgctattccaaaagtagtcattcctattaatccaaatttgatacaccatggctgctacagttgctgcatatactttccttttgaacttagaaatctttgctcgagagatccatctcaaagtatcttttaatgttctgattgtcccatgctagccaagccaagttttaacaactt

SEQ ID NO: 97866 - DNA, 534 bp, Cannabis sativa
tctgaagttaaggaatttgaattcaaaagaaatttgatgagaaacataaatccagtggtgaaggcctatttgttcgaggaagaacaagaaagaattcaggaaaccttagaatggtacaaacaaggatcaagtcaagaaatctaactggaaagaattgctattactgcaagaaagatggatttaagagaagaatatcatatcttgaagaataaactgaacagagataagaacaaggagaaatgagaagttgatgttgcctcgagtggctatgattcaaccaatgtcttgattgtgtcaagtgaagtttcaagaaatgaatgaatattggaatcatggcgttcatttcacatgacaccaaacaagaacttgctcaacacttatgttgaaaaacaaggtggaactgtacttttgggagacaacaaggcatgtcaaattaaaggagttggtactgtttagttattgatacatgatggtgtcaattaaaccatcaaacaagtcaagtatgtccctggattaaagagaaacatcatgtca

SEQ ID NO: 97867 - DNA, 601 bp, Cannabis sativa
tgttatacatttatacaaacaaatgaccctgacccacgtggtgatttttttttatttttttttcaagaggtgactaaatttgttcttttgtagagcacattgagtgattttaatttatcaacaaaagctttccttttcccaagtgtaatgcaatagaaaatgacctttttctggaggagattcccatgaagttttatggactagttttcagaagatgtaactataagatagatcatagatggataacgactcctctgttacttttactagtttgtaattggagcatatacacaaacaaaactaaaccaaactctttacttcaataatggctacatatatttctttaattgttaagaaaaatgaaaggcatattacaaaaaatatattgttttttactacattagtttttactattttagtttcagcttcactaaatgatactggatttctttgtcaatattggaaaaattattttacataacattttacaaaggagattgttttaagtacccttttaaatatacaaacttttattgagaatatgaatcttgcttgacctggatatatgttaaagatgtaagataatacgaattatttattt

SEQ ID NO: 97868 - DNA, 509 bp, Cannabis sativa
gacattgggaatgtcgggagtggttgggaatttagaacttcccaaaataccttctagtaccctttatgttatttttgtgtggacggacaaaatggtcattttgtcccaattatgttttgtcctttagtgggcttagtgtaatgtgaatatgtgatttatgtggattctttttggctgaaataaagtttaattatatgcatttattctcattttatccaagttagaaaaattagaaaatttaagaaaaattcaagctcttttcctctctctctctctctctcagcttggtgtggattgctagggctgggagttcttcttgatttttcaagaattttcaaccaatctaagtctaattcaagttgttggtaagctcttgaatcttgccgttaggttttcttggttttgaaggaaaaagaaaatgattgcatgtttagtttttgggctatgtttgctgcagtttgttgttgttgtttcagaggttttgaagtgtttatttgagtgaattcatg

SEQ ID NO: 97869 - DNA, 1120 bp, Cannabis sativa
gaggtattgtttgatctttcattgtatatatgttatcgatatgtttatagtcgttatatatatgctgtatttcatatactatattatagtctaacagttaatatcaaagcgatttaatctctgtcttgatttgtatttgagtttttctgtgcgtatatatatatgcatatattgtgacttttgggttcttgcggtatgatttcttcattttgatttcattcatttattcatgttattattaattttattctatatttatattttatatatacatatacaatattcagttcataaatatatttattcatacagtatatatatacgtataaattcatatatatatattatatataattttattatttctttacatataattaattattatgatttatttatatattattttattcagtataaaaaaacaatatatgcaactgtatatatatatgaaaattttttctgtctgtgtctgttccgattttattttttcgttttcggtatttatttcaattcctatatgcatcactacattcatatagtattgaaaaatcgttttaagcatgaaaacccattttgaaaaacaaagaaatctcaaattttttggaaaatatttttcggactcgaaatttttgtgtgaatttaaagtctttgttttacgtgttttgtaagcatgaaatctttaagaatgtcttaatttttgcatttgaattcatttgggattggtttggacctttttggtcatcagaattgtcttttccgatcgggtttgggtcgagtctgtcggacccgcgtgattgaaaaacgggtcaaaacgacccagtttggctgaggaagacgacccaaacgacgtgtcattttcaacagagtggaaaaatgacatgtcgtttttaagttatatttggctgctgtcgtttgcccagacgacgtgtcgtttttcccctgtggaaaatgtcatgtcgtttttcgtcgttgtgggcagcccttcaagttgaaaaaatgacgtgtcgtttttccccttgtggaaaatgatgcgtcgttttctacatgcatatcagcccttcaggattggaaaaaacgacatgtcgtttaggcagtgccatttttcaaaaaaaaaaaa

SEQ ID NO: 97870 - DNA, 1377 bp, Cannabis sativa
  modified_base (97)..(106): a, c, t, g, unknown or other
  modified_base (1317)..(1342): a, c, t, g, unknown or other
atagaatttataaacatgaaataaatcatgtgaaccatgtaatataaaatgtgatttctgatctttattaatcagtaaatctgattatattgaaatnnnnnnnnnntagggcacaaaacccaacatattaacacataaaataaaataaatttttcaatagaaaagttcacaaaccacaaataaaacaaccaactcctcatgagttcaacacaactacttcccttgagtagttgacaacaagacacataaacacttctcccctttttagtctatcaaagaagtcaaagacaaaagtaaagcaactttggtaaactaacatggtccacatttgcctacaggttccttacccaagttaggtaatcctcgaacaatccttacattggataatttatttttttagatttttgcaacgttcaagttttttataccataaatcagttgtgttatcaatagtagagtgacaagtggcatagatagtgatggtgtagcaattatcattaaatctaaacccttgaaaaataattttatcgcgattattaaaagcataacaatgactactatcaaaattaacagtgaaatcttaatcacaaatttgattaatgttgaggagattagctcttgtgccttgttgtcaatgttggaaatattttattagaatctaaatttactaacatgtatgttggattataattctaaaatttatcattctaaatatgaattttctaaaaacaatgaattaaactcgtaaaggtataaaaaaaaaaaccttatattagtgacagcagaataatatgactcattccattcagatttctaactcttaatcatttcttttgcagagtatgatcaagatctgaatttgaattcttcttcaggtaacaaaaagactataccatctttcacactatcttgagtattgccttgaaatgtgtggacaattactcaatcactctaagaatttgaaattaacaagaagaagaagatgagatttcgaaataatgagagctccttttattttatattgtctgacaaagtgagttaaaaagtgtcataaaataagagctatcatattttattttatggtaactttagggttaggtttagaaattaaatagaatgaaaaaaaagtaaaattggcttaatttaaaccatatggccgaaacttacatgtgggctcataggttttaattttgccattttataagtctttattattcttttcaaaattaccatttcattctaactttgtaaatgctgattttatctatttaataaggctaattcggatttttgtcccctgaactattgagattgttnnnnnnnnnnnnnnnnnnnnnnnnnnattcaattttactatttcagtgattgtttatgtac

SEQ ID NO: 97871 - DNA, 565 bp, Cannabis sativa
aagtttgtgtgttttacccattaaacttcattaatataattaaatggacattagtaatttatatttataaagaaaatataatattctttgacgttaagctatactcatttattataaattaaatttttcagttttatgttagaaatttttacactaaaaatacaaaatagacactttattacatatatatatcttcacacggttaaaccaatatttatatttatcaactttattttattacacttttaccacttgcacacacactccatgcagcagtacacgttattgattgatgacttatatcaatcatatctgaaatcatttccctctctttttcttttctttttcttttattattttcaatttcttttcagttttttttttttaaaaaaaaaaataaaacatctatagttgaactcttctccttccacgatcccaacctgttttccctcttcaatgtgttcttccatttttttccaactcacgttaaccgatttacataactgttttccctctctttcttttgctcttaatccatttataaatatggctattactcgttctt

SEQ ID NO: 97872 - DNA, 794 bp, Cannabis sativa
caattcccatatatatgtaaatccgtctctaaattaagaaatgggaaaagaaaaaataatgaataatgcatactacttacctttattagctctggtcttatgtataataatttatgaagtgtgtccaattagactttctattttggggtttttattttgatatatttcatgtattcatatatagatagctgtgtctatagatcatcagaccacctgctgtgttgctgatctcgagtatcataatgttttaagcttaataaataattagaatgagtacgtcgggtgtctcctttacagtttttcttttataaataataaattattataaaacatgtacgctagcaggtaaatgatattgaacatgtatatttttgaaatcacatatattcttagctagaatacagtaaaaaatatataaaataaaataaattacactactttgtttctataaattaaaaaaaaaaatgtgttctacacctctcaaaaagaccgtttgatgtagtcataagcataatttagtgatttaatacacttttactcgtattgatacgccttctacgtacctctacattcagtatctatttattaattttttttcatacactataaaaaattgttacttttaatgataattttttagtcacaatataatttttttttgactaaatgtgacttttaatcataacataatgttacttgtaactaaaacatagtattaagtaataaattgtcactaaattagttttaatcacaacaagtattatgactaaaaatatatttagttacaataaatt

SEQ ID NO: 97873 - DNA, 1323 bp, Cannabis sativa
aaaaatctctaggccgatgtcattgggttgggtcattaaaataccctcaacccggctaacccaacccatgctcagccctacttgactcggaccttaaaccctagacccgtactcggatctgaaccccagatctagacccggaccccaaacccagtttcaaatccagacccgagccctagattcgtggatttggactcaaatccaagatcccgacccgaactcagacccaaccccgggtccgagtgcttgacctcgacccggacccggttcagggtctaggttcgagtcacggtctaaatttgagtttggggtttggggcccaagtctgaatacatggttcgaggccaggtttgaggtccaggtctggggtccaagtttgggtctggggttcgagtcctagtctagggtccgggtcggggttcaggattcagagtctgggttgaagtccgagttcaagtctggattcagggtctaggactggggttgaccccaggccctttgtaaatattataatacaacctaatacaggtcatttgttatgtattaaataatacaaatcacattgttttaattttttttgtcgtaataattaatacaatacaatattttattcaaacataatattatttattatttaatacaatatgattcttatacgacctaccaaatgatcctttgaggtactaatcatgaattattactatacaagtaaaattctactatgtagtaatacatgtaagtaaaaaaaatccactatgtgtagtaatttcaagtattgcttgaagtggtgaggtgtctggtccaaatgggtgaaattagggggtgatatacgaaggtgaactgtgatgttggactttgttccaaagcgtctaaaataggtattggtactgttgtgagggacaatgatggttcaacattggcttctgctaccttgcgtttcaatggtcggtatcatccatttgtggccaaggcttcgactgttcatgctagcatggggttgtgtcttcggttagggtacaatcgtgtgctttaggagtttgattgccttccttatgggatttctttcaaaaaaaaaaaattactattatggaactcatgaattggccctcttatacaatttttttaatgaaatagcaacttcattaatttagcattcagattacaaaatatccagcatagctgctggtgcattggacactaaaatgctacaaccagaaaatgatcgtgacatcctagcaataacatgtgctaggcagtttgctgatcgttttacaaaatgaattttaactaaaggcatagatagcagaagtgagtgacaatcct

SEQ ID NO: 97874 - DNA, 846 bp, Cannabis sativa
ttttgatgttaataacacatacttagtaaatctagatccttttaaaataattccaatagtccacacgttcaaggataacccaacgtgaaggtggccagaactcaaaaacagggtatgaagaacccaacatgagtgttggtggtgctcaacccatggatgatgatgatggtgcctatgatcccacgagatacgtgccgattgtagagttggaaaattatcatctcaagcgccgcctgtagaagacaaaccgacgaaacactgaattagaactagaggcagcgcagctagggcagcacagaaaaataacacacaaaaccaacctaatcctggagtgaggagaccaggaggtagacctcgtggttcacgaactaggaggaggagacgtctcaagaaaatcctcagaatgctcaagaagaataacctagagaaattgagggtccccttgagaatgaacaactagatgacaaactggagccttctcatataaatgggaacagaaggcaacccgggaccagggaataggaaatcccccgtgagaacgagagaaatcctgggactcaacctgggacaggtgggttcccaccgagacatctccaatgtccttctcaaaccaacagggaaggggcacgtacaaaccccagcaaggggcatgcaacaacccatacccaaggaaaaaggatgggatgtgacgaggtgagtgccagctcgagacacacaagaacctgtagtcgatcaatgcgaggggggacggaacaactcgttacaataatgatgatcatcgaggagagagtacatgcacaagtagaactaaaagttactttgggatgaggtccatgagtaggacaa

SEQ ID NO: 97875 - DNA, 630 bp, Cannabis sativa
aatacaactattagcaaactgttaacaaataacaccataccaaacctaaacctaaaacaatacaaatactcattacaaaataaagtctaaaatgaatagaaaaaaacacagcaacaaactatttatgtcaaaaaaattaaaaaacaacctaaatctaacaatattgtagatcaataaacctaccactaatataacaacaaaacaaataaaatatatgaaacctagaaccaaaatcacttgtaagaacactaaaaagaacagatacaaaatttctaaattaaggaaatatagaaaaaaactaaaacgaaacttgaggcatttcatcgatatttttcttacccttcttaacttgtggtatagaactcttatcacattcattcctcttcaatttcttcttcaaaggacgacctttatgtattgttacaggttcaataaaattagagccgaccctgagttgaaatgggccttaggcaaaattttttttttgggccattactataaagataaatagtatgttaaaaattattaaaaaaatgttatattatttataataatataatatatagattaaatatatgtaataaagtaataaaatgcaacatatgacaatgtatattttttttttttttt

SEQ ID NO: 97876 - DNA, 552 bp, Cannabis sativa
aaaggtttagtcgaacccaaaaccccaaactgacaaaagagcatacttgcaaaatattataagtgaccaagagtcataagtttgctcgtttacttgtggggaacttatacctatagaaagcatttggtaaaaataaaacaaacacagttgcacgatgattataaatagaggatgaaattcattaaagataacaaaacacgtaaaacctggattaaaggctgcccggtcagcctgttatctaaaaaattaaaaaataattccaagtttaaaaaccgtttgggcagtcacattgtcttaaaaaggccttatggccggacagatataaaaaaaaaaagaaaaagataaaaagagaagtattcagaaagctagagtcctaggctctttgtacgggtcttctaggccagtaggagctgaaggatttgttgtctgggtggggggcatgtcaatgtcctggccagaggtagaagtggtcgcctcagattctccataagccacttgagaagtgcaatactcgagaaacaagtcttcggaatcacccaagtaatcaaagtt

SEQ ID NO: 97877 - DNA, 520 bp, Cannabis sativa
ctgagttttacgggaatagttctgctagaaagccattttcatcattggaaacattaagcttcagcaacatgtcatcatgggagcaatggcattcaatgcaaactgaagaagcaacaacatatgggaagctcaaaacacttacgatcaatcattgtcctaagctcatcagagatttgcctcgcttccttccttcattagcatatattagaattgtaggacatgaggaacattcattattaagtctcccaagaataccatgtgtcacaaaaataagaattcatcacttggagaattcagatatattgtacaaggcaataaatccaacaaatccttcttccagttctacaggatgtttcccttccactcttcaagagcttcgtttgttgtcttgcgggtcatcgtttggatctctcaatgtggatttgtttcccaatctcaaaactcttgaaattgctttcagccaccatattgaagttgtctcaatgtccgatgggaaatctctagaggaactaacatcttt

SEQ ID NO: 97878 - DNA, 918 bp, Cannabis sativa
tcatctcccattagagatggtctaatgtggtgattgtctatgtaccaaatctatcaaatcgtatcttccaaattttgacatatactaaattgtattttctgaactttcattcatatcaagtatccgttaataaaattggacaaaaattcttaaatctaactacctgttgatgaaatttccacacagcctatttatggtttgctttcaaataaataaatgaataaacaataaaataccgattagggttcaatatcaaataatacatctcctcctccacggtgtctttgtagacttcatttaatttaattttaatccatgcctaaagaaaagggtggaaagaaatttgtccaattggactcaactatctaggtgacgtttagtaatatttttgttttttaattttttaatcacaaaaataaaaagtaaaaattttgtttttgaaaaataaaaatgtgttctataactacttttgttttttcaattttaaaaacaaaaaataaaagtatattctgtaaattttttttttatttgggatttttacattaatatacacagttatcaaattatttacattaataaccttacataaacaatcatcacaaactgacgttccacgtcagcaaaataacgtaccagagaaatttttgccttttttttttttaaaaaaaaaaaaatcaaacttttgcctattatcacttattagtagttgaaagtcaaactttgaagaaacatgtgcagtccttgcacgtttttttttttcatttttctttttaacaaaattaggtgtattcctttttctttcctttaaagaaaaatattaatttctctctcttaatagattttttaaaaaagaattctaattatactgctaattatttttgtttagaaaaaataccatcataatttattttttaagat

SEQ ID NO: 97879 - DNA, 991 bp, Cannabis sativa
ttttatatagaccttcaaactagcaagaattttgtaggaaataggattcatcttgaatgggcaaccccaaggtggtttattaattcttgaagtagtcacgaagagggagtgtgccccctacgctaatgtcttcgagactccaggcaccaatgccagtcgagccactggtactggtctcaccactagctctcttaggggtcttcaggcatactcgcccaagttcgattccacaggtcttcattatatcacctgtgtagccagagatagttcgcaccttcgattctattaactcagcttcaaaggtgacgctgggatcctgaggagtctttgatgtacgtggcttgggagacattatttcacagtctaagtaacctggttcaaatgcaatcgtgactttgggtaaaacaaaggcttagccataggaataaaggacacacttggaggttctggccaagctgcatctcgcaagaaatggcgtttgccttcgatgatttcttgcaagaattttatcaaacctaaaggtggtgagttgaaggttgtgaaaaaacctacgtattgcctgaaccctaatgttgacccaaatacaattcaaccccaaatactactaaaaccaaatgagatggcaacgatacaaacaaatgatgcagcaattaacacaatgtaacaagcatgtaagctataaagaagaaaagcaacttactgtttgaagttagggtttggggcgatagacggttgttcggcttacaaatcttcgaatatagtaaggacctcttcgagaagatgaaatcggaggaaactcgcaaaaaaaatgtcaaggacagggatggcatgcaaattctcgggcaaactcgatgctgtttcttagcaaagaagcttaagagattctcagaatttctaaaatggaggaaataatgcaaaggtggctcctttttcttacattatactcttgaagtcagttttgtcggatcagagagatgtttgatcctacgga

SEQ ID NO: 97880 - DNA, 1390 bp, Cannabis sativa
cacattcatcttatatgtttagcaatccatctctctttcattctgcagttagcaaaaatattaatacttggcattgcaaacttggtcatcccaatgaccaagtctttagcaaattattacatcatcttcctcacaatggcacacttaaagatcttaatttttgtaatgctagtcaacaaggcaaaagccactctcttccctttccattatccaatacccgtgccacccaacctcttgctttaattcatactgacttgtggggaccctctcatgttctttcaaaagatggatataagtattatgttcacttcttggatgattatagcaggtacacatgtatatttcctttaactctcaaaggtcaagcctttgaagttttcattaagtggaaagctttagttgaaaagcagttcaaccttccaatcaaagctgttcaagcagactggggtggtgagtataggccattcaaaaggtttttacttgatcaaggaattcactttcaaagtccttgtcctcatactcatgagcaaaatggacgtgctgagaggaaacatcgtcatatcaatgaaaccggccttaccttattggccaatgctggtcttgatttgtcatattggtggcatgcattcagttcagccgttttcactattaataggcttccaacaagagttctgaattttgctactccttatgaaactctatttcacagcaggccggattacaacattctcaagccttttgggtgtgcttgctttccacaccttaggccctacaataagcacaagcttgatttcaggactcagcaatgtattttcctagggtattcttcccatcataaaggatacctctgtgaaaatactgaagggagaatatatattgctagaaatgtggtgttcaatgaggatttctatcctcaaaaagctgcctctgcctccacttcagcagcacactcgcaggtattatcccccactcatacaccttttccttgcaattcttcattttgtcctcaatcaactacatttactaacactgcctttaccactggtccaactgttgctactgaggacatacctgctagtcctgttactgatgtgtcacaatccgtgaatgctgcaactgagaacctacctgctgctgcctcgttatctggtgtgaacaatgctgaaaatgacaggtcacagcgtgctcctgctgctacattacctgctcttggtgctgttgtttctccataaaataatattcatacaagtggtcctcatacacatgacacaccacattctgaaccacctgccaccgctgttcccttacccgaaataactcaccctgctgtccctctcaatgagtcaaaccagatacatatcaactgtaacgtccccgcttcaagcctcca

SEQ ID NO: 97881 - DNA, 625 bp, Cannabis sativa
tatttcgtgccctgctattgcgtccacaagctgagcgattcttggaagtggaaaacagtctttggggcacgccttcttgaggtctgtgaaatacatacacaaacctcttgggtgccagtatgggattagcaaccgaattcgggtagaaagattcaattatgaatttgttatttcgtagcttctctacctcttccttcagggatagagctcgttccttgtccaacaaccttcgcttttgttgaactggtcgatagttgggatcaatatttaggatgtgcgaaattacagaaggatcaattccgaccatatcctcatttgaccaggcaaaaatgtccaacaaccttcgcttttgttgaactggtcgatagttgggatcaatacttccttcttatccttgcctatggcaacattataacattcttgagcaaactgttggtttcctcttagacaccctaccccattctttgtcaggaacttaaggcatgaatggaatataaatgtaacagcctttaagtcatacaaatctggtcagcctaatatgacgttaaaggttgatggaatgtccaatacaaaaaattgggccattatagttatgcttgttggatcttgtccaacagtgaggggt

SEQ ID NO: 97882 - DNA, 833 bp, Cannabis sativa
agcatgcaccaaaacatgcgccacaactttaccaccacttggccaacttgtgggcatcacttagcttgtaacgtgccatcttagcacgcactttacatcaggcaaggtaacggaaagaaaggaaagttcactggcaatgctgagtaccacccttgggaaagtggctcaaagtttactgccttttctgtcctaacagatgaccaagagacaatacacgcaataacttagtctatggtcccattcaagaaaccctctcccatgaagaaggacgtgagtaaaagagatacgtccaacttttgtggctttcacgtaggctatgtccatgacacaaacgaatgcaataacttgaagcaggaaattgaatttttgaaaagaaagaatagcccgcacttgcaaaagtatgtcaaggccgattagaatcaaagggccgcccaaatagacaataaccaaaatcaattgatgccttcaccagttgacgtgcatttacaagttattattaggggtccgcttcctattggagactcgggctaagcttgagaaaagtatgcccgagccttgcaatacgaacaaaagaaaacagttttggccataaaggagagaaggtgaaaaataccacaggtaggggaacctacaataactttaacttcagcagattctaatcacatccacttcccgcacaacgacccctggtcatggaagtacatatatcaaacaagacagtggccaaaactacgatagactatggagcctcctcaaacatcctattgaagaaaacctatgagaagatggggctccaacttaaagatctaatcccctgtacccaactcgtatat

SEQ ID NO: 97883 - DNA, 550 bp, Cannabis sativa
  modified_base (35)..(37): a, c, t, g, unknown or other
gtccgagtccaggttcgtatctggatccctatctnnntccaagtctgtgtttgggatcgtgtccaagatttaggtccaagtcccgttctcatttccggcctgggtacacaaccttgtccaggcccgagttccagtctcagtttgggtttgttgccaagtctgcgttgggttcaaggtctgggtccgggtcctggtagcggtcctagtcttgttctagggtcctggtttggcaattcttgttcaggttctaattttgggtcccaagtctaggtcagggttcgggtttagttcttcgtctgggttctggtcctatctgagccccacatctatacaccaactactggtctgttccaggccccgttacccgtatcgtgagtcaagatctagatcattgtcacgggtctcggtctggttctgatttaggtcccaggtcccatttctaagttttgattcgggatcgagactggggtgaggttctaggtcccgaacctgattttctgtcccaagtgtggttccatgttttggtctgagttcaggttcgggttcgggt

SEQ ID NO: 97884 - DNA, 813 bp, Cannabis sativa
gtatttatagtattttttttggggtgatccctaggaatggatcacttgtctttctgtgttagcttcataggggcacatattcccaacaaatacataataggaaatacatgacctagaccgtaggtatcttaggagttaggtggatacaatcttctatcccctttcgattgatatgattccacataaagtggttgtcactagcgttattgattatagtgtaatagccaaaaaagggggttacgccatctgtcatgtcgtttatggagatttcaatacatcttctcccatgcggcattaaatgcgaggtgactgttaaagagatctctgcacctcccggaacttccttagcatacctccggcctcccgaagagtagaaatgcttcttgtgctctcctcctggagacacctccctgagatactcccctttcgcctaggacttagtcgatttttcatgtgttgattcttacagatccacatgtcagctctatccaggtccacgtattttgggaaaaattaagggcaacatttaccccccaagccttgtttagtgaaggataaatgaggcttgtttggtgcctcctgttggcatattagtttaatggcacgtgcttcaagagtgtgggctgcatttatgatggtcatcattaatatttatttcctttcgtaggcaacgattcgcttcctgtccattgagaagtcggcgcatttaatccgagtgtcaataaagtaatcaaacgttttcaactgccctggcgtccatttgtctcaaccgttggatttgtagaatgtgaatcgattacgattcccactgta

SEQ ID NO: 97885 - DNA, 706 bp, Cannabis sativa
gccgagactgaggtgcgcctggcaagggccagggctcaagaggtcgagctgagccgctgcctcaatgagatgaagcgcttcgtctccgtcatggagatccgtgagatctacctcaagcgacgtttccgagagcaacaagatgacgttgtctgcttattctctccgccagtgccgcattcttgaaattgcatttatctcctcggtgatttccttactaaaccctcgttcacatcataaatatattttctttttctaatgccattttgattttttttttcatttgtttatttatattccctatatagtttaatggggtctttttttgttttgacataaattggtagaaacttgtgcttgatttgattatactactttggtgattcggtttgaacataattttataggttttagttctattctatagtgaattgatcatggagtcatatattcctgacaaggaaatctgagatttagggtttaggccgaaagggagagacggcataatttttgttgcaggccagaggggagagggatgacacgtaggtggagagagaatttctgggcttggacgcttaggaatggttgagttgaggtttagctagtggctcagagtgattttcggcgaagaagatggatgtttaagattgagatggtgcagctgagagatcaagagggtgggtggtgagttttggtggttggttgacaa

SEQ ID NO: 97886 - DNA, 991 bp, Cannabis sativa
ttatacaatgatttagcctacgaaaatttaaaactattgtaaaaaaccgcacgaagcgcggattagttccctagtagatatatataaaataattctatggtagtcatgactatatttttgtacttatacttttttaatcattgatctatataatttttaaaagtcaagattgtcaagattgtgtaagatgtatttgtttgtaggtaattaaatttttcttcttgaaacaaaaaaatctgacatccaattaaaaaaaatcaacaaccaaacaaaattaactttatttttttttaaaaaaaaaaaaaaccaattttttaatcttcatcttctcatataatctattttttcttttctccctttttcatcatcagcatcatcgacatccccctcaaagcagccccttttttccattctccctcatccttatagccttctaaccagactcctttttccattccccctcatcaacataattgacatccccctcaaagaattttatattggcatgcaagatataacagttttataattaggcaaaacacaaggtatgtaatgtcagtattcatgaaaaaaatactggatatgtaaaattaaatgaaaataaattggttaatatataaatgttctcttcaatacaagcggagatatctcgagggttcttaaaaacaaaccttctgcaaagtgttactcctcacatctcaatgtgagaaatacaaactatgtcttaacattttcaatatatcaaagaattcaattactgctacttaattactgctactgctatgttattactgctacttactgccctgtttttgctctgttagtaatcattgtattcttgtttttacccttcctgcttataaggaattctgttagaagtttgttaagctctctaggattagtagttaagggctttccctttattttcatttgcactgtaatacatattctctttcagataaataaaaagctctctttccttttcttatta

SEQ ID NO: 97887 - DNA, 597 bp, Cannabis sativa
  modified_base (54)..(71): a, c, t, g, unknown or other
cttgaactttatatgtgtttaaagtacattttttaaaaaattcatatttaggannnnnnnnnnnnnnnnnngtagtaaatctagattctggtaaataatccccaacatgagatacatctctataggagttatggtgtgcatgagttacatctttttattgagtcaattacatcaatggaggttatgacttatgaattagaatttcaaatggtgatatactaaacactatataaagaggtctaatgtgctcatattgagatgagaagttttccatcaaaaaaacattgctagaaaaccctaaggcttgataattgccaaagctattttcataagagttcccttagtgcttagagatagaagaaataagcttttggacaaaggtgcaataccttgttcaagtcatggtgatccccactaatctaaacttaagattgtgagtgagtatatgtatatttcttcatattataaatgtgttatataatattgtgtaatctattcatctcttttacctttcatatataaatgtaatatatatagtgtatatatgtgtattgtaacatatatttaattaatctcttattttagtccttgtattat

SEQ ID NO: 97888 - DNA, 538 bp, Cannabis sativa
tctctggactagtgaacagcccatcgtatagtgtttatgctgaactgcattcacattcatctctaaaaaccttccatgaaattaacgtacaggaaaatggaagacctgatatgattataagctttatttgcactgaaagagaacaagtgaataaatatactaatacctgtttcaagcaaagagaatcacttttatcatcgcaggtgacgggaacatcaccaattgggtcatcccttgcagtggaagagctacacggttcacagggaccatctgaagtaatgctactttcttttacaaactctgaatcacctacaattttttatgtgtcagacttaactacatttctattttaactgaatgagatgattttcaaaagatttttgtattaaagttcaaacggtggagaaattaccttcacaactgatattctctgtagtggaaataacagcatcttctacttcaatttcatgagcaatatcatcagaaatatcagtgtttgagttaggagcttctgctttatgatcagggctgttgccag

SEQ ID NO: 97889 - DNA, 873 bp, Cannabis sativa
cacacttaattgctttcctatttgtctgcatgagcttctcaagtttctcaaaaggacatgatcacatgaaacaaagtttatcctttgaacttttttaataattgcatttgtttgtaggttttgcagttaatcatctaagggtctaaattggaagagaaacacaatttcttccaagtgctgattggtttgctggctagctaaaggtatactttttctatcttttaattaattatgaattaataagcatgctagatgagtttgaatatcttaaatattcatccatagtgaagtaggttttgtgaatacatgtactgcggtcgaatgggtggaaattactttttttatttttgtggattgttatatgttttgattttatggttaattttttttcggaaacgtctgatttatagttgttatgttgccgaaatttcggttggatttagatatacatgtatattcaatatatttatataattagcttgaatatatatgtctctttgattaattttaacttaagtttcaagtaggatttcaacaaaaaaaactataggataaaatgtgagtttgacaagtgataatacaacggagtgatcaattataatgaatgaactgaaatatatatatatatatataatttatttatagcttggtccgataatggccctactgcaaaaacaaacttgtaactttgaattatcaatcatactgcataggttgaactcgaggaaaaagtaaattcggatgaagtttttgccagtgatcggaacaacatattgattcaagcattagagacacccgagcaccctggccgggtcagagctgctgggtatgccactttcttgatttaatgttagattgtttttatttatttta

SEQ ID NO: 97890 - DNA, 967 bp, Cannabis sativa
ttcggcggattgatgatgatgatgttgacgatgacgatgacaacaatggtatcggtctaattcgtcctccaactagcagtattgagactttgagtgccattctggtttccaatggagtttccagaggtaattaactccatttgatcaattcttgaattttgtaagattttttcttatttctgccttttaaaacaaaccatagaccatgtttttgctctccatacaataataataacaataataccaatttgaattgtgaaaccattgtgttgtttgttatttgtaggaaagcgaaaagatcccgaggctccgattagacttgttaccaagtcttcaacaattttaataaagaagtcaaaaccggaggagaagaaacccgacgggtgcagtggcagcgtactgcagtctttgtgttcaaattatgggagtgatgacagcgattagatgagttgggtttttgcagctgaaattcccaacactgttattagtccttgattattatgtgttataaaatttgttaaatattaatttgatgtacatatacaacccctttaatgtccttgattaacttcatttttgtctttgtccaagtttgatttccagcccttcccaaaggtttctaataatatttacatgtatactcgttcaacttttttactttcttccaatataaacagtacattataaacaataaaatatttattagaaaatgtgtatagattatgcagaaaatataagttcccaattgttaatataaaaacactcttttctggaaatgctagaaattgcaaatatttgttggaaccttttaggctttgtagcgcgttactaagatgttttttttttcttttcttttgaagtaataatttttctaacatgcatgaaagttcaagagacatgatttagtacatatcaaagtttaaggggcatgattttgtagatataaagtctagggagcatgatttag

SEQ ID NO: 97891 - DNA, 554 bp, Cannabis sativa
cactgcaatatgtgtgtatcactcgaccagagattgctttctctgttaataaagtctcgcaatttatgcagaaccccctgcaatcgcattggaaaactgtgaagagactattgcgatatctcaaagggactcttcatcatggcctacatctacaaagaactcccactcttgatatcacaggctactgtgatgctgattgggccaatgatccagatgatagacgaagcacctctggattctgtgtctttcttggcaccaatttagtcacctggtcttccaaaaagcaacctactgtctctcgaagcagtactgaggctgaataccgaagtctagctcatctcactgcagaaatcacatggcttcaatccttgctttctgagttgagcatacctcagtcccgatcccccattgcttggtgtgacaacctcagcactgttcttatgtcagccaatccagttttacactcaagaacgaaacatatagaacttgatctcttctttgtcagagaaaaagttcttagcaaacaactgtttgtctatcatattcctgggtgt

SEQ ID NO: 97892 - DNA, 603 bp, Cannabis sativa
  modified_base (404)..(411): a, c, t, g, unknown or other
tctattcgagaagaaaaaataaaacaaatatagctcccctcacattatttctttttaattcttttcaaatatttgtatatcagtttctaattttgatcattttattctaatttatccattcatattacttcatacttgaatatgtattgtagtgatcaaaatgtatcgttgtattggtgtgggctgacaacaacatggagtagactgcgggatttacttgaggatcaacaacaaagcttttctttttataggtatcaattttttgagttactgataatttttgcatcaaatcttgatatgggatttatatagacatagagagctttgagattgaatttaaagtgttccgctagttgcaataagggttttcatgtagaactttgtaaaaatgtaaaaaaaaaaannnnnnnnaagtgtaaaaataaaaaaaattatttattttataatgtttcctaccttttttttttattatacattcttaataattattaatgaataatgaaataattagtaatgttttgtttttatatatttatatatatatctttaaaatgacaacggtatttaaagcgaaataccgtcatgataattgttttgaatgta

SEQ ID NO: 97893 - DNA, 717 bp, Cannabis sativa
tatgaagaaaaggggaaggaagacatggtttagaaactgattaagtctctctatggacttaaacaatctccaagacaatggaataaaaggtttgattagtttatgatcaggaaagggttcactagaagctactatgatacctgtctctactacaagggcacgaaaattgaagaagtcatctatttacttctgtatgtagatgacatgctcattgtgagcaaagaaaggtctaaaattgaccttatgaagggttggttaagagaagaatttgaaatgaaggacttaggcaaggcagctaaaatcctaggcattaatataacaagggatagggggaatggaagtctaagactacatcagaagaattacataaagaaagtcatagaaaatttttctatgacaggtgccaagaaaactaagcaacctatgactaatcagtactatttgagcaaagaccaatgtcaaaaaaacatcagctgaaaaggaagctatgagtgaagtaccctattctagtgctgtgggatcagttatatacctaatggtcagcactagacctgacttagcctatgccattagtgtactcagcaagtacatgggaaacctaggtaagcaacactgggaagcaatgaaatggttgtttagatagttattgggatctacagaagttgggttaaactacaaaagaagggaaaaaagcagaatgatcactgggtacagtga

SEQ ID NO: 97894 - DNA, 507 bp, Cannabis sativa
  modified_base (453)..(464): a, c, t, g, unknown or other
caaatgctccattcctactctacagatgagtaatacggtgaatcacatcttgtccctccccatggtgaagaggaacataataaggttggccagtgtagccaacttttagaagtacggtctgtatcctcctgcttctggagttataggggccgagggcccatcagttggtgtggatggagccccagctgctgaggaggtctgtgtcgttggtggacatgttcctgacatggatgatgatgtgcctctgttctggatatcccggggtctagagaggagagagaggaccctccgccagtgcttggctcacggtcatgggggcacagttagggatgctactctttggattaggcttggaggctagaactctgtaaggcctactctccttttcctgcatctagattaaagggcaaggcatgatctgcatgagcttgttgtgttggaaattattttacnnnnnnnnnnnntctactcacaagtatgttgtttgacaccctaaatatgaacttt

SEQ ID NO: 97895 - DNA, 809 bp, Cannabis sativa
gacaggatgcttcaacttctatacgaggaccaatctcgtctttgcgctagtccgtcctcttcgagttacggactctctaactcaaattttgaacattaggaagtgagtactaagagttctcctactccagaacccgaggtgcaacatcacttttactacaaacagatcacaggagaaggctatggatgatttgtttgggagcttaggaagggttggagacgttatctatcgtccaactggacttatatcgtctagcctggtgttgctgacactcttcctgtgggcgttctaagctctggtgcctttggcattccaattgctgttcttgccatgactgttgcgcgacacacacaaaaatacccgtccaggagaaggatgatggcccgcaccaaacaaacaatgcggataattaatgcgactgaccctcacgtgacccgactgccacacttccaagtgtcgaacaggacttgtccgctgtggaagagggaagactatgagggagattttgaggtccaagagatagaggaccaggacgacgaccgtcctgatagtccctccgaggctgaggaggagggagtggctcgacctctacgttttggaggatataatgagtccggggagccggtatccaagctgggtgacgtcttgattgagggggaagactatgtcacctaagagtttatcgaggcggtcctccataagaggcaaggtgctctaggggctagatgggtgtgtcctccgtccatcgtaactgagggccacttaaaaaatttggagaaggctgggtatctgggcagacttgagtgctt

SEQ ID NO: 97896 - DNA, 1060 bp, Cannabis sativa
gatttatcagtgtaatgaatttacacttatgtgataatcgatgatgtggtctacttacactaaggcaagtggtatgtccttttaaaggtactggtaaagtagacttgtatcaaatgtataggtctacattagagtagaccgatattgattgttgatatataaacttaccattattatctattttaagtcaatattacttagttgatcataaatcaattcaatctgagtcttgagtgatatgattaagctttaagctaattaattgtatttttgagttcttgtcttgtttgttaccaacttaccttacggactagcccgtacttacatattgagaactcggtagtgcaattaagtgggagtgatgtggacatctatgaattctatatgttttaaaaagtgaaatgatggtttctttttagcttggttaaaagcactaaatgattgagtgctcattttagtaattctattagtttattgaaataccatattaaagaaactaagtattttttaagaataaaatacaatgagagttagaacgataattttagccccaatttattgtagaccgtctatagatgatcattgattattttaattgaaataatagataatttatagcgtatctatattgtatgtataaagtgttttatgaaattaggagtgcaattctggacttatagtcgagtcacaatgaattaataagttagtaaatttattttgttaaatttaagaacaacttattaggagtttaatttcatagacccatgagctcacaatacctaagataatatcaattagatagtctcaattagttgattttattatcagttaaaattaaaaaaaaatgacaccggttaattttggagaattttcactaaattgtgtaaattagagaaaaagagaaaaaaatagactaatttattagttatgacttttagggtgaaattaataaatatattaaaattaagttatttataattattaaagtagaattagtacttaaacatataatcatttaattaattgtgatataattaaaaaggataattaattttgagtt

SEQ ID NO: 97897 - DNA, 1088 bp, Cannabis sativa
  modified_base (570)..(570): a, c, t, g, unknown or other
  modified_base (615)..(615): a, c, t, g, unknown or other
ttaataaatagattaaatgaaaattttatttaataattaatttaattattaaataattagttttgacatttaaacgattgaaattggaaaatatggcatttgtgaaacaaaggataaattattgaataaaaatgacaaaattctaatttagtggggcctatcttatggccggccagttaaggtgaattttggccaatttttatcattttttaatgccatataatttaaatctaactctaggagaattctataaaaggaataagaaagttctcattctatccaactcagtcattctagttttcattctctgtcagacaactagaaaacttgagaacctccttctatagaattcgaacctctcctcttcttcttcataaaattttcgagccttatagtgaaagagtacatgcccagccatagcaagtcaagtactcaatcatagcgtgtaagactgtgaagaatccaacacctgaaggagaatcgagctcaatggataatactctgtgacagaaaagaacaagggttagagatctaagtggaaggagacatattattctgctgcaatcaatntaaggtttcttaactttatatgtatttaaattttttttttttatntttttttttttgaaatggaaatgtgattttattcaacttaaactttcatccattacaatagaaatcaaatcagaaggagcattaagctcattaaaagtacaatctgacataaaataggactgtctagcaacccaatggggagccctatttgcagatcgcttaacataagaaattaagacattgttcaaagaagagaccatcatacgacaatcatgcaccaacataccgaattgagaggtcattgtgacacctctaataatagcttggacaactactaatgaatctgtctcaatttccacatccgataatgctttcttctttatctagctcaaggcctccttcaccccaattgcttcagctatttcaggagtaaccccaccgtgtttgcttatagaaatagcctccacaagccttgctgtctgatctcggattacacaaccaataccaaaacaattttcagcttcaaaaatggc

SEQ ID NO: 97898 - DNA, 833 bp, Cannabis sativa
cttttgcaaaatacagggtccaaaatagtatttacccttaattattttgtggtatttttgaaaaatatgtgatgtttggtttagtgtgaaaagtattttaggtcagaattattgtgaattagattaatatttggcgcgtatatttagttatatttttaattttaattttaattatatatatttagttatataatttttttaatgttatttaataaataatattattttttattaaaaaatatttaatttaagtactatacataaaaaaaaatataataatatttaaaatttattattaattatgcttatagtttaactttagtaatttttatttgataatactttttattttttttttcagaaatatgacacatgttttctatttttttaaatagtaataatacaaatatattttttttttggtaactacaataactaagagtatgtgattccttaagaaagataaatattttatttttttttttttaaaaaaaacaataatagaaatatatttttgtatgtatgtggattgggcaaaataaataataatagaaagatattatttagatatgcgcaattagttgaaatttgaattgcaatgttagaaaataaaataaaacactttatgttatatatccacatttaatataagataataaataagagagatatgtgtagtgaatctaaatttgaattgtaatgttttaaaaaagaacaacactttctgttatagatattttatctcttcttattatgatctaaccgtgtctatcatgagtgaaagtacttgaggcttttatgatcagtaaaaatctcacatttctcaccataaa

SEQ ID NO: 97899 - DNA, 791 bp, Cannabis sativa
  modified_base (513)..(522): a, c, t, g, unknown or other
ctgaattcgttcaagaaatttaggggattcaatatcaacttttatcggtgatggtttaatgattagctttccttgagaacaagcagcacatgaaaactcattagataatagaattttctggttcttcaatggatgaacatgtgagttctctattactctacacatcattattgaaccggtcatgcaaaataacaaatgaatttttttggtttgtgaacttctcgttcacaataacatgagtttatattgtacttatacgtgtaacatacaaacatgatgataaaccaggtaatttttctaacatgcatttttttcttgaaacaatagacgtaatgcaaggatactcaaaattatttttatctattgtctcaatatgatatccattacgacgtatatctttgaaactcaacagattcttttttaatttggtggataataaggcatcatttataataatttgtggtcctctatgcatcaatataatggctcttccgaagccttcaattaaatttnnnnnnnnnnatattgtattaacatttaccttcagtcttgagaaatttgaaaaatatttatcacttctaagtattgtatgagtggttgcgctatccaccaaacatatattatcaccattatttgtagaatcatgtataagatgacgaatgtccattacttcattgaccaacaaaaaaacattataagttcaaaatataaatacttaaataataaaagttcattacataaacatgccaaataaaataaacaccttaaagtaaataaataaataataataa

SEQ ID NO: 97900 - DNA, 2511 bp, Cannabis sativa
attaatttatatatgatcattcattattaggattataacaaaggataatttcatagcgtatctataatatccttactactactactaattaattttatttatattttaaaaataaattaaatcaaattaaatagaattctttttctccctactcctcttgatgtgttttctttgttgttagaaaattcaataaattgtaaagctttttttgactgtatttcttttttctaatttaattaacattttgaaaagtttttaaaatataataagattttcttaatatacaatttaaataaatttttcaatttacatttttaccttaatgaaggttgtataaattctatgttttaaaactaaattttgtattaagtacactaattaaaaaaaaacgttcactaataatatcgattgagaatggtacgtagggtcggatttagatgataattgttgtcaaaatggccaataacaagttggaaaaataaaataaaagatatatctatattttttaatgaaagataaaagatatattttatgatagtgatttgacatttgttaaacttggtacatgtgagcaactttaagacgaatgatggtgactgtggaaggcctccatctcattacgatgcttccaacgaaaaaagccgtatttattgctgagtttatcaattttggctaagtttgtagataatgaggtaataaactgtatatattttgcagtgaatatatatccactatggtcatggtttaatttctgtagttatcgatgtgttaaaatacaagtcaaagttttatataaaattacaaataagtactagtttggtgaatagtggtgttatgtatatatatgtagctaagaatatgtagtactctactacttactcatccctctttaatttatataacagttcataatgacattgattttttctctagagtacaatgctctataatagaattacacatatatagtgggaggcatttcaatctctagtttgtttattggttaatattattcaatctctaaatagttttgaaagaaaagaaaaagtaatcataattaagaaaaaaaaaataatgaatacaaataaagatttataattttgaattatttaattaatttcgtatatatatatatatatttatggggaactttttatgtatttatttagacttgagagagatatgataaagtaattgtaatttaattccaccaaccttaataatttaatttgggttagaattttgatgttgtgtataattgattcaatttggtgtgttgaaaaatgtcttattatttttgtggcatacataaatgcacatatgggcatgatttaaatttactggaatgcacaactataattcccaacaaacatttagtatccacagtgttatgcccataactttttataattgatatattgaaattgtaaaattaatttggtaatggtatggattttcctgtttttaatttctacaacttcattgatgtatatatgtatgtcaagatcaaccatttaggaagatgctttggttggcttatttttcagaaaaataaatataaataaataacattagctcatcaaggcgattaattagctagagttatgacaaactaactcaaatatagctttattccaacaaaaataataaataagcaataattaaaaccaaacaagaaaaatatgtataattttgtgatcgatttacattatacgtactaatttttgctgcttcccaattaaaaaatatatttttgtgatcgatttacacatcttattttccattaattttcctgtttatgttgacatatttttgaataaaaatgtactgacagagaagatttctttcttattaatttttttattgaatcaattaatatgctaactatatcgacgatataatttttcaacatccaaactaattatgagaaagataattcaatttacactaaaaacaaataaagatattatattttattgtcttttaaaaagcaaccatttaaaattataatgaagtaaattttaacatgggagttattacttcttattttttattttatttttttttaatttttaaaaaaccttttcttaggtcaagttgacttgaatctagaatagttgttgtcaaagctacagtacttacaaataatatatctcaaatatactatatatgtacaatcaacacaaaaacttattcaaaaaagttgttagtgatgatatcttctattctactataataaaatatttatgctaattaagattttcaagtaaattttacatatactaaattatattttttaaagttttaattcgttaaaagtttttgttcatgatttaatatatatatatatcataatttaagaaaaataatttgatacatagtctattactatatatattaataaaattaaatgaaattaaactagcatatttaaatttcataatcgggatacttttctaaatatctcaattaacctaatatttatatatattattttattgttatttttgt

SEQ ID NO: 97901 - DNA, 1431 bp, Cannabis sativa
tgaactaatataaccgaaggattatcagcacttccagattcaacgcaaaaccatctattgtaacaaaatcatagatagagagagagagaggatgtttcaatcgataagccctgcatttgacgccacatatttatagaccactctaagcctctaaacctcaaaattttcaatgcccaactctacattctaaatctaaacttgtaataattaatcataacctgaaaacatcagctgaaacttgagaagtggaactcatttcaagtccaaaaattggatctttagccttcccaccagagccaccaacagggtgagctttcactattttgccttgcttgaaccattcatctgaagggctttgtccatccgaatattttcctgtcaaaagcttacattttttcacaaaaaataaagcaaagggtcgatttttgtttgtatgagaagtgagtagaattgaagtacctccactgaaagagaaaccatcacctactgatacaggagcatctatcagataatcttgctgatcatctttgctatttgaagctctgcaactaaattttagagggtatttgatggtctttcgagaggttgacaagaaagctggaatgggagttggaagaagaagattgtagtgatgagaagaaggaatagtcattgccataactggacctggagaaaggaaaacaaagcaagccaaataggcaatttttaacttgtggttatttatacttgattaacagcttgtgggtcagctttcttagtgcttcggatagaaattttatggtccttaatccgccccaccaaaaaaagaaccattttttttttttttcttgtacatgttcttctcctccagtaaaatatgtatacaaacatttgtactgtaaaacataaagaagaaagggcttaaaaggttgttttatatttatttattattttatttttttttgcatgggattgtgaggccaaagttgatattgagtattgggtgttatatatatgttaaatataaataaaatataatattatatatatttttgaatgaatgatatatatatcttaggataatatttaatgagataacttagataatgtgattaaaggcttctccggcaactactctcatctcaggccgatcgtgcatctctgttcagccttaggttccggcttcttcgtttttgaatatatgctgatgagattgatttttatttgttgttagttttggttttcattttttttttaatttcacttttatttggtctgatttgttattcttttgtttttgaatgatgcagaatttttgtaaaaaaaatttatacggtgtctctatagttgttttcattgttctatttattttttagttgttttacttttattttataaaaagtcagtatttttataaaaaaaatcatttgacaataaaattataaattttta

SEQ ID NO: 97902 - DNA, 1875 bp, Cannabis sativa
  modified_base (57)..(59): a, c, t, g, unknown or other
aatatgaattcttagaccaaatctctcgacccttttcccagtgagtatgaatcactnnntatagggctataagcttggagaggaattatttcccttctagttacaattaatatgagcagaaagattgcatagtaaatacagaatacactaatcgtgggatttggacagcttgccatatctctgtaaagtgattccaaagttatagggatttctttgatgactcatgatgcgaaagctgaatttgctaagtgttggcatgctgcgcggattgctcatcgctccctctaaaggactttttctgagcagatgtgtgaggtgccctgttcggcttgtgtcttgcgagtaggtacccagtgtcgattccacgtgtcgccatcgtgtgatgccaggccagagtgcagaaatttggataacatttgcccccaagtctgtacaggacttccaaagttgcgtgtagacttcatccgagccttttttgcgtttggatgggtgacacgtgtcagatgcgtctattcgcgactcaatgtgaggctgactaggcgtctctttggttttcggctaataaatgctctgacgcaattaatgctttgaaaactgattttctctcaccacgtttgacggttgcaattgattgcttttgatatcccatattctcttttgggggaaccgaggcgtttgtccataacctcatttttcaccaaccttctttgctaagccagttcagagcgaaaagagaggtttttagcttcaagtttgctgaaaaatttccacgaaaattgttcattcaggtttgcataaactgaatctagacgtcgatccttgagtaagttcttgatttcttttacttttattttgcacatttactttctgaatgcgatcttaactttgctgtagaagatatgttgaaaaccctaggtttagaagctctgcgatttttctttgtaacgcttcatgcaacttcgccattcataatacttgcttttttgaactgcttaatgcttgtttttcatctggcttattcaaagcttcatgaaatttttgccctaactcacaaaaatttcaaacttctgagttttgacttttcgtcgaatattttcattcttaatatgttgagtactcctagtcggcatattttcctatttaatgttcaatatcccgaccaaacactcatctcgcgtgttgtcttttgtagatgaacccaggtgagttttggggaagcgaacatcgaatagaccaggacctactataattcttgcacgatgatcatcctcgtctttactctagtctgctttcttcaaacgacagacattttgattcaaatttcccgtccagccacaggatgatggctcgtactaagcagacaatgcgtaaagtcgacgcgtctgaccttcacgtggccaagcatgccacaatgcccagcgccgaataggatccacccgtgcaggaggagggggatcatgaaggggatgctaaggtccaagagatagaggagcaacgcgatgtctgtcctggtagtccttctgaggaggaggaagaggaggaggctgcaccacaaactttgggggatacaatgaggctggggagctagttgatacaggtggtgacgtccttgtcgagggtgtggattacgtcaccgaggaacttactgccgcggtccctcagaggagacagggtgctttgggcagcaggtgggtgggccctccgtccaaggtcagtgaggcacatttacgggatctcgaccagggcggctacctaggcgagctggactgttttgttcctgcctataacactcgagccaccaaccctcaaagggggatgtgtgcctggtcggtgttggaattaattttaccaggatctttgatctactcacaagta

SEQ ID NO: 97903 - DNA, 1096 bp, Cannabis sativa
aatgatccaagtttgagttttcacaacactcaaaaaaatcagcatccagaagtcattctcaactcaaattaaacttagaaacccaactacaaatcaacctaaccctaacagccacaaaatcacgaagttgcatacaagaactaaacttaagcttgataaactaaagaattagagtgctagggcttacctctacttgattcccccttgatttcttgttaaattctagaaaagtggtgaggatttgttggtttctttctggtcttggtggtgagagcaaaggaaagagagaaagaaagttctatctttttcttgaatttttggtttttctcttaattgattaattcttaattccactaaaatcaagttgaataaacaaatggccagctctccaaacctcaagcagcccccaaatcccactagccaaattaccaaaatacatttttttacttacaacttaagtaattttaagcctaggagtaaaatggtcaaaaagtataaccccgctcaaactcggtattctatttatttcaaatatttataccactaactatagagcaccacgagtttagttggattaggtgctgttatattattagaagataatagaattcacgctgtgttgagcaaatccttcaaaggttagtcatagtgggtacattaaaaatattattcgttgcttattttattattgtgataatttccaaaggaaacttttggtatcctagggatgggagcattgcagggtcttttctgttattactagattacatatcaaaatctttttaggtcttagggtcttagtaagggatagtaatcctaagatgattatgaggtaaaatacaagagttaagttgctactagccaaagggttttccctttggctagttttagtattttataggaggatctagttttttagtttttgggttttgattgttttcatcggattgataactttctaataaatttttttctagtttttctgatttgtttttaggtggtatttcaatgttacaagctgaaactttagccctgttggttggtcttaattgggctcatttgtgtggtcttcctattcatgcagtttattcagatt

SEQ ID NO: 97904 - DNA, 651 bp, Cannabis sativa
tttctttaaaaatgaatagaattcaaagtgtataaaagagatacatgatctagctgctataaggtgtatttataattaatatacattttattaacaacttatacacagtctgaacaagaccatagctcactagacaattccataaatagattttcaatcagcccaagaatttctgtttttctacttacagaatcgtcagcagtaagtacaatttttctttcatagaaaaagaaagtcttacttcgaatttcttcacaataaatctaatcaaacatattaggaaactcacacaagatcagatatacgcaggtggataaatagaaaaaggatgagtcatcaaattcaccatttataccttattttccataaatagaatagctatacatatttctttctaattataaattaattaatacaaaaatatgaatgtcaaataacaacttagccaaaattactaaataaattttacaatattaatttttgtcaaattgaatatgacaaaaataaaattaacaacattgattgtttgtcttttatttaaacctcatttattattactaaaaatccaatcaacagttacaattccttttttcataagttgtacgacttgtatatttagtacattaaataatatcatcttttattataaca

SEQ ID NO: 97905 - DNA, 863 bp, Cannabis sativa
catggttggtgaagccacttctcctctgttgctgttcttcccgttggactgagttgcagcataaatctcagtcgcttcttgcaggtctaggatggagacagtttttgtattattaccaaatggggcaatctcaccaatacctgggagataaacaagaggcatctgggtaatgaccagctgggaactcggctcaccggaggtctcatcttcgtcagagactattcttttcttccctgggagttgtcgcctacactccctgatttcagcagcttctccattctgaattgccttatggattttgatttggtttcgaagagaagagtcatggaataatttcttttataaaacccaatcttgaaaccattttgccaaaggaggtagaaaggtggatttttctattgaaccactcttcaaccagaccccaaacattgggtatatgcttccattagcatccttgataatggttggggatttaaaacaagtgctttggtcgtgtgtgagtactccacacttgaagcacagtttaggtaggcgttcatatttatattgtatccacaaatccttgagtcattggcgtcttaggaaaaaaccagagaaaatcggtttgttgatgtcgatcgttgccctgaatcgcagatttctcatatccaccgcatcttcaacacctggagggagttcatatactggtgaggctttggaggccaactcttttagattggaaaggttccaatagaaaggagggatactttcaatgcgcacccatatcggggttttgtcaaaccttacttcagcaggggataaccatgccggccatggcattatgaccactaacgccccacaaacaaaccagggacgtcgagcca

SEQ ID NO: 97906 - DNA, 551 bp, Cannabis sativa
aattccactaccatgtgttttgagcttgtgttttgagcttaatcaaaagtcaaactatatttgtaatattaaatggggataaaaaattttgagtttgtaatttttttttttttttgaataattacaaacaaaaattttgagtttgtaattaatataaacttaataatttgttttagcatcataaatacttgtaaatatgtaattttcatctagtttggtgaatactacttttacttgttttagaatcttggttacatgtgttctatattaagaagtctatactaatgaaattaggcaaaaattacaatttcaaacttatgccaatcaaaaaatgatgagtttgattacaagctcaaaactttaattacttatctcttaaatatctctataataagtactatattggatttaattatataaaactcaaaatactacattaccaactttgtattatacactatacatacacacaaatacatatattatacttaaaaacttgtttcatacctgaatcagcttctctcatcttcttattattgcttggtaaaaca

SEQ ID NO: 97907 - DNA, 1248 bp, Cannabis sativa
aagagtacaacataaaaagactgtatttaaatttctgtaaataaaatcaaaacaattgtaaaaatatttaaaatttcataagtatgttgtggacataaattattaattaataaccatctaacattcgtaaatttttgcttttatgtatttatgaaataattcctaggatatttacgtgaatgtatttataactacactcaatacgttgaggcattaaaagaaagtaattgataacaactactacatacaaattccaaacaaaatgatcaattgtactcatatcaaaatgaatatttatcccacattttacttttcatatttttgcatatatatgtataatactatgtaggtatgttgtgttctaagatatagatcggttagttttcaaagttgtgtgtttttaaatgataacgcgttatttaattatttttttcagtgaaaaaaatactacttaaaataatatttgtcactctgttaacatttgaactagtatgtattatttcgtgatcggtcaagatcataaatgaaaaattaatttcaaaattgtgagctagactaatcacaaaatcacacatgctcttagtaaacacgaagtttttctagtactagagctaattaacaatttattattattgttattattttgtaattgttaccagctgttataaatatagaacattaaaaagtgataataatataaatattttttattgaaatatttttactaataaattatgttcgactaagtgaataatttgtgtaaattataaatcgagttcaacttagcatgttttgtaacaaaattgtaacatttccatctctaatatatctatattaaaattccatagtttaaagagaagagataagagttaaaagttttttgatatttgaccaaaaaagataagaaagcgagacataggcagtcagtcagtatgacagaagagatataagaacatctccaatggtagtattttttgaagatgttatatatctacacatcatccaaatatataatattttattttattttcttctacattatttttggcatctttatttctaaaacactctaatagtataatactttttaaaaaatttataattataatctcacacattattacatatatataattcttttttctttatgaaactattatataacatatattgtacttttaattttttattgtattaaaaaaacattgcagcaatgccattgtgtgacattcttttatctgtaatggt

SEQ ID NO: 97908 - DNA, 1056 bp, Cannabis sativa
ggtttgtgaacattgatttgggagcaaattatttctcttaaaaagagcaagaaacctagactcaatgttatctttcctcatttaatctataagattttgtctaaccaagaggagttgatccttgagaatgaaaccattgaaatgcctgttattggaacaactttcaaagttccagagaaagctcctcaaggaaaatctgctaagaaaaaggctcggtttgcttcccctggtgctactgatgaacctgctgttgcatttgcttccacttctgcctctacagaaatggctgaattcaacttgcgtttgggaagaatggagaccagtcaagccttgcttctcaagagaatggacaacatcatgaaattcttcctatccaatgatgatgaataagtggtccatttttttatctcttgcttttcatttatatgtgattgaactattatgactttgttcgtatttttttgttatttttggctccttgatagacaaaaagggggagtagtatttatttttggattgtgtgttacaactctggacccttgttttagggggagtagtatttatttttggattgtgtgttacaactctggacccttgttttagggggagttgtcttgtttgtggtttgcaccctttttcgtttaaaaagttgctttgtttgtggtttgtaagcttttccatataaaaaaagttgttttgttttatgtgttagagtgctttcatgcagggagagtactttgtatactcttttgtttttgtttctaacacttgaagcaggttttctccaaataaaatattttgtcaatcaaagtgtcaaagggggagattgttaatttcatttttggcatttaattgacaaaaatattttattatttattgtatattttcagctggagtgttttaattggtttccatattttgtgtatctaaatttggaagaaaagttgtctagctttcctatttatggaaattgaggtaaatatggtaagtttgattatacaatttattcttatctaaccagctggtatattctgatcttgtgtgagttcccatttt

SEQ ID NO: 97909 - DNA, 523 bp, Cannabis sativa
tgctaaagttgtgtatgacggtttatatgtcatgcctgcctaaaaatgagttaggaacaaatccacaaatatctcccacattgaaatggaggtttcgggtaactagataaactagttgtgtgcattatcctcaaaagttataggaaggatatgacacttcgccagttgaggtacctggttaacttccataatagtgttaaatttatcaagataatctataggattggtgccacctttatctttaagtgactcaaaaagtctgaagcttttttggagccttgcttgtcgcacttcttcagtgaagggtgacgttccatgcagcttgtatatgagctttctctactactcgatcaccccagcactccaagaagattttcttaatcaacccctcctgacaacaggggttgttagcaatcactatttgatttctcatttgtagagtagccattgttgctatcttcgcggttactactacatcatgcggcatagttggtgcaaacggcatgttaacgttatttgctaa

SEQ ID NO: 97910 - DNA, 555 bp, Cannabis sativa
caactaagccaatgaataccattcttttgggacgatttcgaatgccaccagaaattacacatacttctctcaatatccttacaagtatcctgaggcaattggaatacattcatagcatacgagggaagtgcttgaacaacagccttaattaacacttctttgcctgctctagataataacttcccatcccaactttgaatcttcttcctcactttgtctttcaggtagccaaacacagcagacttattcctagacaaagtacttggcagccccaaatacttactatcctcccctgcttctctgatgcccaaagtctgacatatacgatctctgtcctgacttatggtgttggtgctaaagaaagctgaagatttcgcaaaattaagcttctgacctgaagccatttcaaagacccgaagcaattgctgaactctttggacattattatcattcgccttgcaatacagatagctatcgtccgcaaagagcatgtgcgacaccaccggggctttatttgcaaccttgcaaccatgaatccatttcctttcttcatat

SEQ ID NO: 97911 - DNA, 647 bp, Cannabis sativa
accatgtcaatatagacaagacaagaatagagaaaaagtttttatatctggaatggacagaggtgttgcacactattaatacttaataacaacgtttgttaatctaaattactatttttttaagtgaatgaattctcataagaagcaaaagtttaaacgcaacaatgagttctaggccaccaaactatagaaccagagaggggaggcatatacaagcctagggtggccctaggcccccacccccaaaactcatatattgtcttttttgtttaatttatatatgtagttatatttgtatgtacaacgagtacttagtgcccccttgtcttttttatttttacatttttaaaataatatttttatatatttttacgtaaatttacataaaaaattcttatagtaattaatagattaatctaaatcgtaattaaaatctacatattaacccatataaaaatcacgaaaaaactacgagagcaaccaaaactgtaaattttaaaaaaataaaataaaaatagtatataaaataatttttcaataaatattatgtgtaaaatagttaatgcattacaattttttcaaaattaatttcctttttagttggtgagtgtgattgattactttttataccaagtaataatataagt

SEQ ID NO: 97912 - DNA, 1072 bp, Cannabis sativa
ttaatttatttgtttaatttgatagtctttatatttatataaatatatatatatatatatatattaatattattccaatctttggtgacaaactttctaaaattgtattctcttctttctttttgtatctaatcaaacaaaatttgggtcgatttgttttaatgctttttcttaatatataattttctttatatgcatatattcactctagtataaagaataatattgaataattcttaacaattttaggcatgaaattaacttaattaaggatgatggatttttttctatatcattatttgtgataaaaggaaagtgtcatgtgaataaaccctaaatgaaagggaaaatgaaataataattaagtgatttgtgactcatattatgttactattaacttcaataatatcatattggagggtgagcaatataggtttagggttgactaataggataatattgaacaatggacaatagggtatagataagaccgccttaaaatttattgaactataagaaaaaaaatatatatttagactcttatttaaaaaaataatatttttcaaaatcagtaaaaaatatatataatttaaaaaaatatatatttttaagctcttaaagatagttggtctttaagtataaacctagcccacctataccgaaggccaggtttgagtataaacctttcaattttaaccatttccatgaaccaaaatacttttatttgctatgagattattttaaaccctttatcatttttcattattttcattattagaaataaaatctataattgtgggagttgattttatgttaagaaagtatgcaaaatgcaaataatatattgagcaaaaaaatgtcacatctaaaattgttcttcaaatatgaaactcatattgaggtgacaaatttatgaagagatctcctttaagtataatctttttttcattaattttattatattttaaattttttgaatatgattttgaattctcacaatgttcatcccagtatatttgaattttattatttttaatgaatatgtattttagtaaataaaaaagtttaaagc

SEQ ID NO: 97913 - DNA, 1028 bp, Cannabis sativa
agaggaaacttctttagctctttgcaaaagaccaaaagatggaggaagaagatggcgaggtcgaggaagaagaagaagatctgtctaagtccccagcatgtagatttggttttttttatctcccttttctcttttaggagatggccctttcgccgagacaatggtttgcccctagcggcacttttttgtaaagacagatttgcaaggttggatgaccaactttattttttaatgtcttacacttttaaatataaactttaatatacggatgtttgcttgcgttttattcacaatataaactatcacatgcatacagtttattaggggtttccattgcttgttctttccttcgacattaagtagttaatttcatactttacgtgcggctagcttatctgcccgttcctcaatatgcgagctatcatttattccatctcgcgatcatcgaaaatgatcttattttaagaaaattcaaatatatttttaatgaacttgtcatcttgtatatatttttcattgcttacatgagtagctaaattttctacccacgtgttgggtttaagtattttttcaagacatttggatgtctcatttaatactttcccttagcgcgagctgttagtattccgctttatgcgctagtcataaattttgattttcctttctcgtcagataggttataaatcaaaaattacagctgtttgatccctttcttgtcagaaaggtttgatcaatgtgttataacgattcgacccctcttccgtcaaaaaggtttggtcgaggccctttttttaaaaaaaagttttcaatttttttatttttttgaaacgatgggtttgcattgtactatgtatttctagattaattccggttaatcatacatatatgcacctcaagtaattttaaagggtttacactttataattacttgtttaaaaggaatgattattttattcacagctggaattcaaaatatttcatcagtaatgtgatttacaatcatcaatctcaaaagaacttccccagtt

SEQ ID NO: 97914 - DNA, 730 bp, Cannabis sativa
aacaactcagaaattctcattcactttctctttctctcttcatcttcttcttctttcctctcatctactttatattattttataacatattcaacatttaaaaatatatctttttataaattacaaaaatactttcctcataatttcatatttgtctctcttactttatctattttcatttttccttctttatttctctcattctttcgaaaaatactttcatgtcactcatatacaatgatattttagcacctatacaccctcaatgttcaaacccaaaccacaaaagaaccacccctcttggtattagatcaaaactctcaattttttgcttgctcctccactgacaactcccccattgaagttgattttcctgaacgaccatcacctccactaacagaaagtcaccacctccacccacggataggattttttcactcgaatacatatataaggagagtctacaatatgacatactctctttccgcagtggtgtagcacaaaacgaaccacttattgtatgcaatgtctgcctagaccaaaaatataatttgagcttctaaccactaggatcaacatttctaaattagcttatttaactccagtatgtcattttcatcaaaatatgtcagttggatcgaactaaattatacatatacaaaataatgtcatgcggtttttccaccctcttttacattgtctcttcttcactttctaccttcttttacat

SEQ ID NO: 97915 - DNA, 607 bp, Cannabis sativa
aggcaattatggaagaatgatccctcgttctcctttgggagaaatctctcccactttatgagggagatcgctattctcgtggtcagtttaactaaccacttcttagtctgttaggtaagtggcgagacttagtctcagatgtgggtcagatcattgagagtttaatgttgggtcatggtttatattaacatatgacttgaccatatgttttgggcttattggtcttggtcttgtgattgtaccattaatgacatgtttactaataagtaatgtgaatcaatggtaaggtagttattcccttacatttggttacttactttattaaaattaaaaagcaaagaacttgattaaataagagataaaagaaagacaatacttcccccactaattttttaacaaatgacatcaatgacatgtttactaataagcaatgggaatcaatggaaaggaatcattctctacatttgtttatttaatttattaaatttaagaaatggagaacttctcctaccaattttttaaggaatatcattaagggtaatggattttatttatttttattttattttttaatattaaatttataatgacaattttatcctttaaa

SEQ ID NO: 97916 - DNA, 1236 bp, Cannabis sativa
tatatatttgaaagcatatgtgggtaaagaattttgattccaattctgtctgtagcatgtgattatttttttttgtagtaaatggagataaaaattgtgacaagttaaatttacacattgacatttcatattttgagcaaggtgagatatcaaactagtcgcaaattaggtagtttcaaatctctaaattttgcaaaacaacatctttgaaaactgatgaaattactttaccataactaagacattgactagtgatgtcaaaaaatcacttaggtatcaaaaatataattctatactcatatagcgtccagattgacgtcagatattaacctgggtgcgggatgtcattttaaaggctggtggttaatttaagcgctattattaaacagtctttataaagagtcataactcacttaatcttgacacgactaataattataccgtttttatatttaccataaacatcttgacatgatagtacaaattgtgtattataggatgtatataaaatgatttttttttatttatttgcctttttcggtttattttagcatataataatataagatcgtatgcatttaccaccaaactgaaagctttgccaatttaattattaggaactagttataacttagttaaaatttgtgattatcactctaaaatagaaaatactaattaagtgaaatagtattatatattttccttcataaaatatttttatagaattaatttgatatatttttaagtttataatattttgtttgattcaatgtattttttttttaaataattatagtatattttttgtattctaaaaaactttgaaaaagtagtaaacattactaaaataatcactaaacttttaactaatcactgaacaatagtatactttaagcagtaaaaaatgtgttaatattagtactttataaaatttgtaaataaaaatattctaatatttcgttaattttgtaaaaaatatagcattttatgacacatttaaaaaaaatttaaaaataaataaaagttgatacttttataatcaacaaaggcataaaaatagcagcccacaaatatctcatccagctaaaacatgacaatctacaagctcctcacctaatacagatccccacgcgcaagtgaataacacgacccatatttagcatagtttgcatctcacctcccacccaaccgtttgcccgtatatggtgttggatattattttaccaggatctagat

SEQ ID NO: 97917 - DNA, 1592 bp, Cannabis sativa
  modified_base (1519)..(1561): a, c, t, g, unknown or other
atgaagtgaactgtgtactgtgtgaatctgttgcagaaacaacgttgcatttggtttttgaatgcaccttcttgcaacagtgtttgcacaagttaaggattggcttatatggaacgcaacaacctcttctttacagggtattttgaggtggatagagagatcaaaactcagtaaatttaaggaggtatactctactgctattgcagcacttgtgtacataatttggtcgaacattgttaagacagttaattctgttactgacagttagtgcttagctgtattggttgttaagtgttagtttcaattcagttaattgttaagttgttatttcctattctgttattgcttgtatgtgtatataaattgttttcatcatcaataacagattgagacttctttctctccaaatctctttctctctgtctttcctctctctttcctttcttctttatgcttttcattagttcttgcttctggttcattaatggcgagacaattcaataggcaattcaacatggtatcagagcagtttcctccgctctctgctaacatggctactcttggaaacaacagcaacaacacaacttcgaccggagctcaagtcaccatgaacagacctcgatcaaatcaagaaccggtgttcttcaatcacagtctttcgatccgcctcaatgatcacaacttcctattgtggaagcaacaagtactggctgctatcagaggaaatcgcctcatgaagttcatcaaggagcctccacctgtagaattcctcagtgacgatgatcgaacacagaacagaggaaatccagtctatcctgattgggaagttcaggatcaattgcttgtttcctggcttctctcgtcaatgacagagagtcttctcacacgtatggttgggtgtaatttagctaaacagatctgggatgctcttgagaaacacttcaccctacaagtctcatcgaagatccttgagtttcgcaccaaactgtagaacttgaagaaagggagcttgagtctcaacgattacctcttgaaagttaaacaaactgtagatcttcttgcatctgttggagaaacacttactgatcgtgatcatgttgctgcgatcttcaagggacttccgaacgaatatgatactttcatcatatcatcgaacactcgcattgaaaattactctgttggagagatcgaggccttacttctagcttctgaatccaggattgaaaggaacagcaaagacattgaagtcagtaccaacttgacagtgagtgatcaagaaactgatatggaggccaatcttgcattcagaaagttcagacagcaacaatatggtggtagaggaagctcacaattcaacaacaactcaggtcagtctagaaatagattttttatgcgaggtaatgaatctgcaccttactctaacactggatatggaggcagaggtaattttaatccaaacagaggtggtagatctgcaatggctatgaataacagggttcatgttggaaattattttacnnnnnnnnnnnnnnnnnnnnnnnnnnnnnnnnnnnnnnnnnnnaatatgaactttataaaacgatgaaataaac

SEQ ID NO: 97918 - DNA, 835 bp, Cannabis sativa
gtttaacagaatatactttaaaaataaaagaatattctgttaaatatggtaggtttgatcctccattaactatccctttctctatgtactattatttcaaattgccctaacctaattagaatcttactctcatcacaatcccacaaaagattttttttttctttctctatgtgaacccattcccaatcaattaatatatcctttcatcatctcacgcaacgaaattccaattggagaaactcaaaagagttaaattctaatcggagaaattcaaaggaaccaaattccaatcgcagagtgagttaaattccaatcggagaaattctaagaaatcaaattccaatcgcagagtgagttaaattccaatcaaagaaattcgaaggagtcaaattccaatcgctgcatttgaactgaattttgctccaacaatggccgtcaaaccacaaatatttacgggattaaccctggcgtccacgcctgcctcttcttcctcctctactaacagccttagactatgtgtggttaagaggcctctcactacgcccttcttcggtgccggaggtacgtcgtctctattgggtttctccctatcttcatttttatgtctaggcatctcatgaattttcaattcgttcacaaactgagtcgcttttggggctcgaattcagtgggtattgatataataaaaaaactagctttgataatttttcgtattgttttgcaaatttgtaacttcattacattattgtgaaactgaaattatctagctttgatgattttgattgattggagttcatttaaagtgtttagcaaaagtatctgcatttactaattt

SEQ ID NO: 97919 - DNA, 524 bp, Cannabis sativa
aatttttgtaattatttggatacgcccatcaaccaaatccaaaacaaaacttaattcataattgcccattccatcgatccactcttggaatattttatggaaatacttatgcagctggagatacatgagtaattatttttaatataagtttatacgttataattatttacgatcacttattaatttttaaaaattttaaataatttatattattataattaaaaataatatttaaatattttattgtatttgtaattatttaattatatatacatgtagtaaataattgtttgaatttttatttcggtactaaagagaaaaaaaaaatctacattttttttcttatataaaatttttcatatatatctttgtatatggtgatgtatttttttgtaatgtattatatatggctccaccacaccaatatattatcattttcaatttcatttttgggtggagtattgactttttttgcatgattagttttttattattaatttagcagaagacaactatttatagtc

SEQ ID NO: 97920 - DNA, 1064 bp, Cannabis sativa
  modified_base (33)..(51): a, c, t, g, unknown or other
  modified_base (824)..(825): a, c, t, g, unknown or other
tccacaaataaattaattcacaaataataatannnnnnnnnnnnnnnnnnntaattgccttttctaatcatattactagagcggtcattacaattatagtaagagtgcttttaatataataatataaaaaaaatgtaacaatgaaaagtcattcatttttgctaaataatttaaagaaaaggtcaatggtcaacatttatttatattaaaaaaattaattaaattatatttaaatgtgaaaatttgagaaaacaaagaaaagactaagaaactcaactaagttgccacataaactctaataaactttatatatagatatagattattaatgatcactagaagtaatatacggtaataacattaattttaaatgtattaataactacaagtggaatatgataattacaattattttaaaattatataatgagttttttatagatttattacgtattattaaaatatctgttgaattttgtgtgagttttctatagatttaataataatgtacgttttaataataataatgtacatttttaataatgttatatatattattatactacaagtggaatacggtaactacagttattttgtgtgagtactgtttaatttttaatgataatgtacatttaaaaatattttttgtgtgctaaattacataaattattacttttgtaaaatatttatatttatgttcaattacatatatatatttatggtattctgtaaaaacacaagaaaactacacgaaaataacagaaaaacaacattattacaacaacaatacatcatcaaaataacataaaaaataatatacaaannacaaaaaatcaacaacaaaataataagagtataaaaatacatcaaatgaccgtattttatgtaaatgaaatcttaaaaactgtaaaaaaatatatttaaaatttcatacaaccgtatatttataatttttttttgctgtttttttttttttaaaattattcttttatttcttatatgaaaaattgtatgatcataatttttttttagaattcataagttaactttttttaaaaataaaa

SEQ ID NO: 97921 - DNA, 812 bp, Cannabis sativa
ttgaaaagaaaataacaatattattatcacaatagattagtataggagaggaaatagaatcaactagtcgtatttctaaaatcaaattctataaccataaagctttccaagatgcctcataacatacgacaaactcaacatatatagtagatgatgtgattaaagtctatttaacactttctaagaaatagttgcatcagcaaaagtgaaaatacatccaaaaaatttactttaaatcatctacacaaccaccaaaatctgaatttgaataaccaacaactcgaagattgtcaacgtgcttatacataagcataaaactcttcattctttacaaatatctcaaaaatttcttggctgcaacccaatgatcattgctaggatcatataaatatctcccaagaacatcgaccatgaaaacactgttatgtctagtgcaaacctaagcatacattaagctccctactacacttgcatatgggatattcttcattgcttctatttttaagtcattttgggccaatgttgcgtagtaaatttatccctttcagaataggaacagaaccaggcttacaaaaaatttatgttgaaccttttgagcacgcgattaatgtaagctttcttgagagaggctgagaaattttcgattcttatcacgatgaatctaaatctccaaaacaaaagatgcttctccaagatccttcatatcaaaaaatggttgacataaaaaaatttgggctcatttagtaacgacaaatcaatactagcaagtaaaaaatgtcgtccacataaagaaaaatatgacaactcccact

SEQ ID NO: 97922 - DNA, 648 bp, Cannabis sativa
gttgttctgtgttgtcgacaatttcttccaagttctgggcttcatccggtgtatttgggagattcttttgatcgggatctagataagattgttggtggtggcatggtggtctaaggaagaccttgctttcagattgggcaagggctcaatttgggtttcaatccatagtgttgtgatgaggtgtcggtggttccaattcgaaactaacaactaggttttgttaattcaattaggttttaatgttactatctcctagaacaagtaggattaggagatgcgaagctaatctacctacatatgagtcttatctctgtgacatgtgttcgagtgtcttttattttgttttgtttcgttgttagttcgccttctttatttttcagtggctcaccatctagtcattgttagtggttcaaaataattaagttctctgcggctgaaagaattattagtggtacaattatgtaccttgcacaataattgaatgcttaagttaaggagttgaatgaacctactgtaataatttctacttttatatcttctaagcaaagaatgctaaatagaagtgttcttaaagataactataagactgacatactgcaagcggggtcatttgatatgatgtaaggtttttttgtcaaacgatcgaag

SEQ ID NO: 97923 - DNA, 773 bp, Cannabis sativa
aaacccaggcccaaactcgaaccttggatcccgaaccctaaaccaaaccctgactcaacccaaaccctacaccgagctaaactcgtaccctagctctggcctcggcgtcatatctcaacgggaacatgtaccccaggttggacctggacctccaatcttgaccctagattccaaccacgaaacccggcctcagtctcgaaccttggacctaaacccaaaacccgacctagtctcgaacctcaacgttggacctcgaccttcggtgtcaaaccatttctaaattttataataaaatacaaaagttaattaagtacctaagaaataaggtctcttgggaaggttcaatgcatgtgtatttttaattccaatccaactttctttatagaaacttttacactttgtcaatacggaggagtgcatgcgcgttacaccatttttcagttttcacaatgatcatccccagaaagcatgcttttaaataaccgaacttaaattaacaatattatatacataaagattatctaattagatttatttatttcttaaaaaaaacacacaacaatcactaaatcttatttgttcaaaataaatacatatatatatatatgtcctatatatatacacattactttctctttaaattaacctttttggtgacttggcatcaaattgcactaaccaaatcgtcctcttttcttatggcatatactagtttcttgactatattttcgtatagccaccataccatattttaacataataaaattccttaa

SEQ ID NO: 97924 - DNA, 942 bp, Cannabis sativa
acataaaaccaaaccgtaactagggacccatgcacctaatcatgattctatatcccgcatccaacgtgtataggtctcgaatgttcttaaaaatagtttgattgaccataatatcaacatatacttagtactttagtcgtactggtatgataacatcaatccatacttaactgtattgccaaacatatattcgttaatattcagtgtaactctatgtacactaatactgctcttattgatatgttatctaataggcaacataaatacatgtacgctaaacatgtattcatgtatatcaattatactaatattacctcaattctgaattcaaggtgcaagtgtgtcgatcaacgtgagtgaaaactgttgctcaacgattaaagaccctaagtcataatttatgtaaaactagtaagtgactcgccaactcacttttgggacttaaattcaaaactagaagtctccctatcgataaatagtgcgacaataccctaagtatcgataaaataaaaaaataaggctcccaaaactaccccaacaggtgaaccaaatttcccatatggtggaccattttctagggttctactaaggaaaacggtccattgtttgtgaaaaaatggtggatcattatagcacccaagcactataatgaatttcaccattgttgagcaagctttgagttcagaaaactaataattgctcaacacacaacacaaccaccaaaaacaaaccaaaccaactccatacaattcaaattaactttagaataaaaccaccctaagctcggacataactataactcaaaattgcatgtcaaaactattgggaattattccctaagagaatgaaatgcaattataagataaatgaatacattaattatagaagtataattagtaaatatctaaaaattccttattcatatggagatggtataatctt

SEQ ID NO: 97925 - DNA, 578 bp, Cannabis sativa
ggatgacactacaatcatcacttgtactccctcaaaaacatgtcaatttaagctcaatgtggatggagcggtttcagcaaaaaaggagaaaataggtgcatgggctctagttcgtagctcgacaggacaaatcatagctgctttcgccaaaagcaatcatggtatgatgcaaccaagaaatgcataagcgtggtgttattgcaaaccctacactggtgtcaaaacaatcacattttaatccactaggtggagactaactgtctgaacctcgtccacgacatcaaatcccaagaaagtatcttctaaaaatattgagctcttattgatgctctcaaagaagtgttagcttcctttctcattgtttccttttcgcatgtcagctgacaaaggtatacaattgcacacaatcttgcccaaatatttattgggttaattgacacttggttttggtctgacccctacccatgttctttccaattgtttgtgtcattctcccctagaaaaggttttaaattttctaaatttaatctgaaatatcttatataatttttgttggatatattttactaggatctaga

SEQ ID NO: 97926 - DNA, 850 bp, Cannabis sativa
  modified_base (644)..(660): a, c, t, g, unknown or other
aaatctttttctctcaaactctctctccattttcggccctccttgagcagcaaagatccttggtttttctctgtgattcaagctcttttttgtgttctaatgaagctaggttagctcctaatcttctcctctttaagtttgttgaaattttttaaaagatgagtgttgcatgtatggtttttgatgtcattgctgctgttaattgttgttgttgtttctatgattaaaatgcttgaattgaatggattagataggttgtaatgcatgcttgttacccttgtttaagtttgtgaatttttggtacaaaagctatggttttcaaagtaaattgttgattttcgttgctgtggttgctgctattgttgagtagtgttttctggtgttaaactatgttgaaataggttgagttatgtttgatttagtggctgtttggaggtatagtcaagttttgagtttttgaactcaatcttgaacatccaatggtgaattgagtttctgtgattgaagcttggttcttttgctttggatttttcttaggggtatttagaacaagtctggaaagtttggtatgatttggatttgatttgaaagagttatgaattttcaaaagtttcctgcgaggaaccggaattccggatgtgcannnnnnnnnnnnnnnnnggttcaggaattcccagaaccggtattccgattgtgcaacttgtctgccggttgggggattttcagaaaccctagtttttctcgtttctatgttattttgggtaattcaatgctttttatcgatagggaaacttctagtttctagtttaagtccttgggaagtgatttagcgtatcacttaatagtgttg

SEQ ID NO: 97927 - DNA, 1726 bp, Cannabis sativa
aggaagtatcaagatggagaacatggtaaatttctaggctacgactcggatgaggaaatcgagccattccatctagatatcctaaattcagaatttccccaaggatttgaacccacatgttttgcagtacgacaggaccacagacccagtcactcacttaaacaactttaacattattatgcgagccagcaatgtcacgaataatttgcattgcatttattcccgacctctttaacaggagctgcgagcagttggttcgaaaaattttactcatcattccataacatccagggagcaattgtccagggacttcaaaaagcaattttaagtcgcaagagaccgacgacctaaagtatcatccttaaccaataaaaacaacaaccaagcgagtcacttaaggcttatttaagtcactttagcatagccaccgcaaaggtcagaaacctgaatggcagtatacaactcacgacacttcaggcaggcataacaactgacctatccattgttggaggcaaattatgggatgatctccagggtcaccctgtgagaaacattaatgagtttaacgaaagagcataagtatttgtgcgtaaagaggaagcgagaaatgagatgaagctattgaaaactagctccaaaagtaaacctaccacgagtacggcaacaataagcacgatctcgactaaattagacaatcctaatggttcaaacacgaaaagaaaggatgattcgattatctaagaataaaaaaaacagaaaaggcatgacaaataagtttcgatttattcagtatacactgagttgaatgaaacttgagagaacatatttctcgctaataaacatagaattgcattttgcaaacctaagcccgtgaggcatgcgagacataagcgtgattcaacaaaatattgccaattttacaaagacatatgaatgtcgaaaactaaaggacgagatagaaagcctgatctcgcggggatattttagacaatatgtaaggcatcaaggaatcgagcctaaccagccaaacaacccaaataacccgaataaccagagaatgcaacctcctcctgttgagggcgaagatatcttggtcatttcaggagggccgcacctcgttggaaatagtaataatggccaaaagaggtatatcaatgaaataaaaaatagacaatcgacatttgctctagaaccactaaaaaaagtaaagtaaaataaaccttcgattatcttctcggaggaaaatacaaaacacgtacagtacccacatgttgatccctcgtcttgacagtacagctcgccaataagaggatgaaaagggtattggtggacaacgggagttcaatcaacatcctatacacggacacattgaaaaaaataggattagaggatgtgaagttgaagccttgcatggtgagcctatgtcgatttacaggcgacagtgtcgccaaccttggcatcatcaaacttccattgactgtaggagagccacccttatcaatgacactaatgcaggagttcttagttgttgatcttccatcagtgtacaatttattgatgggtcgcccaacactaattggcttgggggcagtaagttcaatcaaacacttgtccctaaagtttccaacccaagcaggagtaggagtagtcatagacgaccaattattggctcgggagtgttatcgaatagaacttcagaataggagagccaatcattaattgatgg

SEQ ID NO: 97928 - DNA, 630 bp, Cannabis sativa
attgtgaagcccaatttagactatgaaaaagcgccttagcttccatttcatcgctacgaaagcagccttgtacacgtttggagagagcagcaagaacatctcctctatagtttcgaatcacagcacctatgccaagtgtttgttggctgaaattagctgcagcatctacattcattttaagcatatgcacagctggaggagtccatgtgatattatccaagcttcgtgggtgtgtgctacttgtagatgcatccaaatcgtgctgttggttccttgttgtagcatcaggttgctggtgcaaggttggaggagatcgaaccaaagctgatgcatccaaatcgttctgtttgttccttgttgtagcagcaggttgctggtgcaaggttggaggatatcgaaccaaagctgtgtgacaagtggatcgggtaggatggtgtggtgctgttggaggtggcaatgctgaagtattaactgtagtgttgtgttgcctgttcagctgctcatttgcaactccatcctgttgaaaactcgcttggtgggctactggttgctgcaatttattgcagagagcatccttagcacatctgtatttttctatgtagcttaatgtgaatgatgcaattgcaactg

SEQ ID NO: 97929 - DNA, 537 bp, Cannabis sativa
  modified_base (311)..(324): a, c, t, g, unknown or other
tatggtttagattgaaaacgcacaaagtgaagagaatgtttccacggcggaggtgagtgcaaagtcgttagagcatcatgaagaagagttggaattgtgaaaggcagctgcactgcagatgtgggatttcaccgagaacaactcgaggagaaaatagagtctaaaaggaatcatcttaaagagttgaactcgcaatggtgagattgcactgttaatttgcttagctttttcatttgggtttatcaaactctcatgaagcctttggaagaggaaaagagaagtctttaagactaggggtgttcataaaatannnnnnnnnnnnnnatccgcacgatccaatccaatcattatcgatcatctgtgttctctttctagccattttctttccttagtgacaagaaaccataatttttttgtatttgaattaaaaaaaaagggtaatatacaaattaattaagatattctctgatgaaaattacttgatcatataaataattcaaatatgaacatttgttgaaataataataataataataa

SEQ ID NO: 97930 - DNA, 1669 bp, Cannabis sativa
  modified_base (68)..(82): a, c, t, g, unknown or other
aactttatatgtgtttattctcattgttttagaattcatattaggatgttaataaaacatacttggtnnnnnnnnnnnnnnntggtaaaataattccaacagtaatcatcattgcctatcataaatcatggcatttaagttagagaaagcataaaaaattacaagtcaaacataagatgtgtaagaggtaacttactttggtcatttctcgacacacaagagtcgctacctcgataggagaaagatcatcaagtctatgcaaggtctggtcccatttacctagaaggtcttgaacatgtgcacggttcaccaaaaaactcgtggatagggccaaacagtgacctgccaatggcaatgatgcaaccaattcttcatcaatagaagttgcatctaaggctagagtaacactagtggtcccagtattagaagtttcctttcaagatagatgcagtcagaagaatggggcacagtcacactggtggcccgtgtatctgagcccaaaaaagaccatgttctcctaaccttgtcggggtgagcactagagaggtagatgaagaaaacccccttcttcgaataagttgcatgtcacaacacgctgctcatatctacaaaacacacaaaagacaattattaaaagagtaatggtacacgagttaatagagtaatatgataataagatgaatgacaattatcactaagtgagtcactccccctaacaggccttttctttgaaggcctagacttagtatccaccactatggcatccatattctccttctgggattctaaaagttgcaatttttctttgttttctcttatttagacaaaagggatggtgataaagttgaacccaaaatcatccaaggcacaaaaagaggtcaagattgagatatccttcttatagccaggcaattgagctatcattaaagctctctcgtacatggccatggtgggcgaaagtctaacaaattggttcacttgttggacattggtgtatctggacccaatgtctttcacgaggaaataaagggtcttgaagtcacctttcttagaaaacttatctacacctctcataaacttgatacctttgtgtgcgtgttggaacccttagtagcttgaccgctgatgagtgtggttcagcctcaaattgaaaaggtagtgtattttgtggcatgtaggccatttccatctcatcaatttgtataggacaaaaatcgttgtaagaatcttcatggccattggggagaactgcccaggactaatgcaaaagtaatcagccacgtctttaaaaaattgttggagggggagcgcccccatgaaagatgtgatgatgagaccaagtgcacaacccctctctgggattatgtgctaattggactttggaggggagcaccaaattactgtccttgccattcacaatcatctcttttaagtgtcggaaatgggtatcactaaggctattaggaggagccacacggatgagtaggagcttctttgaggactctcagagcaaattctttttctttgagagtgaccatgccagagctatcagttggatcctcctcggtgtcatccttagcaaagtagttttttgcttcattctcggggcccatttctcaaatgctttgatgatttcatccataagatcttcatcagatgaccaagtttc

SEQ ID NO: 97931 - DNA, 569 bp, Cannabis sativa
taacaaaataaataaacacaataataacacacaataactcaaatataatataaaaaactggttatatttatcagctagttaaaaatttgagagaaaaaaaaatggttccgtaaaataactaagataaaaactcacacacaaaaaccagttaagtaaaaataaataaatcaaaaactagttcattgaatcaactaaataaaaaatcagttctcaaaataactaaattaaaaattaattccttgaattaattaaattaaaaccggtttctcaaataaataattcaggaggtttttcttttcttttttcaaaatgaattgaacttgatgatactaaaacatgttgttttgaactgaaaacacaaaattgttatgtaaaactgaaaaagaatagacaaaggaaaggaatatataggaagataaaaaagaaaaggaatagggtaacagtgtcgttaaatacccgaatctattaaaaaagaaaaggaatagggtggttcaagctttctataatcacctattcacttaaaaaaaaattctttgcaacactcattcatttctccaacacataatttt

SEQ ID NO: 97932 - DNA, 642 bp, Cannabis sativa
  modified_base (163)..(163): a, c, t, g, unknown or other
taattatattgctaattcaattttaattaggttaaactagtataatgagcctaatataattatttaaagaaggcaagtgggccttcacaattggagttgttcatatgaaagagggatggattcagtatgtcgtacccactactaatgaccccctaactctcanacaaggcccaaaggagatgaatttaaccttaagtaaaataattatgattcattgaataagtccaatactaattggacctaaatgaactatcataagtgatattttattttagcaacctagtctatttaaatatctagaaataaatggacttcctatatgcatctaagctcaaaagcaaacatataggctcacaggtcgaattgattttgatgggccctatcatgtttctaggtttacacagatgaaagaaatataaaatttacctgtttctaggtgctcaaattattttaaagttgctaattgtttagctagttaggctcgtttgttccattatttaggggtttggacaaaggagttgcctgtgtgtgctgctgcttgtttaaaagcagttgtgccgtgtggtgttggtttgtaactgtgtttttgtttcaaaaaaaaaaaattagatcattggacatgtcaacaagttaatcatagca

SEQ ID NO: 97933 - DNA, 1053 bp, Cannabis sativa
actcaatgcgaaagctgaattttctaagtattagcgttatgcgcggaatgctcactgctcggtctagaggactttgtccgaggaaatgtgtgagatgccttgttcggcctatgtcttgcgagcaggtacccagagtcgattccacatgtcaccattgtgtgataccacgtcagagtgcaaaaattaggataacaaacattaaattattaataaaacttatagatcatctagataaatttcaaattcttaacaatataagattttcaacaatttgttaatttttaaatatattttattaaatcctataataagattacaaaaacattagtttttgacattttatctaattagatatttatcttaattaaaaatttatatttttttgtcaatataacatgaaattttaaaaaattattaatttttatttgaatacatactttaggattttctaaccaaaattgtttttaacttaggatattttattttatttaagattgataatctcctaactataaaaatgtcctttttttttaatttgtttattttattaaattataagatttaaaatataataaaagaaatatttaaattttttaattaagatattatgttatattatcttattagttattttatcaatttaaattaaatttaaataaactaaatatttaaatattagttggatatttgaatttcttaagatatttaggagtttattagattttaaatattttctaataacttaaatttcaattctagttaacatattttttaaatattttattttaaaataaaaatatcttaacctacttttcatattatttatttgatctaaatttttatattaacttgttgatagatctaataatctaattttaagcatagtctagttgtcaatctattatataaataatttgtaacaggtaaattttgttatttctttcatctgtgaaaaatctagtaacatgatagagcgcatcaaaatcttttgtcttgtatgagcctatatatttgctattgggcttagatgcataattttatagaaattaattt

SEQ ID NO: 97934 - DNA, 637 bp, Cannabis sativa
atgagtgatagggaactaggttccctgtcttgtttttaatcaatacattgttctctgcttgcattgaagaaaaccacttaggattagcaagagcttgcttcagagattgtgattcattaggcaagagagattctagaagagtatatatgtagttgcattataagcttttggttttgatattccaaatttagatcttgtttgcactgaatgagagttaatggtgggtattgcgttgggtgtttgttaggtaagattttgtggttgctgagtttaaaggtgtggctcttgacatgatgtaggagaggatagtgtagatggttggtgatttgtgggatatgagggtagaacaaaaccagatgtagtagcaggggaaataggagacacagacctggaacatgaactgtgttctcttatgcttggtaaaaaaaaaaaaacagcggtagttggaacagagagacatgcattaaatgttggtggttcaggagcaacaaccatagtgacaattgtagttgctaatggatcttgacgtgcgattgctggtgcatgttgagccacatgagtggataaagtgtttcatattgtcaatacaatacaaagctctttcaagaaactattataatatatttagttttattaa

SEQ ID NO: 97935 - DNA, 811 bp, Cannabis sativa
caccctttgcctgctcaggttcgtccgaactgcttccttgggaacctttggacttagtaactttcgaggctggagggtccatgccagtttgttcttcagaaaggtcaatgacctctccagctggtgctttctctttggacggagtttcaccgcccttggactttttggccggaggggacaagcccgagcttccccccactctcttcttcaaagcctcaatcatcttcttcgacaattctgcacggaataaaaacaatacagtcagaagaaagtataaaatatatgaaggcatgaaaatcaagaaaaataaatgcaagatgaagtactctgcatgctggcaggagcatctgcccgaacaagcacggatggggcatcatcatctgaagagtcttcctgctcttctaggacagcttttccctttccctctgcaggggttgatggtcgagcaggtagatcgggctctctgatccggatagtgtgttcgatgggcctctacccggtccgaagggttttcttcttcttgagcggcctctcctgctcagaatattcttcagcctccttctcatgctcagaatattcttaagcatattgcttggctccagcatcacccttcaacttagcctcacgcttaagttgaatgagctccttctcttgctcaactctctcagcctgccagaactagacttcttcttctttcccttcacgagctggggtataaattttgccgaataaagcttgtacttcacaaagttgtcctctgaggtcaacaaagtgatattccgagtagcattcggcagttggacaatcctct

SEQ ID NO: 97936 - DNA, 924 bp, Cannabis sativa
ttgttcttccccttcgacaatggatgatgaatccaggtagcagtacccccaacccttctaactttatatccttactcttcttctttgatttcgacccccttctctcgatttcctttgatttaaaacgaaaatgggtgtgacatctgggtttggggttcttatgctggtaaagtggatttgtgtttaatggggtttttgatttaatttaattaatatttttagtttattttaattttcagttataatcccaagttttaaatggataatgccacgtaatgtgtattttggtgacttggcacttgggctacccagccacatgagcagaaaacggggtccgttagacgagggagtgtatttgctaacggaatagaagtttaggtggttttaccaccaaaattttagatttgggggttagttgcaagttgcaactacctggccacttaaggaggttatgccacaaattaccctaagattaatattacgtggaccactaaaaatttaccacgtgtacaagtgtgtacacgtggacagtccaccgtagcatgtaactgtgcttttaggacggagaggtacagagtaaaacggaatgagagtttatgtagttttgcccccaaaaaattaaattttgtggttaagtgttacaaaacgtaaaatttaagtggtttagccgccaatatccctaataataataataataataataataacttttattttaacgttctaattattttaactaaaaaagataaaaaaaaaatactattagaaatgttctaactacgtcatatatataaaagaaattgaattataatttaatttctacatatgctaaaatattgaaaatgatatgtcttaccaaccgtccaaaacataagaactccctttgttctacacttaataaatttttgttggtaactcgatagt

SEQ ID NO: 97937 - DNA, 765 bp, Cannabis sativa
tttcttttcaacgtttcatcatctgttatgtaaccaccaacttgtttctttggtagcatgaataaacaaactcacaacaagatcatctcaatatatcttgctaccatatcgactatcttagatggaatctcatcaactttttcaggaataaacaagtcaacaagcttaataacaaacactccacaatcacataaaataaaaaatgaaatacaatatgaagtcaaaaaccagtttcgtttatcacttagttaaaattctaacgtagggaaaccagttagtaaagcaaaaccagttttttgaataatcaaaagaaaaaactgaaacttaaaactcagtaatgaaaaataataaaaaaaactcgttacttaaaaaaaactaattatgaaaatcaataaaataataagacataccataatttttttaaataaaactatataaaattaaatcatagagactaattatattaaatgagcaattaaaaatacataaaaacttgtttcgtacctaaaatcaaaataatacaaagaaatttaaaattaaaaatatactctaatatcataatatggagcaaccccattacaaaaccctcaaatctgtgaaaccagtttcaaacatgtgaaccatgtgaaaccagtttctcgaccctataaaaatcataacaaaattaaaatgatgaacaataaagttgaatgaaactagtttcattaagcaatcggataaaaaaagaagcacacacacacaaacacaaaaatacaaaaaaaaaaa

SEQ ID NO: 97938 - DNA, 582 bp, Cannabis sativa
tttctaggcaagaacaagacacttacggtgatagtgccgacttcactttctgatttggagataaataaggtattaagagttcttagagcacacatgaaggccattgggtggacattagttgacatcaaggggatcaacccctcaatagtgatgcattggatgttaataaagagtggagccaaatcgaccgttaatgcacaaagaagacgcaatctaccaatgaaggatgtggtgagaaaggaagtggtaaagtgattagatgcatgggtggcttatccaatttcagacagtaaatgggtagtccagtccaagttgtgccaaagaaaggcggatgacaatagtaaagaatgagctgattttgataagaaatgcaactagttggaagatttgcattgattaccgcaaacttaacaaggcaacaaggaaagaccactttcctcttccattcattgatctaatgttagacaaattgaagggtcaagagtattactattttctagatggttactctgggtatcaccaaatagctatcacacctgaagatcaagagaagacaatgtttacatgtccatatggcacttt

SEQ ID NO: 97939 - DNA, 1047 bp, Cannabis sativa
tacggttttacggaattttaaatatttttacaatttttttttaattttatttacaaaaaatataatctttttatattgtattcttgttgattttttattaccggtatattatttttttttattgttttgatattatttagattatatttttatatagtttttttattgtttttatgttgttctatgaaaaattataaaattgtaaaaaaaaataaaaaatctttaggaataaaattaggtttttataggaataagattgagaagtattttttttttattacatactaattaaatataattttaataaatattttttttcataattaaaatattaaatacaatctcatatagcttaattaaaattaaaattctaaatgcacataataaaaatataacttacaaaattaagataagttgaaaaatacattttttttatatatatattaactaaatttacttttaaataaaatttaatttaaatatatttttttattggcataagttgatatatacttttttttttttattcattaatcaaaaaaattctcatattattattctattataatatacctactttttttttttagtggattgcctaatatatactcactctctacttaagtctagcatataatttacataacttaaaagtgggtatatctaaaaaaatatgaaaatggggtaaaaattaaaacaaataaagtaatgtgggtatacaatgtaatttgagaaaattacgttgaaacacgttaaatataatttatttatacatatacccgtattaatttaaattgataaaaataacaaaaataatttacatatctatatgtatactcagtaatctctctttagtcgtctgctttgtttttttagactatcctttctttcattaataataaactgttatcatacatatagttaattatatattaaaaaaaaactttatacatatataattttttttattattttttaaaaaaaaaaccttctgcctttttttttccaaacatcaaccttagttattgaatttatttatttattttg

SEQ ID NO: 97940 - DNA, 591 bp, Cannabis sativa
aaatatgaattttaatttcctattgattgctagcaaccttgtttattgttttgagagtttggatgagatttgggatgatttggttgagattggtttctgaattttcgagttttgatggttggtttttgggtttggaacccaggtgccgcggcttggtctgagcatgccgcagcccacccctctttggtggaacctgggatttgtcccaggtgccgcgacatggcttgggcatgccgcgacccgccctcgagtttttaagcaattttgaatttgaattttgaaaatgcatatcttttgattccaaactccgattttggagttctatataccgttggaaagctcgttccgggctctatgtgattatctaaattttaaatgcaatgaatgtattttttttgaatttgaatcgggggttaaccctagttgtgaaaaatcgcagattgtgtgactaggaataccggcacctggtcaggagcacctggggattcggattctctaccattgtgggacaataggtaagatagtagttagcacgtagagtatgcgcagtggcacttatattgaatatgatatatgtgagcaattgtaacc

SEQ ID NO: 97941 - DNA, 3817 bp, Cannabis sativa
tcaaaacttatatttattttcccatatttttgtaaatagccctttttgttttgtttgtcaggcccaggcccattccatttctaacctatcagagctagcaactcaattgaaagctctttttgttttgtttgtctattcaattttgtcttaaatagtagatttcggttattaaaaaaaaaaagaaaaaagtagtctctaagttatagcaaaaactatgtttaatcctcattaaaagaaaagggaatatttttccttgttaattttagaaattgttcaacattttttgaaaaattaatagatatatattttttttaaatataaactttgtagtttataatgactcgtatacatttcatctatatgaactattttgctacaaatttgaattgagtaaaagctataaattaaactctatgacatgatttgtaagattaatttcaacaaagatagagttaatgaaccttaatagcaattttatattgcgattgcttttttttaatttttttttcaatgtattaattaattatatcttttgctaatcactaagtcaaagcaaaacttaacattataacacatgcataaagaagaacaacttttgtggtcggcataaacaaagtgttcaatttttagggcttaatatatataaataattggctcattatttaatttctgtaaaatatcttaatcagtgggaagactttgttatttatttatttattattattatcttttttgtcaaaatcacaggatcagaattataaaaggcatcatcataaaacaggagtttttcactcatttgtatatattttcaaaaaagaaataaaccaacgtgaactaaaaattggtaaaataaaacttttttttttgaagtctttgaaatttataatggtagacaaaactagcatcaaaaggggcaatacccattgtgacaaaacatgaaaaaacctagtgttaaaagacactaaacaaactgtcaaaattggcacattattattcctaatatgtataaggtaaacaattactgtggtacaaaactagtccaaaaacaccacataagccacaaaactcaaatatattaaatataattataataggattcatatgtgaaaggcaaggtgacattttatttgaaaacatgttcaagtatgagaagtgatgttcgtgttagttaagagctgttagttatgttaattagttgggttggtttgtattcattttgtacaacgcactgtaactaatttcagtcagtctgttaagctcagtattgtaaagctacatgttgtatataaaaagagcaattgctctaattcaaaaatgagaattcattcacattgaataatgaataatcgttttcttttaattcaatatggtatcagagtaaaagaagtatgagaagtaatggggagatgaaaagaaatgaatgaagaatgtgataaatttataagcatgaagaataaatcccaaacctccgcgtagtaaaaataaaaaagtatgaataattagtttaaataattatctatgtaaagaaaatttcttaaccataggcaaatgtctaatgttgatgagtaataagttttgtataataaaataaattaataatagctgccaataaaatcattgataatttatattatatatatctattgtgcactatactaaaacctcatatttatattgtttttgttcctattatcaaatgtttagttagaacccctaactaattagcaaaaaaatgggtatattggactacaaaattgaaagaaagtttgtgatgcaaaacaaaaatgtaagcacttagtttgatgagtaatgatattttatggtaatagtataaaatttcccaaaaggaaagaaaaagaaagaaaaagctaggagctcaattaaaatgagcaacaaatgcattttgtagtggataataacaatatgagtgattagaatttattccatccaataaggattggttttgtcaaaaagctttattctttctttgttggatagagaagtttataccatgggaatatcttaaaaagtgttcacaatatattcctttagttgaaaagaaaaaagagttggttgttagttgttattgttaaattattggctgagaatagtgaatattaaatattcgttgtaatctgggtttttccatccaaaggaatcaatattgtatgtacctcaaattcatataatgctactaatgaccctttcatgagaatgtgacaactttaataacctattaaagtgttccttttactacaaagttgattggttgagattgaaaagtaaacaaacttagttttatgagaataatttcactataagagagttatttattttagtcgtcgtttaagagaaattttcaagttgcttgagtacaaagtttaaatataggatctaaaaagaatgttgaattggatgctaacaaagagcatagataaattaggtctgtgtctagagctcacctagttcagaagtctaaaatttttttatttttaagacatttttttactaattctaaaaataccacatctctttttaaatgagagtccaatttttttttctttctatgactcgcataaaagagttagacagtttgaaccattaagactccttatattaaaaaacttattttttttaatcatccttatgtataataatataataattttttttataatgtatacactattcgtaacactaaacatgcatttccaaaaacttaataataaaaacttgtgatgactctaaaattattatttattctaaaattaatgttatatgattttcttttaaaaaaattaaatttataaattattgattaataattttattaaaataaaaaattaaattttaattttttgtctaaagtctccaaaccggttgaaagaaccctgccatacatcaaagtcaaaagacaaatcaaatactaataacaattaatattgaaataacaatattaattaggataatactacaaaactttgatcaaattatacttcaaaagacaaaagataataataaaatatacccaagtacaactaattcatatactttatttttatttttatattttatgaaataatacatgtatgtacactttattaaaaaactatataataacattatgtcagtacatattatgacagaaattattgtaaaataaaattagaatatgaatagtgagtgacgtagtttatacctgagtataaagtatataccaccatttatttattttaatcattttatacattattgtataattaatataatatataactctcgtagctgtgccattatgctattctgtggaaactattttatgaatttacattataatccatagtaccaaattacaaaatagaatgataaaaaaataatcacatttcctataaaataaaagaaaacagtaactataaaaattgattgatttatagtgataaaatacttacattcgaagtgatttaaattctcaaaattataccaaaaaaaaaaaagtcacactacgaataataataatagtaataataataataataatataataattactattattataaaaataaataaataattcatacatatttgataaaagcatataatggcgtattcatagcatgagcatcgagatctatatatataaagtcatacatgaaagacgaagaaaacttccaaatccacacatataacacaataattgtgttttatcttattattaataaatataataaaacttttcttttgtttttttattagatatctctatatacgatgagtgctaattaattcaggggcggacccacattgtagcgagggg

SEQ ID NO: 97942 - DNA, 939 bp, Cannabis sativa
tatccaaatttctccccttctaacttctcgaattactcttctaatcgtgccccttatcctggcactctttatcgaggttcatcctcctccatgaatatgggaagaggatcaaatgctggaaccagaggaggaaaaccatctcagcaacaacacaggctccagtgtcagctttgtcacaagcttgggcacactgtggttgattgcttttatcgatttgataagagcttcactggtgttgttcccactgctgaaacttccacaatgcaggccaacttagctcagaacacatctgtggatgatggaaactggtatcctgactcaggtgctacaaatcattgtacaccagaccttcaaaacttcatgaccaatgctgaatacactggttctgatcagatttatgtgggaaatggcacaggtctgtccattcaacaccatggtacaacttttattgcacctcataatcataataagcctttattgcttcgaaatttactgcatgtacctgagataactaagaatttgctaagtgtctccaaatttgctttagacaataatgtttggtttgagtttcatgctgatgcttgttatgttaaggaccaggttaccaaggaagtgttgttgactgggatcctccacaatggcctatatacttttgatccaagccatttcaaagtgctgtcctcttcccatccatctctcagttctggtgttaagttttctgatccaaaatctgccttagttgtcacaagtgaccctgctgtttcagcttccagcagccattgtactcagccttctgtttcagtttttgatttgtggcataacagacttggccatccttctcaaaaggtggtcacatctgttttgaattcttgtaatatctcatgtaataaaacctccaacagtgtatgtcaggcttgttgcttaggcaagatacataaa

SEQ ID NO: 97943 - DNA, 718 bp, Cannabis sativa
  modified_base (108)..(120): a, c, t, g, unknown or other
tcttcactgagggatcaatttccaaatttagctgtgatatctagggccaagaatgtaagtattcaggagatgattggcgatgagggcgaggttggagattgtgtggcnnnnnnnnnnnnnaaattcagaaggaacattatggatcaagagattccgagcttgacacaattgatacaaaagttggaacacgtcagagtacttaacattcttgatgatagccgcatttggttaccaaattcttgtgggatcttctcttctaaatcagcattcggttggtttacctcaaccgagaattctgatgagttgttctggacaaagatcctttggaaaagtagaggtccttccaaagtttggatggttggtggctctagataaattgaacctacacgctagactgcaaaaaaagcgcccattcctgtgtatatcacctggatggtgtgcttgttgcaagataaatggggaagacaacgcacatttgttcttaagttgccgcctcgcaagatctttatggataatgctgataaacgaatttcagattcaatgggctatgcctggttcggttccttacatgttagtaagtaaggttggaggcagtaaacgaagcacaagcctatggagaacggcagtattgtcggttctttgggttgtttggttagaacgaaataagagaatctttgaagattcggaaagctcgacagaggtcctatgggaaaaaatc

SEQ ID NO: 97944 - DNA, 691 bp, Cannabis sativa
agccaaatgctataaattacacattctaacacattcttataaacataatataatttttatgacacattctaatatatatttttttaaacatatttgtttttcaataaaaaaaaaaacaaagcctataacttaaagacgaaaaagaacaagctcattaatgtatacatacacatgtatatatatacatatatatatatatatataaagcagccatttttcttttgctttttttaacaatttttttaatcaaacaaaatcacatgtgtacatactaggactaagcatcgggcaggttgatcgaatttcgggttcacaagtttcgggtgaaaaaataaatccgacgcccaattatgtgtcacgggctggcaggtttaggttgggcgggtcaacaagttgacccgataaactatttttttttttttttgtaacatccacctaattatctataaacataccctacttatatataaatatataactaaacctaaatacttatctaattgtatctaaacatataactaaatcattaaatttaatgaattatatatacatataaactttcaacacatataaaaagtgtatggtcatataatatatattatattatgtaattttttcaagaatagttgatattattatatttgaagtcgaatatatattaatattatttaatattaacttattttatatt

SEQ ID NO: 97945 - DNA, 684 bp, Cannabis sativa
aaaaaaaaaattaaagtatttgtgttaagctcaaatatatcaccctacttatccttaatatataaagaatgcccaaaatcctaacaacgaaatatcctagcctaactgtgtaagctgtggaaagtcggctaacatgaggtttccctgttcttgggttcgggtttcctatcccgataagattactggccctttttgaagaagtctcagggctgtgatttgtcatctagggaggtgtttcttgtgaggaagtgtgctgctacggtgatgagttcgaggccagaggtgcgggctattggtggtggtgttttgacatctcaatcaacgccgactatgaatgacgaaaaaggtggccaatgatttggtgaaatggcatcatctatctagcacgcttagggctcgtttggtacgtcgcattaaaatgtattgtgttggattatattgcattgtatcgtattgtattgtattagtattatttaatatagtacgacatttggtattgacttgtattaatagattgtatagagttataatatattttcaatacactcgaccacaacaccgactacgcatgggtcgggtctcgggttcgagccctgggtccgggtttcgagtccaggtttggggccaggtctaggttcgggtcctggtctagggtccagatttgggatcgggaccgggtttgcg

SEQ ID NO: 97946 - DNA, 592 bp, Cannabis sativa
taacaaaactaatatagatataccataatctttaagtaatttgcttttaatttaaaaaaaaatatatgcaaaaaaaaattattgattatttttatgtggcaaaagataatataaataataaataatataaaatggtcattttgttacacatagtccaattatttgggctgtttactataatttcttcaaactcaataccacaaaaaaattcaaagacatgaaatgccataaaaagtgggcaaacaaaaacatgacatatttttcaaatattgtttcaaaatctcatgttcagtgtaatttccactcttttttatacgacgggctacattatacttatacttaatagtatatttatagtagacatctcatttttttttcttttaaaacttcttaataatttacaagaatgaaaatagaatttaaaattttaattacacacgcaattgaaatattttatacccgtgtagctaaatgtttgaatcttgtttttgatataataattttttttttatttatttttcaaaaacagatggaacatctactataacaacaagagtaaatattattttggatcttgtattttgtaaaaatt

SEQ ID NO: 97947 - DNA, 567 bp, Cannabis sativa
tattatatttatgtgttatatgcaaaatttataatttctatatgatatttttgctcgacgacgatggaaaatgcgacggatggccaaattagttacatgggttggttagaacctttttaattagcgagatattcataagttgatatttggaatatcagatttaggtgaggttatagtattggatcattttacccctaagccattttaccatttaagcacttaagtgggggcactttggtcatttaatttacgaggttaggtggctgactttctagtggatagcttaccacaatgtgttgtttaagcctaagattactattgattattgagattaatctaacttttgaagaaaaaaatcaaatttggcttcttctctctcacccctttcgaaccctagaaggaaccagctgcaatttgggttttgtggagcaaatttggtggaattctagctaaattcaagtagtaagaatcaaaggtaagaaccttagaacctatctctttaagtttttttttttatttcttttagtttcaagcaagcaaatattataattcaattctattcaaacc

SEQ ID NO: 97948 - DNA, 523 bp, Cannabis sativa
ttttaattatatctaattgaaaaacaaaagttttatttcttaaaacctttgaatttttaaatattccttgtcgaaaaaaaaaaaattaataattttggccctttcttgtgagttttcaaatagatgaaaggataataattattgttacttattaaataaataaaatgatataaattaaataatagaagggaataattaaattgatataaaaatccctttatttttaaaagtaaataattttcttgaaatgtactatatcacatgcttttgaaagatccaatgcagaacttttcaaaatattagttctataaagtcacccaatattttcaattttgatactcttagtgatgtctaatatattgtttatattgtaattagactaaatattttagatttttattcgtaaaatttaataactgcattatttaatttaataattattttaaaagttactactaatggttttataattgtagggatatgattttgtcccgttattgtacttgggaaatttgattttcta

SEQ ID NO: 97949 - DNA, 644 bp, Cannabis sativa
tcaaatatgatttagtcattttattaaataatgttggggctacttttatattgtggttgtaattcatagaaaaccagttttggttttaactttctattcttggaagttagttaagaaagttagttaaagtagttatgttagttggcattgttcaagtggttagtagcttggttttataacctatttaaacaccaattgtaatgtaatttgtaaggaagagagagttcatgagagagtgattgaattcagagaagagagttgagagattgagagccaaagttggagacttttggtggtgaataaccatggtattcatggtgttctaaacaactcgatcatggaggtttgagaggcaatatatctttgtatgtatctctgattaatgaattctttattggtgtttgtaaactacattacatagtggagaaactccttgggggagagctggaataggactcacattgagatccgaactagaataatttctttgtctcactcttttatttttctctatttttctgcattgtttttgccaaattcatgttcattttttttctggtttataatatggtttatgagcattgcattgtgtgtgtgtgtgtgttgagattgtgctggagggatttacaacagtggtatcagag

SEQ ID NO: 97950 - DNA, 554 bp, Cannabis sativa
taaaatgtgtacaaagggtcagctggaacccaaaagctgaatagatcaaaactgaacttttgaaacacaagtgaccaagagtcataactctgctcagtcacttggggggcaactatacctgtacaaggcataggtttattacaagctcgattactaaaacaagggaaaatattcattttaaaaagataacaaagcacgattagtttgggattaaaggctactcggccagctagttgtcttaaaacaaaatgaagtataaccaagtttaaaggtcgcttggtcgaccatattgtattggaaaaattcccatgggccgaactaaaaaaggtttcacacggtcagagtccttggctctttgtgcggatcagcttggtcattagtggctggagcatcagtgttttggtcagtcggagttgtgcgattggctgccttgaggtcttccttatctttttgggccgtacaataactaagatatgcttccttggtttcattgaggtaatcaaagttcctgtccgggttggccttccagtattcatagaaaatctccagggcgg

SEQ ID NO: 97951 - DNA, 502 bp, Cannabis sativa
accctatgagaccctatgagaattaggtatgattatgcgtaattacacaaaactttacattttgaacatttagtactaaaaattattattttcatgtgtaattactaactattctgccaaacaaaatattaagaattcataattactgtctcatattcaaacacatcttgtattttaaaatttattataattactaccctactaatttcacaattacttctaaatacacccttataatagtgttgggattcttctttttttaaaaaaaaaaataaataataataataaataataattctctaaagttaccatattttgtgcaaattttatgcccataaaaatgtaaattaacttttttccccatatttattgttttacttttatcttcactttgcctttacagtttttccccttttctacagaactataaattttaatttaagagtaaataataactttaaaagaaactgatttccctctctcctgtttttttttttttttt

SEQ ID NO: 97952 - DNA, 896 bp, Cannabis sativa
acttaaatgcctagatgagtcctaatatatcaaaatgatccctgaaatttacaaattcttaatttttattcaagttttatttgtacaataaataaagtttcacattttttgaaattataactttcaacttcttctatcgtctatatcacatcatatcgctactgatagaattaagtatcgatcaactctcaaaaaaattaatttaataattattattaaatatcggtagtcatttacaaggcatcacctcatagtgatgtggtgctacgtgttatgtgcctaacaacaatgttctttgataatatacaaaatattatcataccgaactagaagcaacttaaatgcccagaagaatcctaatatatcaaatgatacctaaaatttggatcttcttaatttttattcaagttttttctgtacaagaactaaagtttcacatctgtaaggtctccaacagatcaagaatctttagttttcacctcatttgatttgcaaataagctaaaactccaagacttatcttacagatgattcatgagagaaaatgtttgataaagacaactgtaattgtgttagtaatagtagttacttacaccaagacttagacattctaaaagaaccacaacccatcaagtactaaatgataatttcgataagtagaacagttgtacagcaaagttttattagaataaataacagcaattttaactttttattactcaagtcatttggagcagattgcaaataatcttatagtcactgacttaataggttttattactcaatggatataattgtttcttccctttagatttatcatttggttgaaataactgcataaaacttctcaaaaaattcatacatataattcagcacactatgtttgtttagataagt

SEQ ID NO: 97953 - DNA, 1100 bp, Cannabis sativa
ttacatcttccgtctccctcaggcaaatcatatccaatgtggagagctttctccagtccatggaacaaatagtcaaaacaatatttttcctggagaaatcaaggtggtcacagaactcttcatatgtatacttcaacagaaactttgccagtttaaacatataaaagagtggcatcaactggcaataggggtagaacgatttccgttccaaggtccgagaaacatctctgagctttcctaataccatagttccaacatcaaccatttgcaaattccaataacatttagcagcatgagcaaattggtcagcgtctgagctcacagtcttttcacttcgattcaaattttcgacaaatttttgtttctccaagtaggcagaggcaccaggaataaccaaacggacgatatcttcatcacttataatcacaccaaagtagtccaagcagaacttgccatatatgttgtcatttttgcatccaatctcgagatactccaatattctttcaatattctgcttccacacattccaaaagtaaaacaaagatccaacagaaacttgatctaatgacaaaattttctctgcattttctgttggatatgtaacataattctcttgccatatatatgaccaacaatcatatgtcacatgaacatcgagaatctttcgagcacagaatatctgacctctaaagctggaaagtctacaggagtctttaaacaatttcttcagcatagacaatgacacttctttatcagaaagaatgttctcctctgtggagaccaactcaaagaagttgtctgaaacattcttggccaatagtttagcttttcctagaagcttatccttttcccgaaaattcttcaaaggccagccagaactcatgggaccccatagagattttgcaagtacatagaacagaagaattgatgatgcttctttaaaacgcttagccttttctaactgttcagccctccattcaatttctaatttaaaaagctcttcaagcaactgttcattccttaagaaagagcggatcaaatctttagaatgaaaagcattcacaaatttcatcatcgaggttcggtcattgagtttgatg

SEQ ID NO: 97954 - DNA, 855 bp, Cannabis sativa
acatagaaaccatcggagaaaccactttaggaacctaaatcgttaatttgaaaaaaaaattaaaaaaatagtatatgagataatttcctaattttttttcatatattcaaaaaaatttagtaattttttttttttgagtaaataacggcatcactctcaatacttttatttttctagcaaataatttttaaattttgacaacaaaacttaaaaaattcacattctgttagcatttaattatttttatttatttttaacagttaattgtcaaattaattgttcatgtttacataaaagtattgtacacagtgtaaataattaacttagaagttaactgatggaagtgattaaatgctaataaaaagtaagttttgaaaattttgttgtcaaaatttagagattgtgagttattaattactagcgaaataaaaatattagagattatgccacaatctatctatttacacataattcacatacaaatttgatatgcacgtatgtggtaatagtatattcaagaaaaatttgcggcataaatacttaaatttaattgttagttgcaaataaatactcaagtttaatttttagcagtaataatacttaagttatatttttggaactttgtaagtacctgaacattggtaagcggcttctccttggcttctctggcatacctttcttgtgatttgcgagagtcgcctgcgatgtgtggtcctccgattatatttaagatattggaggtgttctggagccgctcgcgttctgggtttctcctttgccatccgcttggggatgactttcctcgctccttttatacttgtcgaacttccctctccggatcagctcctctatttc

SEQ ID NO: 97955 - DNA, 696 bp, Cannabis sativa
caattattgagctgctatttccagcagattgatattgatcgtatcttgacgattcctttgtcttattttgctggccatgatcgattaatttggcatcattcctccaatggtatctatagtgttaaatcaggtttctatctcgccactaacttggaggaacaacactcatcctcaccttcaaacaagctttgtgaatggtggaaatttttttggaatctaaaattacctccgaaaatcagaatttttgcttggaaagtgtttcaaaatattcttcctactgttgctgccttgtttaaaaggaaggttttaaactctggggaatgttcactttgtacttccaattgggaatccataggccatgctctctttggatgtaagcatgctaagaatatttggaaactcactaaatttcagattgattatcgacaagcacacaacatgtttaatggggattatttatatcacttgtctgcaacataccagcaacaagaattcgaaactttgttatgtgtactatggggtatctggactggtcgaaataaggttgttcatggtcgaatttcaagacaaccaagtgctattgttcaatatgctaccagattttatgaagatttcaatcgactcaaaaatcatgttcggccagcagctgacactagcattattcatccatcccagccttctccttcaatcaatctg

SEQ ID NO: 97956 - DNA, 503 bp, Cannabis sativa
aagttgtaataaaaaaaccttgaaaggatactatcaagaagaaattagatgctgccaaaggaagatgagttgacgagctaccacaagtgctctaggcccatagaactatagagaaaacagcaacgggacacactcctttttcatttgcatttggctcagaagcaatgctacctgtaaaagtgaacattgcgacccataggcgtgaattctacaatcaagagcaaaaccaagaacttctgaatatgtccttggatctgcttgaaaaaaaacgcaatgagtcacaaataaccaatgatgcttatcaacatcgtaacacgagatactttaacaaaagagttcgaaagaggttgtttaatgtaggagatttggtgttgagacgtgtatttgtaaacatgcgagatccagcaactggagtgtttaacccgaactggggaggcccgtacatcattgaagctgtagttagaactgcagtttataatttagcttgacttaatggctcgcta

SEQ ID NO: 97957 - DNA, 2317 bp, Cannabis sativa
tatatatatataaaataaagaattttaaaattgtagaataatacctaactaatccaataaagttgctttgcgttcttcaaacacgaaagatcattcaaaaccaaagttgtagtatacctacaaaaataaaataaagagtattacaatataaaaatatatatatatatataatcaagcttttgtaaaaattctaaagagtgattttatccatgaaactgacaaatgtgagtttgtttacagcttttagagaattcgtggagctaatgaagaaaacaagacatgcttaaaagaacatccagtttttgtgtgattgatttatgttgaggtgggaaaaggctcaccattatttcaaggctcttatgtggagagtagcagtagagaaagaatagtttactttctctgtttttcttttcttttttccaatcaacaattttttgtttgtattggaaaaatagtagagataaaacaacttaatttggtcctttataattatgttggtctttatcctataacacatatatactctgtttatttgaatatagaagcccttgttttttgttactctgtttcaatattaatggtttaaatgggaataattcattaatttttgttgaacctaatatttgtttttgtgatattggaaatggttttcgatagtgtttgggtgaaaattttccacacaaaaatatattgaggtctcctaacaatctcaggtctcctcaaggtctattcctttgaaagtatatatagtaagcttaatttttgatttcttaattgtatttttattttgcgtgatttactttcagagctatttgattctaaaatttctattgcactctgtttgtgaaggctcttgcattctggtaacagatttatgtgcattatttactttaattgtatttttgtttgataagtattattattaggatgtatggattcataagtagaaagaaatggtcaaaatatatagttgatgtttcttgcacaaactatcacttttgacccctagattcaaaacaatagaaaagtcttttttcttgagtttaatttgtcaaatttcaaaaataattgtcatttatcctcaaccatggcctagatcactccttatgaatagcagggtaaacaggggaaacaatacaaagattaatataaacatatttgctcaattaaaaccaagtaatgacaatacactaatatagaaactaaaaaaaaaacaaaaacaacactaatagtgaaaactctgaacaagaaaatataaaaatgtggattctttagaataacagccgtgtcacaagaaaaggaatgaggcaagagcaactttgagaagttctaacatgtaaccaataacattatatataaagagagggcgaaaagaaaagaaaaatgtatttggggtttactctgtgatgggaagagcaagaaggaaagcattgcctccgccttcttaatctcatggggtgaaaggggaccaaactctaaaaataaaaaattgagaatatttcactctttttaaccgaaagtaaagaaaggtataagacaaaaaatattttgatgacatgggtcacaaatgattgcacccatcttcatgctttgcccaactgttcaagcttacatcattcaaagtcatttttttaaaataagaattgaataatatcacatcttcattactcattttagataatgataatcatatataaagttgtttgaaatgttgattaaaatattagtagtaaaaaccattatggacaaacactcgttaaagatgctctaataatcttctttagtactgtataatatttattcattatccacattgtctcattatttagatcaagttaaagattgtagttcactacatattaataattttgaaacttttttatatattcaaaagggataaaaacaaaaaataataactacttctataataacataattcttaaaggatcccatccatcaaaattatcacgaaacaaagaaattaaaattgtgaactcgatctactgatcccaattgcaaattctcacttactatatctaaatatattaatgtagagatcgataaaggttatattaatttctgaaaaagctctaatataaaagtagagctacagaggatacaaacgtaaaaactggaaatcctaacagaatttttttctcccatagaaaactaaaaatgatttcatgaaagcctcctaaaataaacaaatatccttgtttttagaatccagcatgaatctctaaagagaagaagcataggtgagaaacaacttgaatctccaaagggaggtataccattaaatccgagagagagagag

SEQ ID NO: 97958 - DNA, 873 bp, Cannabis sativa
  modified_base (767)..(776): a, c, t, g, unknown or other
actaggccatttgtcaacctaggcattgagcaccctatttctgagctctcgagtttttgttttgatacttctaaggttcttgaacttgaggatgaggtttcttaccctgttttttaccattcttgattcaatgattgactcagatttggcatttgaatgatcaaaaccagagcaccatgttgattgtcaacctaggcgctgggcctaacactcaatcaacctggcactgggccctatttctaaggctcgagtttgtggttttctctccgagtttatttgaatgttcattatcctaatgattcaaaaaatgctttgaacacttttttgagaacttgattggaaatagctcaggttgataatatgtcaacctgggcgctgggcctaatttttgacacctagaaagtgttgtttcttcctccaaagtacatatttcctcattttttatgaagaaaaagatgatggaaaattcggatcatcgatttgatacttagaaggcgcccagattgacaaattgtcaacctaggcgttgcgtgaccgatcgccacgtgctccgggtgctcaaaaataaacttgatccgaatttgattcttatgcctcaaatatgtttatggtatgtctagttgatgtcacaatgcaaaatttgacccatttacactaagatggtcccataaactgaaaccctagttgggaatgttaacttcggtatcgagtgaaaccctaggttcccaggttggcttttggggtgaagatgttgggttttatgcccnnnnnnnnnntccatttcaatgtaatccattttattcaatatcaataaagaaatagaagtatttttttcattcatttgtatgttttggttcatcttatcaattgctt

SEQ ID NO: 97959 - DNA, 998 bp, Cannabis sativa
attgagcaattgtatcacaccacaattttgctggaatagaagtgtcaaacctgaatttagccaaaagctgataaatccatattacctcacacacagactgtgccatagctctatattctaattcaacattggatctagacaacattttgtttcttactcttccaagagatcagactgcccccaactaatgtacaactaatatacaactcatgttctaacacttagcaataggtgaattgtagcacggggctaacataattgtaatgtgatatgttaccttattgatttgaattgaactaaaaacagagttagaagagtagcagaagaaatttagagaaactctactagagttcaagttataactagccagaggttttgtattaatagcaaagaacaattacaaacagtaagagaattcgagagcatggccttcccattttcccaccttatttctgcctaaaaaatcccacccaaactcctcaaccttttattacaaaaataacaacacaaaaaacatattcttagtatccttttatgagtcagcaatattctcacttaacttccttacctctattcttcctctacttgtatgtatattttagaagaggttaatcattaccctctgcctgaagacgcaccttctcctcatggtataaagagggaaattgtttattaaccaattcaaaatcctcctaagagttcttgaaagaaggcaagtgcttccatttgattaaaacctcaagcaacccctactgattgtttcgaatatctgccacggcctcaagttacacattccactccaagtcagcatgaagaataataggtaagaactgtgttggtaggttcaacaactttcttcaacatagaaatatgaaaaacagggtgtattggaacccgctcaggaagtagtagcttgtaagcaaccaaaccaatgcaagccaccactggatacgactcaaagtaacaaggggaagttgttcattcttgcattgagccaa

SEQ ID NO: 97960 - DNA, 1973 bp, Cannabis sativa
acttattaagttttattgtccatttattttagcatcttataggattaaatcaaaattttccaattcattattaatgtctcctatctcccattgatgacaaaatcctcacatttataatttatacaagaaagctctattattttatttatctaaggtaaaaatcataattatagtcaatataaattaattaaaattaactaatataatcacaatctaattcaacttaattatttcttatttattatctgggttagaataccaacatcatagccaatactaaaatcttctaattattttagccattcgatttattaaaaaactattcatattgatatttatctatacaacgaaaaaacaataaattcaatactcattaacctttactacccacttatttcagtatcttctcaataataaaataaaatcaaaaaaattcccaattcactattaattaatgtccccatctcccattgattatgaaatcttcacatttataatgtttacaccaaaacaatattatgttatagatagtaaaactcatatttattgtcaatataaattcccataaattgaattaaaataaactaattaatataatcacaattcaatttgagtattatgacttaatatttccttatttactgattatataaatgaattggaatgccaacatcataataatattaaaacccttctaattattattgccactcaattttcttaattaatttttaaaatatattcttagaaattgattaataaaattttcaaaaactttcccctatttgtaaattagtagatcccaatccatcctaaataaaacataacataagtcaattacaattattaccattttaacttttaatcctcttaaataatacaacaatttattttaaatctttccttaaatcaaaacttagccaaaatcaacccttttataacaattagtaaaatcaaaacagtgcataatttattaactttaaaattttattatatttttaaagttcattatatcgtgatattttaaccaaattaccctaaataattaggggccaaccatattataggcgcaaaaaccttgaaagacaccaaaacctttaacaatagtgcaactcaaacatcaaatttgtactgaattaagtaataataatttactaaatataaatatataaactatcaatagggtagaaatacaatagtttaaatcaaggaaaataaattaaaataaaaaaaatatttatttaattatttaatatattttaattatttaaaacaaaaattaatagtttgactaacaaaagaaaaccctaagccgcacgcacggaatcctaagacgccgctcaagttgtcttctccggccaaccctcgcctccgcctctgtgcccattctcgacgtctccgctccctcgttctcagcccgctcgtcctcgttctcagtcccgacgaccctttgtcaagtctgatgacaatgccgctcccttagccacagatggatctccattcccgacggagcctccctcggccaagccctatttgggtccgaacgggtgctgggatgcgggattaggctggttttgaagttggtacgattgggttagttgtttgtgacgattgggctcgcttgggatctttgtgtttaagtcgagatagttattgatattgttaatttgggaggcgatttctgatccattgttattttataacaaacagtaaactaatataaatgatagtcattagtttgttttgagttttggttttactgtttttagttttattttcatttattattttattgttattagtttaatttaaattagtattttatggggttagaattattagttttatgtgttgaaactaattaagttttcccattcgttttgtcttttgacatggttctatagtttgggtttggttttttggttttttggtttttggcgttagttactggttcttggttctgggttcgttcg

SEQ ID NO: 97961 - DNA, 572 bp, Cannabis sativa
gattgagcccctgctagagtgtttaagaaagttggtgcgacccgcctggccctgagtaattggaaccgagtgcaatttggaaagttggattcttgcatctctaagttggaaggccatttacaagctatccaaagtttgccggctggtgatagaaattgggctacgaaggttgaggtgaggaaagagcttaatgaggctttaaggcggaaagcaatttactcgcaacagagatccagagtgtcttggattagggatggtgataagtgtactaattttttcttccttttcgccacgattcgtaatagaagaaactcggtggatagtatcttgaacaaggattgtatgtggttaactaataaagaagagattggtaatgagtttactggttttctgggtgacattttcaaaaacccgcatcagggccctctggaaagcctagactacttaatccatgatcatctctcccctttggagcagtctgagcttgatgtgatccctggtcacgaggaaattagacaaacactgttctctatgtgaagcttgaagaatccaggtccggatggtatgtcagt

SEQ ID NO: 97962 - DNA, 941 bp, Cannabis sativa
taagaactcaaagttcactcaagtttggtgattttgtttatttaatatatttctgagttttggatgtttggatataatgtttttatggtatgagactgttctgtttgggcaggtttggacgagtgttggtttggttttggagtaaaaacccgagtttccatttttctgcagcagggaaactggttaaccgatttcacaggcatagtgaaaccagtcaaccggttttgccagcagtggggaaagctctaatttttggcttcgaaatcgattttgcttggggtgtttttcagagcttagaataagatattttagtgatgtttaagttattttgaataaaggggagagttagaatttgtccggttatggaatcagggtttgtttggaatatgaataagttgtttatcggattttgttgtcgtgacataggacccgggagtgtctagctttgtctccactcaggtcagccctcacaattgatttttggactgaggtaagaaaagtgttttgtaccatttatggttaacaaatatagttgtaatagtctcgattataatcgagatcccattatatgtttattatgacttgattatgatcaaagtaatattaagcaacaattattatcgtttatgactcgattatgatcgaggtaatattaagcaacgattattatcgtttatgactcgattatgatcgaggtaatattaagggacgattattattatttatgactccattatgatcgagataataatatggaacgattattatcgtttgagactcgataatcgagtaaaagatacgatcattaccgttatgagtaactactcgttgaaaccgcaaataagtttcttacttatcgttttctttatcgggcaacgatagtgacatacataactcgtggataacgagtggtcataaagctccaaaaatatgtgattaga

SEQ ID NO: 97963 - DNA, 2516 bp, Cannabis sativa
aaaaaaaaaacagccttaaaaaaatatatttgaagtgcttcaatatatacgaaattagtatataaatatacttggagacttgaattgtatggttatgaatcaatgtatcagactttgtacgtactcttcataaatatccttacttttaataatgtggccggttactatatatatatattgaagatcaggatcatgataacagtcactttgagtggatatgaaattgatatgtatatatatatataatattattaagagatgaattatatataagggaatcctgctctttggatgaaatgctgagattcccactaacatttcttttttatatgaagcttggaaagtcattgatttctttttatgtatatactgatgattgcatgcgttgattcagaaaactattattatgcatatatagataagattaatattgttgtgatgaaagtataatagtactactgttttatattgatcaacgacacattattcatcataaaattcaattgtacactcatgatattgcatagtttgaaagaaactatataatcactataatacgtgtacattatagcttagagcttatatatatatagttgcattgcattattatgtgaggagggttacatctaacaataaattattaaatatatattcttctatgtatcgggtggaaatgacagagccagcctaaaattttaaaaaaaaaaaatggtagaaaaaattaaaaatttagtggaatcaatatatgtaaaattaattataaaaaataattatttatttttatttaatattttataatttgggctatggcaccctccgtctaactccatcatattatatctcctgggatatatttattaggttgttgatatatttatatgtgcatctaaaatatgtataaaagatttatatacaaattataatgtgacagatttttaaactaattatatttatttaaattaagattctttattaaaaaaaaccacgtcattggatgtatatatctattctatatatatgtgctgatataagtttctgttaaatacattgattttttttttatttttttttatatagaaattgaaaaatgagtttttaaaagagtgttgttaattaatttttagaatttgatattataataaatataattatataatataccatgggtgaaatagatcatataccatttaatgactcaaaatctcactacaacacaaaagaaatataaaccaaagttatttgcttgactctcacttttatttttcaaccaattagctttatttttttaaaaaaaaaaaatggaagaagaaacagttttagagtgaattttttttaatctcacttaaggtttaggggttgttaggtagtctcgtcatcacattaataatatgtgaaaagttcatattaatataaatatttgaatttactaattaattttgagataaaatattctataatatatattttagtgcacatgatcatcaaaccctactttcagaaccacattaattctcacattctaacaaaggcctataagcttgacaattaaacacgttgccgacaccttatagtccttgccttataagttgcccacaaattttatatattttttaaaaaaaaacatgggtcatacctaggggcggacccacattgtagcgaggagcagtcgcccccttaaaaaaaatcaagaaaaaaatgtatatgtattttaattagttacaacatatatttatattaaaagatagtatttataaacataatagtaaacttggtgtaaaggttaaggtaaatggcaaataggtcagagggtaaaggttcaaattccactaaatatattttatatttttctttttaaatttatttatatccttcctctttttacaaaaaaaaaattatgcccccctcactttaaattttgggtcgccactcatactatgtgtcttatttgagttatttttattacactattaaatatatatcataattaggttaaacttttacttgtaatgtatatatgaatctatcttaaacattttttttttaagaatatgagatgttgtattaactatattattatgagaattataaaattacgcaagcatacgtaattaaatgatacttacatatgaagttaaaatacacgaaattaaaattgaataatactattagactatatttttatttagttaaacaaaataatcttagaaagaaaataataaaaaatagacaaaaaattaaagaaaacgattaacgttgttcaaatatgaatgaaaaattagggatatgaatccagttatttcactacaataattatggttattagaggcggaccaacccgcacatgcggtttttccaattttttaaactgcacccgcaccgcgatactaaaaaaccgcaccgtaaaaaatgatgcgttgcggtgcaatttctacgatttttgaactatcacaattttttgttgaaatcatcataaaataattaaaactatcattaatataattattccaaaacactta

SEQ ID NO: 97964 - DNA, 564 bp, Cannabis sativa
tttaattaactattattatctttaaattttgtagttaagtgatgcaaagtatacagaagaagaaattgatgacgtgaaagagcattaggcaagtgagatgttatcggttattcaaacttatagacgttagttattttttgttttaatagaccaatgggcaagtgagatgttatcgtttattcaaacttaccgggcgttagttgtttttttgttttaatagagtaatagttattatataattttacagttatggatttattggtataatgaactaatatgtaatatttattagttttgttgatgtgaattattataatggtataatttataaattttatatttagttaattaaaattattattgttatatttaattgtatttgtatataattaatataaattattatttatacctaacagctctattaggttttccataaagtcgaaatctttccttccttggtgtatcattagtgatttaaacaatactactagtcatgcagataaaagaggaggaaatagatatccgcaagtgctggtggatggttttaatcaagctttgtct

SEQ ID NO: 97965 - DNA, 557 bp, Cannabis sativa
tcggttttaaactgacactaaaggatttgaaattattttcgcattatatatctcagtttataataaaaactaacatgtttgtatattgttttaaaattttattttttcttgatgtttttgaatcaattttttaaatataaattgattaaattaaaaaataaacaataataaaattttatagctattcttttattaaatattatcattatgaaatattatattggagacattttaaataataaacccagaacaaatattatcattatacaataaactcaaaatgaaaaattcataacaaaaattatcattatacaaaaacttcatacaaaaagtaatatactcagaacaaaaattacatgacaaaaaaaaaataatagatttcaaatccactacgagcacaaacttatttaaactccattctcagcctcgaacacgaacccaaaacaccggctagcaccgtggaccgtcgaacacagatcaccccagttgaggtccacgacgagcttcaagaccattcacctgcacacacacacacagaaagagagagagagagagag

SEQ ID NO: 97966 - DNA, 1329 bp, Cannabis sativa
  modified_base (1217)..(1220): a, c, t, g, unknown or other
attgctcttgacgcgtcctttcgattgggaaagcttcccagagtgcttacgacctcaaaacgatcaagaactacccaaaataacagctcccacgcatcggatcggagtcgtcttctccaactccggtgtaccgttgttaatggagtcaaaaatagaaaatttcgtttcagactttaaagcttcgattcttcacgttaaaactgatctttgggtcccataaacttaaacacaacctcctttgatctccgaaacaacttaaacacgttcaaattcgagtccgtttcaagaaccgtatttttgaacataaacaacggtgtctgtcgaaaggtgcgattacagaccttctaaccgcatttaaaactcctctaggatgaaataaaactcaatgcaataatctagggcagcccaaaaactttcaaactcaacaacccaaaatctcacttttttttcatgctcggtttcgttcgtcccacggcctctctctttcgttgtctcaccaccgtttctaaaccctttaaaccctaaacaatcatataaacatcttatatatagtcctaaccctaacataaccctaaatcaacaacttaaaattttaaaatatataatgtatatgtatgtatacctactgtacgtacacgtacgataataataattctaataataatattaataatatttaaaataataataacaataataataaactaataataataatactgatattaaatataataataataaactaaataatatgctataatatatttacctatattattattaatatacctataataatatacacaaataattaaatattcaattttctccaataatttaattatttatctagcattattcataccctcaaaataaaataataataaaaataataataaattttattgtcactaaaaaaaaaattgcatactccactaaactcataaatattcaaaagaataaattatccacattgacaaacaaaataaactaaaagtataaaaaaaaaattaattacccaagaaagcggatattacgtatatgcccccaaaatcaaaggtggacgacgtcgatcctccctcaaaaaccttcttcaaacattctaacaacaacccccactacaaaaaactgctacttttaatgacaattttttaatgacaatataatttttttgtgattaaatgtgactcttagtcacaacaaaatgttacttnnnnctaaaacatagtatttagttattacaagttgtcactaatttagttttagtcacaaaaaatattagactaaacatacatttagtctaaacaaattgtaatttttgtgact

SEQ ID NO: 97967 - DNA, 1613 bp, Cannabis sativa
  modified_base (1568)..(1574): a, c, t, g, unknown or other
cagcagactcccctgcctcctggagaatatctgcctcgtgggaattctgtggtcccatttttctgttatgatgtaatgattaaaacaatcattttattgtccttgggatcgagaatattccctttctttattttgccacctgtacagtgcactaacggctcttttgccttaccattgtattgctgtaatgaaccttgtctatataaagcaatagaatcactcagcacaatttgagctgagatttttacaaatcattccttttataatcttttctaaaaaaaaaagaaaaattcactatgcatgcatccacgttcctaaacccaataattaagaaactataataatataaaatgtcaatatgctatatatataatatatattatatgtatatatctgatatctccttcctaattaataataatgtactttaataatattacatgatatttaggtagctcctatgtatttatatataaaacattgattaatatttctataaatttcttttatttatctttgaaaaatcccccgagtccaatattaatgcatgcatggttgcgtggcaagcataatacacacgagatcaaatttacaagggtatatatgtttatataatctcctaaatacatgatatatatatgtgtcctaattggttgaacttgatatcatcgactgatatttatatagtacagtcactaatcgtatataatttgtcacccaaagtttcggatcaagatctccggttaaaaattggtatctcatattatgttaaactaattaaaatttaatgcatcaattaattttttatttataaaaaaattaaatctctaataaaatcaataaaaatagttaatacaaaaatatgctgacaaagtgacatttcttgtagtgatataggtttaacatagtatatgacactaatttttaacagaagattttgattctaaagtttcatataccatcatattcagcaaaaaatatatatatatatatatcatatatcccatcataaaacactacaaaaaattttactttagtcacaacaaaacttgtgactaaaagtaaaaaaattgtaactaattataaattattattcttatggtgtgactaaaaggtacgtggctaaaagtattagtaacaaaaattataatttgttgtgactaaatgtatttttaatcacaatacttgttgtgattaaaactaatacaatagctcatgtaatagctaagaatgctctgtacatatggaaatagctccagtttcaggatcgagggttttcccgtgactctctcttatatgtaattggagatctatctctctctatttgaagtgtttctgtaattaatgtgatttcctttcaaaaaaatattattattattatttttaaaataatctacttgaattgtggaaataattataaaattaccctatttattgcattgtgttattttttaagataatttatggatgtaaccacgagccacgagtcacgcatataattacaatatatacatatgagagcctatttatgtatcgtttgaaacgctgtattaggtcgtattgtattnnnnnnnattatattgaattgtattttatgcaatatttttatgtaa

SEQ ID NO: 97968 - DNA, 612 bp, Cannabis sativa
gtggaggtacaacaggtgatggtttcaggggaattgggaagatattttgttggtttggtggtaaagtaggtcagatagtagcatgtttgggaaagagagtgtggtagggaaaattattttcattgaacttgccaattcttgctatgtaaattctacctgagggatgcatacacttgtaccctttatggctatagttggattttaatgcatgaaattgtattcaaaactctctgaataattgttaaaaacctatttgatggtttgtgagttttggttaagttttaggttgatattgattgagtttggggttgaaattcgtgatgatcttgctagttttttgggtttggaacccaagtgtcgcggcatggcttttgcatgccgcggctcacctccttttgagacctgggaattggtcccaggtgccgcagcacggcttttgcatgttgcggcccgccctcgtgtttctgggcagatttgagtgttaactttgaaaattcataactttgtctttcgaactctgttttgggagttctatatattgttagaaagctcgtttcgagctctatgtattttgcttttgcatgctgtggcccgccctcgtgtttctgggca

SEQ ID NO: 97969 - DNA, 2072 bp, Cannabis sativa
  modified_base (419)..(420): a, c, t, g, unknown or other
  modified_base (877)..(881): a, c, t, g, unknown or other
aaagaaaatagagaagagatgagaatgttttagtttcttatttttatgggtgatctcctatttatataaatatcaaagtcaaagattaggaaactgagaaaaaaggaatagtaattacaattaatggtaataaagaaaagatttggacatccatattgtaacaccctactagtttaggcgtgttaacgtgtttaaacttcattgtgcagctcgttgctaatcactgagtttattaaaaatcgtgattatttaaaactttatttaattacttatagatacaaaaataatagtatgtataattgggatcccgtttacaaaatatttacaaaagtttcatagtgcataatacaaaagttgtcgcctagcgactgtataaaatacgctaagctattccaaagaccgtacgctctaggcctaanngccccgacatgtacaatcttaatttgcttggtctcccggttgctctgccctagccttgctcttacctacacaagcaagtaataactgtgagtcgatagacccattaagagaagcatgatcataaacataaacatatatccaaaccgcaaccaggcgcccatacacctaatcacaatctactaactcagttaggaacgttctcgataaagtatgactaactgcaaatccaacttatactcagtactctagtcgtactgatgtggtagcagttagttcatactatctgatagcctagcatatatctattggcatctctatgcaactctatgtacacttcactaaaaccctgatatgctaatttgatggctattgatttgcctaacagatgtatattggtctctcagtgcagctctatgtacacttcattgataccctgatatgttattctgacggcaannnnnatgtacgctaaacatgtatacatatatgcaaccattatactactcttacctctctttcgaattgaggtgtggcagccaataattgcacgacgatttataggcccttaaatcacattattcataaacttgatgagtgacacgctaaatcacttttcggggacaaaaacttgaaactaaaatttttcctatcgatgaataacatggcaataccctaaatatcaaaaaaatgggaaaaactagggttccttaaaatgccccaatcggtagactagttccctaactggaattttgattctgtgaggtttcctggggaccaccaaaatttcgattcctacaggtcccactgaaccggtcgaccgattcagtgcaggaaacactcaaagccttctacactcctcaattcaattccaagccacacaataacttctagatcacatatgtacatcataataaacataatccatgcaataaaataatccaagataaccaaaatcaaaatccaccattagagagcaaagcttgagttcataaactcaaaccttgctcaatcacgacaacaaccaacaagaacaactcaaaacaactcaaataacctcaatatatcatcaaaatacaaaatcaaccaactcttaaaaccacagaaccctaattacaaaaacatctataagaacttaacttaaagtttaagaaaccataaaaacagaggctaaagagttttaccttagcttgattcacaaaagacttgctagaaatcttaaattgagcagctgaaactcaacctcttgctgggtttccttaaggcttgagagaaagaaggtcaaagagagagaagataatttatgtgtttttcttcttgatttacttgaataaaagaaaataaatgtaatcttatctattatcaatctaataacatcagcatataatctaaaaatcaaacccacaagaggacaaaagagtcttaaggcacaaaatgaccctttgacccccacttataccaaaaaaacttctaaaccattaatttggtcatttcacacacatcgaaaactcttgacatttcaaacgtctaactatattgtcccgccactacaaaaatactacatgtgattctactggccaaacgtcgcgcttcaatgtatccagacacaaaacatgcaaaaaaaattataaaatttcatatatggcataaataat

SEQ ID NO: 97970 - DNA, 1045 bp, Cannabis sativa
aagcgtaatttataaattacggagatttacatagcatatgtgaatgtaatatgagttactagtataataaaaatatttttagatttagcgactttagaaactcgatcggaggccagaaatatcacaacacacttaattgattgaattaatgggaatattatgataagttgatagcataagtttttgggtaattaagagtatgtgagatttgacttagcgccctaaaaatatagatttcttagtagctaagaaatgataagataatgaatccattcgtttcgctcaagctgaagagtttgcacgattagttcagggtagcatgactgtgatgatatgctaccaagtttgacaggctgaccaagtttgcttctaatgaagtggccagagtgatgtgctgcaagaaaggctaagtttattaaaaaggccttgaagaatatattgctagagatgtgattatggcagccaaacaatcaagcgtcgtgaagacttatcctcagattgtggacttaactttcactgctgaatgggttgaaagcctaattcgtaaaaagagaactcagaggaaggacatgtggaagaccttgtctggtattggagtgagtaaaagctttagccccaatgaccgaaagaggaaaccagatggaccaccggttgtgggtccaaatagaaagttttaaggtaactagctagggtttttgttgaggtagaaatgaagtttggcagccttatgccgaatgtccaaaatacaagagacaccacttgggtgaatgccagtctaaagtttgctaccaatgtggagtagcgggtcatttcaagaataattgcgcacaactatagaagcccgagactaagaaagagagccttatggttcctggtatggtattttctttaacccaagaagatgctaaagctggcccttccactgttacaggtgagatatatattggtggtattatgtttactattttgattgattctagtgccacatatacatatatttccaatagaattattgagaaaatgagtagacagtgtgatgtcatgt

SEQ ID NO: 97971 - DNA, 554 bp, Cannabis sativa
taggttgaaaccatgcaagctgcccacgaccaagctgcatgcagccctcatgcgcgcgctggtgggatttgcagcgtcatcttttgaggaaacccgacgtgctgcagggtgtcactccgcgtgatcgtgtctgagcgtggggcttcagcgggttcagacaatgtgatgtctgaggcacacacatgcgcacgagcaccttgtccgagtgactggtgcgtgcgatgcgagcctctcgacaccactatgacccgaaacttcaaatcaacataacttttttaattttttattggaatcgagctccgtaaaaactaaaattgtttaatttttcacaagaaatccaaataaattattttcatagaaaaattttgtaattcacaaacaatcatcaaatcacacataaaccaacatgaacacatctaaatcaacaaattcatcgtttaaaatccatatttaatgaaagtaaatcattaccatggctctgaggctagtttttgggatttatttttctatgatctagatatactaacatgtatgtttcattaacaccctaaata

SEQ ID NO: 97972 - DNA, 1024 bp, Cannabis sativa
  modified_base (934)..(940): a, c, t, g, unknown or other
aattagtaaacattaaattttattgtattttttattaattaaaatgaacatgtttatatattttatcactatgttatttatttttgttcgatatgttatttacgtacaccattcacataaaatttttgtataataaatatatatattattgctaataatataaaataactcagttaaaaaaacctaacctcacagactaaatatatatatcataatattttatttataataaatgataattttattggtatttaaatttatttattaattcaaaaatattattcaaattaatatgatggaaggtaattatttaatcttacctttttttaaggtatgaacattatccttcccaagagtagttatattattagggaaataacattccaagcctaaaccctccaaacaaataagataatatttcatattactattcctttattagaattaacctattccaaagagcctctactatgttaagcatataaggtaaatgcatgtgcgtatatatattatacttttattcttatccaaataattaattaaaaatagttccttttttatttggttggatatatatatatatatatatgcattattactcctcaaaacgagttatatatatatcacacactatacatacatatcatattcatatataatattatagggctataacatatatatcctataatatacatatataaatatataataagtaataaatagtatgaatatttaaatattatgcaaacgctttctctttacatcattatatgttgtcattaatgtgtctcctcaataagcatcattatatagtttatcaacattaacttaattaatatatattatttacaaataattttcaattattctatacagctcgtacgtacttttgaagtcgtcatgaagttttattaattaatatatatatttnnnnnnntatatatatatatgtaaattagataacatatataaacaggtacaaatataatcaaacaatattaaataaaggtggggaatggcc

SEQ ID NO: 97973 - DNA, 516 bp, Cannabis sativa
aaagatttattttctcttttaattttgctacaaaatcaacaaatcattagtaacaaataataatcaaatatttgttaatcatcaaaataaggagacctaaaactttgagttaacatataactctatgtatatagataccactattctaatgtaatctaacaggcaatcataaacatccacgctaagcatgtaattacatatgtatattattatactaattttactttgattgtgaattcaggtgtgctggtcaacctgagttgaactgttgctcgacagtttacatgcccctaagtaacaatatacgcaaaactaataagtgatatgctaaatcactttttagggactttaaactcgaacctaaaagtttctctatcgatatctagcaagacaaagtcctaagcatcgaagaaacacgagaaaaacaacgaaatggggaacttgcctgaagaatagtaggccatttttgaaaaatgataggccgtttttctgggtcctgtaccagtaataatggta

SEQ ID NO: 97974 - DNA, 1524 bp, Cannabis sativa
  modified_base (615)..(615): a, c, t, g, unknown or other
attatatccacctaacccctaagatacctacggcatagatcatgtatttcctattgtgtatctgctaggaatatgtgcccctattaagcctgcacagatagataagtgattcattcctagggatcaccccagaaaaatactataaataccccacaaacgcactgaggcaggggtcgagatgcctcaaccacaaacgcaaagagagaaaataggagtaaaattcaccaagaacattctctataataaatactctcattaataacaaagactcgtggactaaggctcattaatgcctcaaccacataaaaatctcatgtattaagcttcctgcagtcggttgccgaaaacctcggtcaacaatgtaggcccatagtccccacaatagttgagataatattgcttgaaaactcggttaattggtttaattaatcaattataattccaaaattagattatgtcttatttttgaattttcactaagcaatgacttaattatgaataaaagaggttttggagtttatttattaattaagagactttgttaagtctaattaataaaaaagatacatgataattttatttgataattaattataattattaaataaatagttntgacatttataggattgaaattgataaatatggtattattgaaagaaaagataaatggttaaataaactggaaaaattgtaactagtgaggcccactaagtatggtcagccagtagcttgattttttcccattattttaccatttttaatgcatataattaaatcctaatccctagttgaaatactataaaaggaacatgatgctctcattctcatccaacctttgaccaatctaaacctagttttctaactctgtcagacaactagcaaatgagagtttctttgtatagtgatttcaaattcttcttgctgtttttcatcaattcaagcctttagtgatagagtaccatgcgcacacataacaagtcaagtactcaatcatagtgcggaagacggcagttaaccaaactaaaggagaacgagatccaggctcagatctagttattaccctacaataaaaaggaataaggtttagagatctgagcggaaggagacatattattctactgccatcaatgtaaggttttctaaactttatgtgtttatttcatcgtattaggaaattcatatttagggtattagattatagattataatcaacatacatgttagtaaatctacactactacaaaccaagcctttagaggcactttttttcagcataatattaaagaaccgaaagcatagggtggggaagttttggaagggattttgacgccacttatggcgtcggttatttggaaataaccgacgccatagggtccacaccctatggcatcggttatttccaaaaaaaaaaatgacgccaaaagggtttataaccctagcccagcccatcgtcttcctcattcgaccagccaacctagaaacccccaaaccagagataccccaaaccctcttcgccaacca

SEQ ID NO: 97975 - DNA, 897 bp, Cannabis sativa
aaacttaaaaagaaaaaaaaaaatatatacttttggtgggattagaacccttgtcttctaatctatatgttaagtaacttaattattacaaagttaatattatatttataaatatatcttttattataaatataaatagtaactaactaaaatatatttttttttctgactttttttagagacgactgtcccgtctggcttatacgtagtccgcaaattttgtactttagatccaatatataaaatgattgtgctcatctctctttcattttcttcatttgtcttttttctcacttttataaaatattatttattatttaatacaatataatttttatagagcatactaaatgcctaatatatatagtttaaccaaatatcaagatattattgttttacttcatatatacactcgggatttccaactaagtttttcgtcaaactaaaaaatatacaaacttagaatatgagtaattacaaaaaagtccactgcttattaatattatgattatattatttttaaaaatttaaacaagctaatatattgaggccaagtaaacaaccaacttaagcaaaactactcataaaagatatagataaggaaaatgaactgccataccaaataattataataatatgataaaaaagaaaaaccgtattgattcaaataagatacgcctaattattactttcaagactaaaacttatttttgaagtcggcttcctaacgcaaggcatcaatatttgagctaaaagaaattgccatgtcgaaatgacaacatgccttacgaaattgctatctttttttcataaattaatataatatacattttaattaatttgatcaattataataatataataagtattattttttgacaggtatagaacgtaata

SEQ ID NO: 97976 - DNA, 722 bp, Cannabis sativa
agggcctgtccttttatggaaatgcgtggaacgtaatgtatgtcaaactggctcaattccatggcccatttaaggagtcttcctaaggcttccggcttcagcaacacttgacgaagtggatcgtttgtaagtaccttaatgggatgggcctggaagtagggtctcaacttcttcgatgccatcaggaggcaaaaagctaatttctcaattaagggataccgtatcttagctcctatcatgcgcttgctaacatagtacaccggatgctggactttgtcctcttcccggactagggctatgctgacgacattcttagagacggccaagtatagtaacaagtcttctccgtgaactggtttcgactatatcggtggttttgacatgtgctcttttagttttttgaatgcctcctcttattcatcagtccactcaaatttttggcacttctttaaaatgttgaagaaagggatgcacttgtcagttgattaggaaatgaatcgacataaggcataaacctttccagtcaagctttgcacatcctttgtaataccctagaattaagaaatagattagcaaaaccctaattagataattatgaataattgagaaattatataatcacgtgtgtgtaatttatgtgaattaatatgatttattatatgttaagaccccgttggtgagccaggggcagtttggtaaatatcacccgagaagggtaaatt

SEQ ID NO: 97977 - DNA, 661 bp, Cannabis sativa
gcgtcccattgcctatttcagccgcactctgtcccctcgggcccaatccaagtctatctacgaaagagaattgatggccattgtcctagccatccaaaaatggcgaccgtatttattgggccgcaagtttcttgatcgcactgatcaaagaagcttaaaatacttgctggaacaacgtgttgtctccctagaacatcaaaaatggctcactaaaatcttggggtatgactttgatattcggtacaaacatggtttggagaaccgcgtcgcagatgcgctgtctcgtgtttcatctgaggtctccttggctgctatttcagttccgggtgtgttttctacaactgatttacaagctactattgcagctgatcccgatcttgctaagatcatgtcagacatcgctcgggtcaagcttgtgggggtttttctgtcactcatggctgcctcactttccgtggacgattagtattgtcggccgcctccccatctatcccactcttactgcaagagtaccacagcaggaaaatggggggccattctggggttttcaaaacattctagcgtcttgctgctgatttttattggcgaggaatgcgcaaagatgttcaaaacttcgttgttgagtgctcggtttgttagcaaaataaatacttagctcaat

SEQ ID NO: 97978 - DNA, 991 bp, Cannabis sativa
acatcattaaactactagaaaaggaagttttcaatttcgttgcataaaactcattttcagtaaggttctaattttcttggcaattttcgaaaagcttaccataaattgtcgtttttcaacatttttctgtttttcttatttgagcatttttagtttatcatatttggggtattacaaaagatttgagatcaaacggatttttaaaacccgagttatgacccatttgtgcctactgcccctgtgctgagaaaacagcagtctgtttttccttgtaactgagttaacagactaccattttctataggaactgtgggtacgggccttttggtcattcaaaactcgattttttatccataaaaccattccaaacctttctctaacccccattctaatttcctaaccctatttggaagcctcctaccctcttctatcaacatttctcttaccaaaacctaatccctcttttctcttttcaaaatcctatctctttcaaaattcaattctcttcaatgacttcatcatcaagacaaggaaaaaggacaaggacttccatgcaacaagaagagctaaggagcaaggctaggcatgaactcttctcccatggaagatttgcacaaaagtttcaagaggatttctcaaagagggacatactcattggtaagaaatgtgatttgagtgcccttaactatgttaattttagcaatctctttagagagatgggttggggaagctttgataggaattaatatctatatctatcctaggctagtgagggctttttttgcttgcattgaaatttcttgtgatcattatagcattaggggaacccttaaaggagttagatttaccatcattgttgattccttaaatgaactcatacatgcgcctaatgaaggtctcttacttgatcctaggcctagacttaagaatgatgcctactataaccatgcctcatttactagtatagtttgtgtaggagaagatgtccttg

SEQ ID NO: 97979 - DNA, 659 bp, Cannabis sativa
aaacgggtattgggacgggtatgggggtgaatttaagaagcgagtatgggggtgggggagcgatccccgcacccgccccgccccgtttacatccctattcctatcattcaatcattgaatatatgttctggcatagaagacaaagaggagtattgtatatactactaagccatggctccacattttattaatgttctgtattttattctgtacgaatgtggccattcaaaactgctaacaacaaattttaacagcaccttaataaatatatagaggagcatcaaagagtatctgttaattataattaacccttttcacactgcaagacttccatatgtttaggcgatgtattaaaaatttatttattttcacttttgtatttaccaatagattgtttcagttcatggtatcatataactagcaccaaacaattcgagggcttatgtggaatcagaagaaactacacaatcttactctacaaaggtaaagcaagtatacaataacagtagcccaactagaaaagagatgccttttcacttaaaataaaatgtcttttcatggagcaaaatcaaaacaaggatcttttcattatgatttatgacctaagaacacaatagagagaactaaaaggatgcaatacccaacaaaaacaacatcaa

SEQ ID NO: 97980 - DNA, 650 bp, Cannabis sativa
acaaagtaccgacagtaccgacaaaaggaaaaaaaggaaaaaaaattacaaaattaccctttcaagaaagaggatattacaggtcaatcccgctcaaaatgtttagtcctcttggaaggtggtcggggtgttagtaagaccaaatggcatttctagaaactcataatgtccatcatgagtccgaaaagccatcttaggcacctcggaaggcttcactctgatttggtgatctcccgatttcaaatcgagcttcgaaaagatagtggctccatggatttcatctaatagctcatcaataacaggaattggaaacttattgggtactatctcacagttcaaggcacggtagtccatacaaaactgccaactcccatcctttttgcgaactaacaacaccagtatagagaacgggctgacgctcgattgagcaatgcctgtagctaacatcttcttcaccaattgttcaatgacatccttgtgggcttgtggatactggtatggacgaacacttattggcgatgtaccttctcgtaagacaatagaatgctcgtggcctcgaaatggtggaagtcttgttggcatttcaaagttttctttggcctcactcaatacttttttaatttcagtaggtatttcatcattcccgttct

SEQ ID NO: 97981 - DNA, 705 bp, Cannabis sativa
  modified_base (122)..(125): a, c, t, g, unknown or other
ggagcaaagcgatcaacaatccgtggagagccatcaacacttagtgaattcagctctgcatcgtcagtcatcaaagaaagccctataacttggggatcagatcacagagatatggcaagctnnnnaaatcccacgatcagtgtattcttcatttatcatgcaatatttctacttatatccattgtaacgagaagggaaacacttcttctccaagttcatagtctataaatagtgatgcaggttcactgggaaaaggacgagagattttaccctagagatactatttaagaattcatattcagagatactgttgtaagagctgtaagaaaaggaacctttctccgttttcttgagtcaatacaaataacgaggattaagctattaccgaattgctcagggctaaacctctataaaattcttgtgtctttacattgctttaccatatatcgattgctataaattacctattgcttactaaataagactcactgtcgttggctaaaatcgaggacaacattttggtgctttcattgagagctagaatcaagaatcgatcttcattcaaaatataatcacaagtacgatgatggtgcagactcgtatgggccttgtagatccagccaatccacaggcggtggattctgcattgccgaacccaggaaacgcaagggctccgccagttgttaatcctgaacagctagcaaa

SEQ ID NO: 97982 - DNA, 1595 bp, Cannabis sativa
gaggtactagatcatcccatctcatttcaagagcttcatgggcagccaaagttcaacctctgttaaacttaacttgagttgtttggaggaaggtaataaacttttggtggatcaataactatatatgatgaagccttttacctataaagaaattaaatcagcaatgttcagtatttctaactctaaaagcccataacctcatggttatagttatgaattttttaaagttatgtggccagaaattgaaatggtggttagtaattctattctaaacttcttttcactggtaagattctttatgagtataatggagtcactatatctcttgttcctaagttgatagccctaaaaactctattgattataggtcgatggcttattacactaccatctataagtgcatctgtaagttactttgctagaggcttgttgagatccttcctactattgtacatcaaaatcagagtacttttattaagcacaggtgtatcacccatcatatcttaaatcttcaggaccttataaaaaattatcgtatgaaaagtgcttctcctcaatgtgctattaaaatagacctaagtaagatctatgatacgatggattggttgtttcttgaaaatcttttaaaaggtttaatttactggttggattatgactatcctgaaaggaacaacatactttataatgatgaatgactgagttcagggaagttttaaaggggagaaggagctaaggcaagaagacccaatctttcctttccattttgtgattatcatggaatacttaactaaaagactgatgcttgaaggtaacaaaaaatctttcaagtttcatcttatgtgtaaaagtctttaggttattacaagcccgcgttgcagataacctcatcctcttttgcaaagatactaaacagttcatcatttaaaaatagctcttgatgattttagtagagttttaggccttatggctaacaagagcaaatttcaaatcttctttagggaatagtgatgaagtcaaggctgctattgttcaggatatcgaatttaaggaagataagtttcatcttaaatacttggggtgtccctaagcgtcctacaaaattgagagtggaggattgtggtttaattcttaaaaaaatcaagctgagattgttaacctgggaaacttggcatttgtccttcgctagtcgagctcatccactcagctttactataactcagaaactactagatgagtatctttgttataccacaaagcattaccaaggagattgagaggctttgtcgtgattttttatgagatttgaatggtaatagaagtaaaaattcatatagcttcttgggagaaagtcttcttaaagcgtatgggaagcttggttttaaagatggtgctaattggaatagggttgtcctggctaagtatatgtggactatcatagagaagcatgacttttgggattataagcttcaacaagactcaagctggtattggcacaaattatgtaatccgagacagatattcagtgaaacaagcatgcaagttgttggttgtcatggcaaatttaaagttgttagactttacaatagtctcatcaa

SEQ ID NO: 97983 - DNA, 1265 bp, Cannabis sativa
  modified_base (1218)..(1235): a, c, t, g, unknown or other
ataaaattattttttattaaaataaaataaaaagtcacccaataatttctcataaaccaaaaattctatatacattttatatagaatagataaaagcatgcccccaccaaaataactactttggcaaagatatttatcatttcatgaataattctagaaaactaaaaaaaatatggaaatgaaacagccaccaaaataactacatcaagaaaaattttcatcatttcatgaataattaaatgccaaaatggttagacgaacatttaaattaaattccataatcctagaattgcacaaaaatacacaccataagaactatggtaggggccatggcggagaacataattgaaaaaaaatataaaaaaaaaggtcatactataaaacctagaatggtagcgtttggttggaggtaatgaaatagaatggaatggaaacaattttcattctattttttttttgtttggttgcatttaaaaccactggaatcgtctttctatcattttggtggaatggctattccattttgaaatgaaagaaagaccattccaatgtaaaattttaaaaaaaattaataattttttttattaattttttaagcattttaaattttattccattcttattcttatattttcatacctctcaaccaaatgcttagaagtttagcattgaatccctacgttggaatatcaacataagtcaattgcacaagatgaaaacaaacaagagaaaaggcttacaaattgatttgcagtgattgaactcccacctttgtctcgtgacttttgacactcaaagtaccttaaacttcaaaagaaattctttagattgaagaaagaaaaacacaaactgaaaacctaaactttgaaatatcactcaataaaaaaaaaaaacaagacatattcaccacactttactttagttgatataaggtaaaagtaaaagttggacacttagaatgaggtagttgacgagtgagataaaaagcaaaccttgcgtcaatattatgtccatcttttttggaaaaacaaaaaatattctatatgaattatatgaataaatagaatgtgtttttttacacataataaaaggttatttgttcaaataaataaataatggaaatgtgtaagcaacttaattttgtttatatggtaggaatatttttatagcctaaataataaatctaatagtagtaaattaatgggtaaataccatttnnnnnnnnnnnnnnnnnnaaagttaccaattggaccctgtgttttgtt

SEQ ID NO: 97984 - DNA, 1204 bp, Cannabis sativa
attttatttagttttgtaattataatataaattttagttttataatataattttcgaattatatttatatattattattttaaaaaatttagctttagttttaatttaatttttattttattatttatatactttaaaattttaagaaaataaaaaataaacttttatcgatgcaatttacttcgccggcaaaacaaaataatttttttttggaaagttttggtggcgaagtaaggtgcgtaagcaagacttttgcgagaaaaaaaatttggtgtgaaagttttgtcggtgactgattttgccgaaaaaacctcgtcaagcaaccctcagctgacaggttaatgtcaacaattggacttatgctaaccaaagaaaacctcgtcgacaattttttttttttaccaatgaagtatggtgttttgcaggtaaaacatcttatgtcaaccaaggatccccgacaacctttattggcgcgtacctcatcgacaaaacattaccagtaacttacgccttgttttattggtgagaaatttttgttttggcaaagagtgattttcttgtagtgtcactccacctctctcccttgtcattcggtcaaggagacccatctaaattcgtgaaattcatgtctttacgagaaactgtcatggtttggttcatttttattgtaaagtaggatccagtggcttgttctccaagagaaccgagagaacaagagacgaagagtctaagagtgagaaagatagtggctcttcgtgttttgtctagcctagtgggggcagtgatgtctcaaccacgagagaggaagaaagtgggagagtgagcagttgggtgagagagtgggttggtcttgctctggctttttccggcactgcgagatgagggagcaagacagagatagggtatcaagagagagagtgagaagggaagagatgagattatggtttcttggttataattttctagttatactcttttttttcttttcttttttatattctgaagaactttttttttttaaaaaaaaattcctataagtgtcagtttataaacgacaccaaaagatgttttagtgtctgttataaactgacagttatactcaatttgtatctgttatggtttctgtctcgatttactagctgatgttaaagaaattgaatccaatcatcagctagcataggagtagtggcaatattgaatgagg

SEQ ID NO: 97985 - DNA, 521 bp, Cannabis sativa
tttgttagttagtttaactgttataccatttaaataacattctatttggtaataatttgttgagatcaattaataaaagcacacactggtttatttactctgcttcgttcctctcacaggaaacagcttgacgagatccaaatacccatttcagagttcctaaagtcggccagagcgaaaggctagagacccctcatagctcgattactatgactcaggaccactcaacttcgtattttatgaaaaataagattttatagatattagaacacaaaatgtgtttttttacaaagaaagatatactttcgatcctcgtttttatgaaaaagtggaataaaaagggtgacttcaatctttttttttttctttaaataaaaattaagattttatcccgattttcttaaaggtcttttacccgactgacatatatcccagtttctattttagcgaaaattgggataaaatacccataaaaattgagataaaatgcttcgtcgcttgcaataacatcaatagtcaaa

SEQ ID NO: 97986 - DNA, 2030 bp, Cannabis sativa
catacagccattagactttgaaaagtactcatggggaaggtgatggatttgaatccaaatacgcagaagcttgaaagttgtcggaccatcgaaggtcggggaccaggcttgaaggaccagggtatacccacgaatacaccacggaccattaagaagagcccagtccctatgatcggcgcactcgaatccaaacttgaagacgttagtttgcttctcttcatcctccaaagtcacaaccgaaattggtatcttccagtttttagccacaaactcagtcatggtcatatcatccaccaccataggcgctatgattttcccaaacaaacagcaagaggccagggcctttagagaagtgtcacaaggtgatagtttgacagaggtttcaaggcatgaaaagcatttgcctttaagagtggaattggaaacaatgattgactccataaatacccgacaaagaagaccaaacaaagcttttaagagacaaaccaacctcaccaaccgaatcttaccaacctctcctaaaactgacaatactacctcagagaaaaagatggtgaaaaaggtccacgagccaccaacagagaagaaaacaaaagcaacagaccaaatgaacaaaactgaaagaaaagatgaaaacactaacaatcagcaaagcgcaccactacaagactaacctaacacacactgagagggggagtcgaaaatattatagagcaaataaagacagacactagacacacacgaaatgagggcagactcacactagagagatagtagaagaccatctctctcttccactatttctcccactcctaacaaacataatacaaatacttttctttctgctgaaccaaaactattggtacttaagtactgaagaaataaaaaaggcttaaaggttactattttacaaatctaacattcttgtgtgtaatatcattgatggaatttaatattgagtaaaaagattataaattaagaattttactctcagagtattaaattatgttttttaaacttttcgttaatttttttttaaaaattattaagatttatgaattcaaacacttttttttttttaaggaaacgtaataaattaaaagccaatttgattcaagagctcagctcttgatcattacactaacaatctttagggataaaagttagttcaatagacccagtcaactcatttgtgagagcaccaagagctattacaatttttagattcaaagacttttatttagttgcgtttaattttattaatacaacgatcgtccatatattaaatcatgctctctgaattttaatgtctattcaatcttgtctcacgaactttaacgtgtaccaaatcgtgtcatttgaagttttatccacattagaattcaatttgtaaaattagacaaaagttattgaatctaacaaatttaatagttcggaaaattttttacagtctaaaaaattcagaaagtaaaatttagtacatgttaaaaattaaaagacaaaaattctaattaatcaaaataaaataaaaaataaatagtaccttaacttatatcaattttttttaagcaccttgaattttatcattgttgaaatataatttagtaaaatcattttgagaaaatatttatttttgtactttatttttatgtcaaatacacatctgttattacaaatatacaggaaattttattaataataatatatatatctttacaaagaaattacaaattaaattttatatatgatagattgaaggtgtacactataattatagtaagaattttgtttatttttgaaaaattataaataatctatgatatcaaaaatatgattcaaataggcacgtgtgctagttttgttttatacgcactattttgaatattcttttagatactaatttttttttgaattttctaaaaatagatatgatgcatactataattatactagcaaaaactacgtgcgaggcacgtatactaaattttatgctagtctttttctatgttatttgaaagtgatacaataaa

SEQ ID NO: 97987 - DNA, 730 bp, Cannabis sativa
attacatttctttattattttatttcgattctgaataatgtgctggtgctattacagtttctctgaggaacttcctatctttgaatttggaatgaaggatgggcttaaaggttgttgttcagagaattgtagaatggccgcaagttccaacgatcttaggttatgaaggtgtacaagatgcatatacttggttggttatacgactatagttggtttatcttgaaaaatttaatgactttggcaagccaacgtcattctatacaagttttttgagaatagcttttctttataccattacatgcatgatgcatataactacttatcatcagtatttataactagattattataaagagtatcatggtattttttttatgtttctttcaccttaaagtgtttttttaatagtgacccgaatagatttcaccattttgtatttatattcagatgatctattaacagcatttggcttttaattcacattataagttattgtttttgtaaatatgaccagttttattttatcaatttacatacataaaaaatatatttgaaaaggattcaaagttttaataaaccttcattaaatatctcaactttataatccctactattattcgcatgtctataatggattccaaagaattttgtttgttgcagaaaaatttaaatacgtttatgctgcaatagtaaagaaaaggaacacagaagtaggcttaatgggaatgca

SEQ ID NO: 97988 - DNA, 596 bp, Cannabis sativa
ccctcgattataatcgagtcacaacgataataatcgtttcatatcatttccctcgatcataatcgagtcacaaagatgataatcattgcatatcatttattttccttgatcataatcgagttacaactaatacatatcgttaacctcgtttaagattaagtcacaacgaacacataccgggattttgatcataatcgagactgtaacaatcaacattaaccatatacagtatttaatacttttcttacctcagttcagaaatttagcgtacatgttgacctaagtgtaatcaaagcttgacgatcctgggtgctatgtcacgacaacaacatacaataaataccttaatccataaattcgagaataaccctaatttccataaaatcaccccgagccctaaaatcagcccaaaatagggtttacaacttctaaacaatctataccagacatggaaatcaccccgagccctaaaatcagccctgacaaaagctaaaaattttcccctgtaagcaaaccggtcgaccggttccgatacaccagaaccaaccggtcgaccggttctggcaggattacaaacatgagttttctcctccaaa

SEQ ID NO: 97989 - DNA, 563 bp, Cannabis sativa
tgatggtggtgatggtgaattttactgtgatatttgcgaagatactagagatgaacgtgtttgtgtttattattgtcgagactgcaaattcgttgctcatgtccattgtttacttcctcaggtacgtcgatctcatatttcctttaattaatctattaccattacttataattattaatttgggattttttttatttttacactttaaactagcgctgcaacttaaattgtaataaaaaaactcctattgcaactagcgctgcaaccacattgaaacttaaactgtaaattaaaagaaaaaaaataaaaaaatattatatggataattcccctattaattaatctatgttaaaaaatattatatagaataattcacatattaattaatctatatgtattttccatatgccattaattaacttagacaaacatactaaacgataccttaatacaacaagttccaatattaattaaggtggcgtttggtaacacttttttaatcaagtttttgtttttaaaagtgaaaaagtgaaaatatttttcaaaaaatatgttctataaaa

SEQ ID NO: 97990 - DNA, 726 bp, Cannabis sativa
ttgtgatgatgaagcttgggagattgaaatcgtgatgatggctagcatatccccattgcaggctacggtcagaaacttcccgagaactgcctctcgcaagctggtattttttctatttaaagtaagatttaggttctttttctgcatatctgttcattctctgctcttctgtcttagtgatctggttgtctgtgtgtgtgtgactatggaagatctaaactttaactctcttcaacctctcactttaacttctgatgaacacttagtctatactcttgatgatctcccttcagaaacccctaatgaaatcactctcctccttaaactttgcactgtcaagcactttagtcgtttatccctgattaaaaccctttcccaggtctggacttcccagtgtcggttccccgtagtggtctctgagcattctgagggtctttttcttgtcacctttggctgtgaaggtgataagcgtaggattcttgatggccagccatggcactttgcccaaagtctaactatttttgctgctcctgactcctctttccctattactccggatcaattgcattatgtgcctttttggattcagatatatggtattccatttaggtgcaaatcgtatgaattggctaagctcattgctactggggtgggggatttaattcaagttgacagtactactgtcaaagatggaactggcccgtacttgagggttagatttctgct

SEQ ID NO: 97991 - DNA, 3437 bp, Cannabis sativa
  modified_base (1351)..(1363): a, c, t, g, unknown or other
  modified_base (3376)..(3412): a, c, t, g, unknown or other
atgcaacataaaatgatttcttatcttttattaattagtaaatctgattatattaaaataggttttatttagggcacaaaatccaacaattttcaagatattgtaatcttaagatcgatggtaagcattcatcggtgatctgtgacaaaaaaaaattaatcaactcgccattttcttccaaatatcattataattcactaatttaaatttaaatctcaacccaaaaaaacgatgaaattaccgacaagaaagagagatccaaactacgaatttctttatatttaacaacaatcaatcccaccctaaaatacccaaccctaacaccatttcaagataatcaacttaagcatcctacacccaatccccaaatctgtgatcatcttacacctcgccaaccacaatctctccaaatacttagcctgagccaccgctgcttctccacgatccctcaacttcgtcgcatttaaggctttgatgactagagagccgtcgacggtatgacagaaaccttagcttagcggtcagcataaaaatcgtaccatttatggtgagttcgcagagcgcataaatggcgcatttggatgcgacgcaatcagaataaggtgaatctagagttccaatgagagatcggacctcatggttggttcaggtctgacaaaatgggagaaacacaagaaaaattataaaatatagtatttaaaagttttattataaaaatacgatatattttaaaccataaaaatgtaaacatttttaaaaatctataactaaattaaattaaaaaaatatgttataaaaaagtaaagtcttcatattttcctaatttctacttcacctacactacatccaaaccaggtgcactccattgagagtagacattatgggagaatcttttgcgagcgttggagacagtctaaagcccaatcaaccacaagttccttcccaataagcaccttgtcataaatccagtgtcatatcctccacataataatatccagttgcccaagctcttccttgcttaataacgtcaaattcagaaggaaaatataaaggtctgtagatgtaaacttttgagatgaaagtcttttctaagtaatgaaaagtgattctttgattcgtcatacatagattgtcataaatccacttattccgacagtatcatatcctccacttaatagtattgagttgctcaaactctttcttgcttaataagttaataacagctaaatcaagaaggaaaacataaagggtcgtaaacatatgtatcactggctaagtaatttatttaggactcattcggtacgccgtataagagtcgtattttattaaataataaataacactttgtttnnnnnnnnnnnnntattgtattaattattacgactattttttttttttttgaatcaaagatgattttatttaataactttcagcataaacaatagactttaaagcaaaaggagcatcatgctcactgaaagtacaatctgacaaagaacaagaacctctcgcaacacaatgagcgaccttattcgtagatcgttttataaaaattaaagagacattttttaaagaagacagtaagtctcgacagtcatgcacaagcattccaaactgggaagccatattaactaaactttttatagcttgcagaacaaccaaggcatcagtttcaaccacaacattggaccattgctctcttgtgatctaatttaacgcttccttaatcccaactatctcagctattccaagttgaactactccaagctgactcatagaaatagcttcgataagatgactagtattatctcgagccacaatgccaaacccaaacttattctcctcttgaaagatagcaccgttaacattaatcttacctgtattcatcgttggtttcctccattgctcactaacattattaatatcttttattaacaatgcacccatttgttgtgattgagcactcttccattgatcaagaaccattctagccgaccgcaccacttcaatagcagaacaatttttttcattccaaacaagatcattccgaaccgcctaaattttccaactcaccattgtcgcttctctaacagtatctatgggctgcaatgtaattaaatcaaagaaccaggagctaaattcttgcacattcaaagcacacatattaacacaagatacattccagcatgcatggctaaaaccacactcaagcaaaacatgaaagatggtttctgcagcccgattacaaaagggacacatgacatcaacattcacatgttttgtattcagttgtaccttcgttggaagacatcccgatattgcacgccataaaaaatgatgaacttttggagggatatcaagatgccacaactttttatatccattgtgattaaccggctccagagcagcagaatgttgcagaaaagtgtaagcactttttatagtgtacaatcctgaagtctctttgttctagtaccatgaatcacacaacaccctatcgctcaactgtatggacatcaacagtcgcttgtccctatcctcagaaagatcattaatcacttcaacatcccatcttctcaaccccaccgaaaacaaatgagccaccatttgtccttctaatgcaggatgattggaaattacaaaaggattatgttgttcagggagccacgggtcttgaaggatattgaccgaagcagcactcccaatagactttcttgctccagccatgatcaaatctttagcttcaaatatgcttctccaaataaagctggggttttgtcctaggctagcagtaagataagtacccgaggggtaatatcttgctttataaattctacttaccaaggatttttcattattcagtaacctccacccttgtttaccaaggaaagccaaattataattacgaagatcccgaaagccaatgtctccctcatgtttgagtctacaaagatgcttccaactcatccaacttacacccttactagatgagttcgcttgagatttccaccaaaatttggacatcaatccttcaagattagagcaaatctctttggtcaataagaacacactcatagcatagcatggcaatgcttgagcaactgactttagcaaaacttccttaccagcctttgacaagaagcgactctcccaagaaaaaattttcttttgcattttatccttaaggaatcccagaatagcatttttgtttcttcccatgatgcaaggcaatcccaaatagaagctattttccagaggctcaaccattcccaacatttgacacattcattgccgagtatcatcaccagtatttttactgaattatattgatgatttagcatgattctattgggaatattttaccaagatctagatnnnnnnnnnnnnnnnnnnnnnnnnnnnnnnnnnnnnnattttctaaaacaatgaaataaaca

SEQ ID NO: 97992 - DNA, 3859 bp, Cannabis sativa
  modified_base (3723)..(3727): a, c, t, g, unknown or other
tatatatatgattttttttattaattgaagcaaatgggttgggttgggtttgttgggccacaagaagtctagccaaattccaacccatactatgcaggttgataaatattacacctaatacaatttcggcccataaaaaaaataaactgatcggcccatttttgggttgggttggtcggctcagtccaactcatgcacagccctaaaggagagtcaatatcctcttcatcctctatagagtcactatcattctttttttttttttgaaagatttccttcctgccaaacatagtcttaaatgtaattgaaaaatttaatgaatataaaaatgttggtcacctctccatccaatccaaagtctcatgtcccaaaaagaagtttcatacaccaaacaatgacatgagttgagtggtcccattccaactcccaacatcttctaaatacatatacaatccaactaaatcccatcactattttattttttgacatttgatgttgaagcctaaagtgcatatgtgaagttgaactatcatgtctgtggtcctaattcctaacaatgtaattgtaaagtcatttttccatctcaatttcccttttttgatttcaaatatgaatatgtaattatgttaactaagtacattattttatgtaaaattgtatcaattggagctgctgtagtaggcatactcaacaatttcaagaaataaattgttaaaatttcagtgaacattgcttaaaggtgcttgcattgtatgtatatgggttcgaagctgacttagatcctctctgttattgggcattttagttaacaaagtagaacaaagctgttcatcctgattataaatcttcctacgattcatatagccaattgcaattgggtttaattatttttcaaggacaaatgtttcggaattatttcaatgtgtaacaaagtattagtgggtctaacaagtaacaaaaacaaactctgttctgaggagtaattgtaaagtgtgtgtgtgtgttttcctttctctaaaaatggtattgacaatactgtatagaatctatacataggctttaccaaaagtagtatcaattacctgtaatatctgatagtaaataagctcaaagtacactgtcactgcagtagtcattaaattgataaaatatctctcttttaacaaagcttggtccaacagattcttgggctggcccagcaagcagatttatgctagcccatgtcccagctaaagggcaatctagtcaaaagaaacagtgatgaggtggcactacttgttgttgttgttgttgtttcacttttcaacaaaataaataaaataaaatatattgttgctactaaatgatactagtactcctgctaagatactatttctgatacttcaaactgaagacttcaaaatttcaactttgttgcttagaaaaaaaaaaaaatcaactttgttgtactcaaaacttgagggggatggaccttggtgagatatttagagctattgattttttcttgatgtaatctaattacttattgattattaattaattgattttataatgtatttgagctcatttggaagtggtttatatggccatatcagatcttagaattatcaaattttcagcaattgaaaataacaaataattcatagatagagagatcacaactttttttttgtttgattatgggtttggttacctgtatgaataataatagagcaaaaataaaataaaaatttgggcaatatttctactctaatgttggagccaaagaccaataaattaatattcttgtggttgtggctacaatgctggcttattataagcaatgatactttataagagcatggcaccaaccatggcataatggttatttaaattacaataatgccccttcacatgtgctccaccatatgattgatgggccctacaatgaattcaattttttttagctgaatctttagttccaagtctaatagactgaatagtgagaaacaatgcagtgtgaatttttgaagtcttaatgagaaattgatttcagtgtagtagcacgaggaagctagagataaatccaaacttttggggtttgttggtataaaaatggccaaaaatcaatagagtagtctgtggagtttttgttttcattgtttaatgtgaatgaatagcttgtagccacaaatcaacttgagaaattcatttaaaaatgagaataaatacaaaccaaaacattctagatctaccaacttgtattaatttattttaaatgggtattactgttttctaaccataagctttgattttacactccccacatcatgaaatgctaaattcaacctaaaagaaaaagaagataaaaaagatttattgtctttttcaattgaatgaaatgtgataatatgacacaaacaaacccaaggaatgtctcctgaaaattggatataaaatacaatgctttatcctctctgatcccacaactcgtaatttttcatacaaacaaagattagaccaaattctcttatcccaaaaaaaaaaaaaaaaaacttgacattatgtgtcgttttggtgggaggaaatatggcacatgggatgatggggtggactgaatggagacctgaattttgaagatccaaaatcttatttgttttcttaaggacacagatagatttcaggataaggttaaatttatatgcacatggaaggacacctttctagctactactctaacacaatatatgcctgatatttattgtacctctcgttaggctagtttggaatatcgtattaagttgtattgtattatattgaattagattatatattatatttttatataatattatgttaaactttaatttatactgaaatattatatatttaggtgtctataaaaattaataccacatataattttacatattgtataaaatataattcaattcaatacttaatacgacctataatttagtaattttattattttaacacaatatatgcctgatttgtatgtaactctaaccgttcgccaaatgcattgttctttaataaattaaaataaaattattatcatataatttagtagttttattattttcatataaattttattttttttcagttgtgttatttccctgtgttatttttaagagagtgtttattttactattttttttttgtttgtattgacaatgtgattacatttgtgtttgatctctaatttcttttttggatttggatgcctaggttattttgggattttgctcggtttcttttgagttttgatacattgatttatgattcatcaatattcaatgtcaagaattttgaacatggtttgtaatgttattcatttttattctaatttgaataattgaggtatttttatccaatttttattggaagatcttttgacaaattatcattggtatgtgtggttgtcaaatattcgttggggatgtaaatctagttttcttcccactattttgttgttttacagctagtgccttatgtgtcatttagttgaagatgttgttaattaaggtttttgtcttttttattgtaaacggcttgattagcctatttttgttgacttttctcgataaaaaatatttgcatgtaatagattatgttcgatttacctattaataatgtaacgccctaatccatagggacgtcacgtttgtgattttataaactattttaatactaatggattaattaattattaaaaannnnnataatattaaaaacttgaccaaagtaaaacactaaaaatggacattataatatgacataaaaagcatgtttcgagaattcctgttataaaaatttttgctaaaaaaatatatacgacaaccatttaaacaca

SEQ ID NO: 97993 - DNA, 966 bp, Cannabis sativa
gagtcacccgctcaccatgtcaaatcccatttttatatgacgaatctataccaaatttgtaaaggtatactctaatgtctacagtctacaccactcaactttttaaaatttcgacacattaaacatgggcaaggtatcatattagggtcgtcgccattttttatggcaaattccatgaaatacttaacaccctcttcatattccttagacaatctatttcctttcatctattctttatccatatctaactaaaaccacctaaaataattaaatcacattaagtaagctaaacgatcaatctattgagttttcaaactaattttttgatttaagtactagttatttaaaagtagtttgatttttaaaatttttggcagagttgcctctgtttatacaatatgtacgaatttaacaaatcacctatcaattaacaacaaaaaacaataaatgaaaaatacaaaatcatcacccatccgaccacaattaatcacagaacctacttcactacgaatgaatatttaaaatattcaaactcatctaacatgtatattattccacccaaccgactacagtatatatatagtcttagaacctacctcgctatagatagatatctaacatattcaaactcctctacaattttcataatattattaaacaaaaatcattgtacatagctcttgcaatgaacaatcaaaaaaaaaaaaaaaattcttttgtgaaaataagacttgttaattatcaaggtggtcctgcatacaaaattaagaatatcataacaaaactttaagaaaaataataaagttaatacgcatagtaactattatattacttatgtctaacctataattgtctcgccgatccaaatgtcaaaatatttgttgatttcttatatgttgctgtttattcttttcttaatttttgtggtctttctagacattcaatttttattttggtaggactaga

SEQ ID NO: 97994 - DNA, 1165 bp, Cannabis sativa
gttattcttgaatagtattcttgaatagaggttctactgtattgataaaaatctcattctttttctcattatttcttttctttgtattctctcttttcttattttttttaatattattttataacaaaaaatagtaaatttacgatgtaaattatacatcaaatattttgtatatgtcaaatttgcattacctacatttttttcagtaagtaaactgtattttagttttataccaggaaagagttattttcttgtaaaatgatttgatagaacttcgtaattaaagaacctcaaacttaggtgctggccttaaattgccgccatgcgacacatgattagtattcaatgcattcaactttaggtcataaactaagagctttttctagagataggatatgtatatcttttagtcataaaaagaaaactacattttacagcgttaaaaccccaaaaatcataccaaaagattctattaccatagtacgcatatgccaaataacataatatttgggaaatatcgtagttaccataccaccatatatactacaaataatgcaaatggcttcatccagaccatccacgtttatagcaaacagatccggtccccaccgaacagtctgacaccaattaaatgtcgccacgtaataagcagcactgaacccaattagccgttgtgctgtgtacaccgacccctcttgctgacctggcggcgacatcttcaatgttcgaataaatatataaaaattaaataattatactcattctctctctttgttatctccgcccaaaaatctctttctcactctctctctcctattaaaagctcagtctgagcttttcggtcatttcacgcaaattcgccggcccgtcatggctcaatctctgcagctgttcaccgcctataaccggtcacctaaccataccttacccaaacgggccacttactctgagactaagcaatttcttccggccacctccagccgccgtttaccggtcactgttttccccaagctaactatccaggcctcttcttcttcttcttcatcttcagatctcgaatcttcttcttcttcttcgcctgttctggtcaatgacaatggcaccggaggggttttgtctggtgcgacggcgctggcgacgtacgcttctgcgacgtctacggcgg

SEQ ID NO: 97995 - DNA, 702 bp, Cannabis sativa
ttaagttttttcgtttttttagtttataaaatatatatacgaatatatattctcttttagccaaatttaatggcgtcgaaatataaaattgccagcttttataaaattgcccggggattgttatgccagtatgcaaatagaaaattataattgcattgaaatacaagaagaaacttacatgaggaatggtataaggcctgagtgcaaacccaccaacaaaatgtatgcatgcaactcccactgccacactccaaatcgaaacagctcccacacctgtgaagaaatccaccagcaatatacaagcttaaaatgaatatatatctatctatctataccattaccaaattgaccattttgaatttaaaattcatgcatgaaacaatagccaatagccacttaacaatagaaaagacctcaccagaactggaaccagacccggaatccctccggcaatccaagatctaaaattcatgcttcttcacaaaatagaatactggtaatgtaatcgcaagcgataattgaaaggatttcacagtgttcggggatttaaagagttgggctatgagctgacggtgctctccctccggcgtccctcattgacgatctctcttcggtacaggcctcttcttgctcgttcgtcctcttcttctccgaacacgttcaagatctataacggaaacgatgaaaataaattggggatag

SEQ ID NO: 97996 - DNA, 787 bp, Cannabis sativa
cttggcgcgcccttgaataaagattcacaagtcaatcaaaagctagattgctccaaatcaaatcttagctatcgacagttcaaaagggtaatctttgaatctctaattactatgataaggtcaaaacattagctgattctctttccactactggtcatccaatggaagagagtgatttgatcatgcatttgctaaatggattgggtcctgaatctgaccctattgttgttcatgtgaccagttttgttgttaatctttttgtagattctatacaatcgttgttgctaactcatgaaagcaggattgaaaagcataacaatatcaatgatcttgcttccaagatgtctggacatcttagcattaacacatcaagaaatggttctggtgcttccaatcgctcctatgtacaatagaatcaaggttcatatggctacaaaaatctacccatggtagattccctggtcgtggtcctccttcaatttcttgactattatgtcaagtttgtcataagcctggacacattactactgtttgtcattaaagatttgataaaaaaatttgctaacccaaagttggagacttgaaagcctttttcactgaacttgattatcataaaactcctcaggtttacacatgaagttcagtttcaaagtttattgatgattatgattggtatgtcgatatagatgccacaaacatgttgcacatggaatggagtaccttgaatccgatatgtcatatcttggttcaaaagctctagttgttggcaatggtaagaaactccaca

SEQ ID NO: 97997 - DNA, 1226 bp, Cannabis sativa
  modified_base (1170)..(1185): a, c, t, g, unknown or other
cttctcaaccatggacgaactagcaatgttagtacagatacccccatcaataatcacactacataccttgtctttcacatgacaacaagtatgaaaaattcctcttcttcctcttgtgagtttaaggctcatctggttactagtgcaagcatgtcatcttcatcttctatagaaacatcttccaatggtggcatgtcagcaagctcttcttcatctttagaatccacctcgccattttcctaaatcaccataactctcttgtttggatattggctagctatgtgtcttcgcccctgacatttgaaacattttatctcactacatcgagatgggttatttttccttgaggggttgtagttgtggtggttggtttgggtgtagaggatgaactaagttggtcctctttctttggaaagctagacctccagggtgttgtattttaattgtgtggacttggccttggctttgagctcaaactacccttcttgagctgcctttccactttgattgccatatgcaccaaatcttccaaatccacataattgtgtagttcgactatattagtaatctctcgattcaaaccattcaaaaaccttgccatttgcctctcgatcctcatccacattggctctaatcatagcaatctccatctccttgtaataatcatcaacactcctgtaagcttcacaaagaccttacaacttgaggtacaagtatcgataatagtgagatagtaaaaaacgtcgcctcatcaccctcttcatagccttccaagtgtcaatctctctttctccattctacgtcctattgatgcactactaatcccaccaaataatagcatagtcaataaattcaatggcagcaagttttacctttttcattttagaatagttgtgacaatcaaaaatcaattccatcttcttctcccactccaggtatgctttaggatcactatttccttgaaaaagtaggaattttcatcttcatatattctaaataattatctacctagttcttagcttctctatcccaaccatagctcctatggttacccgagacatcctatcaaactcttcatcagaaactaccccttccccatctacttcattatcatccctttggtgaaccttgttcctccatgatctttgtgtttgaaattattttaccagnnnnnnnnnnnnnnnnacaagtatgttgattaacaccgtaaatatgaacttctaaaa

SEQ ID NO: 97998 - DNA, 694 bp, Cannabis sativa
caaatgaggtgtttgatgttgttttgaacgatatatagcttaatgaagatggccttttttattaaaaagaaaaatgtttcgtatttgtccaattgttaaaaccttcaccatttttcattttcttttctatctttgaaaaaaaaatatgatcaaagatcatgttggggattccgagaattgaactcgggacctttcgctccctaagcgagcatcctaccactggactaaatccccgaatttacatttcttgtgaacctataatgttttgaagcataacagaaactgttgagttgggaccactgcatgaaaaagaaatgcagtaaataacatttctcttcttctgtctgtaattaagtaaatatactattactatataccagttgtttttgtttgagggtatgtagatatttcaaattccataactctatagtgtctgaattacataaaacagctagcactatatatagtctcaatatgtatacaatcacacaatattatagtaatgccaagtgagacccatttggttttgtcaaacgtgaaccgtacgttaaaagtaaggatatatggaatgaaaataaatgagtagcatatatataacatataacaaagccaaaatataaaattgtattgaatctattccacatgcaatttagttccttaaatttccttaaaagatgtggatcttgcatttttt

SEQ ID NO: 97999 - DNA, 849 bp, Cannabis sativa
cactggcaagcaaggcaagtcccctggaggaaataagcctaaaattgggggcaagcccttgagagattatgagccttgcatgaatgatcattttccattagaactttacctccattaattgatttatagtcaaaaaatgactctcgactcagacacatgtgataagtgcatctagagtcaagaatccactccctgttcattgaagattttgagatggagaacaattctccatctatttagaattcatcactatcctttgcgattgcagcagagtccttcccgtgatgatgatgttagttgtccttcctatctccattgtgagatttgttgaagccttgctgctatgaacttcttgcaaagtctttgcaagtgttcggaacttccacaaaagtaacatttacaggtttccttctccgtagacttcaatttttattgggagtgatggtgtttactcttcaagcttactttcttgggtgatcttcctcttgccaaatacacttcatcttacatttcttctccaaccttaatttgaaatcctttgacttaagtgtgacaagaacatcctccaatgcaatcatgtccctgctatgcttgataacagctttgatttcttgatatgcgattgggagcgatctcaacaaaatgatggcctatctttcttcatcaaccttgtgatttatattagtcaatcctacaataatctcatataaatttcaatattattaactaaagaaagggaaaaatcattctaaaactgtataacctttctagcaaattaatcttgctagcaattgatcgttttaaatatagttcttctaacttgtcccaaactccttttgatgtcttctc

SEQ ID NO: 98000 - DNA, 607 bp, Cannabis sativa
gaaacaacgctcgggatgaggcatcatagcaagatgtctcccatctggtgaacaaatagcagcaactcctaaaggagagccattcatattaaatggatattgctcggtctcactcccatcatcatcacagtatcttactggggccaaattggaatgaagcactctatcaaaaacgccatcatcagggaagtatgctcttccctcaccatgagcagcccacacccccaatgtactaccctccattcctttaaacataacagctggtgagtctctaattatcacactagtgaaccgacactcaaatcgtccagattcattgtgaatgaaccttggctgtgatggatccccaccaagaccatgaacaccgccaacttggggacctggaatccatcccaatagagccataagctgacagccattacaaatgccaagactaaatgtgtctggccgcttatagaactcctgaaattgatttagaaggggctgattgaatcttattgatgcagcccatccttttgccgagtcaaggacatcggcgtaactgaaaccaccaacaaataccactcctctgaaatcatccagtgagattgacccatttaaaaggtct

SEQ ID NO: 98001 - DNA, 1443 bp, Cannabis sativa
ttgttgattgatagatcatgatctttatgcatatacatatatagttattgagtttcaattatatacatacatctttttcacctttggttttaaattttacatgatgagtgtgtgagatcatatcgtatacattattattattcacagacacacacacacacactatactgcttttaatttttgttttggggccctttcatgttgaagaggggaggggggatatagtagttagacttagacataactttggacgcagaacacttataaagagcttctttatctccctcatctttttgctccctatacaataaaattatatatataatgagaaaaagcatatatatatactattttaaaaagaaaaaaaacgaaaaataagccatgaattaaaaagaaaaaaaatcaaatgatggttttgggattgtgggagatttaagggccagaagatgaggacttttgaaaattggatggttgtgttttgttgtgtgtaatttaaccggtgacacggcttcttttagcatcatggtggcccatgccagtgaataataagcctttgctcatcagtaatgatgactattctttcactcagtactcactcactcactcctcaaaatacaaaattatataaatataataaatatcatgctattataataatactaatattatttatttagtccatagggtaatgtcaaaagctgaaagtgaaacagtagtactagtaaaagaaagagaactggcaaaaggcatccctctttttaatttctttttacttttcttttattttttgatgatctaataaaaaacaaatgccctacgtttttgcgccttaactcaaaaagatagtgaacttttggcatccccaaattaaaaaggctggctgccaccatttcccttctcacaccccttatttattaaaaccactttcactacagacccaaaagaaaagaaaaaaaagaagaagcatatattcaagtgcatatggtatagaagaagacaaaggttgttcatttctgtagaataatatacaacccacatatataatgttatttctttattgatcaaattctattctcactgccgatatctttttctcagattttgttgtcgtctatcattttttatgcttattaattaaaacttttggttaattaagctccttatatatttatataaattagcatatgggatcttcatatggtgtgtgaagacctattaacacacaacatatggtaatttataatttatatattctcaaatcagcatattatgaagtcatctagaaatgtagaaatgtatgataatttaaaattacaagggactaattacttttatcatatccaaatagctagcggatccatcttatacatacatatatatatatatgtataaatattatatatgtacccaaagatcggaagagcgtcgtgtagggaaagagtg

SEQ ID NO: 98002 - DNA, 675 bp, Cannabis sativa
gacgctatctacaaaagatgtttagcactactggtactcaataacaatattcaattatttatacaaaaaaatgttaaaaagacaccaataatgcgtaacgctttttaaagtgtaatattattatttgtgcaattaaatattagaatctatataatttaatatattaacttttaaagatattgctaaccaattacaaaataatacttctagaaagtactagacactattaaaatgtgttgaaaatactcttatttatttatatattgtgatcttatgtgagttaattacaacattataacacaacccccttcatgacctaacttttatttttgctttatgacatatataacaggaatctaattacttgtatgaatcataataattagcttcatcaatatataaataacgtttagtttctattcaaaagagataaatttggaaatctaaagatatgttatgattaaagtcaccattgagaggtccattttaatttcttgaagaatttggcataactagctatagctagctccattttgttggttaattagtccatctatttaatactatacatgtaaagaccgcatatgattaatactttgaattattaaataattagggtttatgtatgagattttattattattaataatattatgattatgggaatttatttga

SEQ ID NO: 98003 - DNA, 868 bp, Cannabis sativa
taagcaccacagtaacattactactccagaatagacacaacccgccactactaccgattttcgcaaccactaaatttccaacaaagcccaatctaacccacatcacttcaagaaccaagtgagtcacaagcgtttccgacaaaaaatattatttggagaaaattctttgacatgggaactaagaatttggaacgtccggtcattcccaagaccctgaacattccaagccaagcaattcaattatctaattatcttttttttttgctgtaaataatcgttcaattattagaaatcagaatgtattatcagcaaaaagcattaaacaattagaagtgagtcacaccatcaaatatttccttcgcctaactcgattaaggtaaacgtggatggtgctatctttgcgacggagcacaagtttgactttggttgtgtggctcgaggtgctgatgagaagttaattgaggcagtctcgggtagtcggtttagggttgtagggcctgagattgctgaggttataggggtgaaagaagcgttgagttggatcaagcgcaaagggtggactgatgtggagattgagacagatgcgttggtggtggtgcatgtctgttctaagcttagttcaaatgctgtctcaatttggcttgttggttcaagattgtcgctctttactttcatgtctaaatcatgtgtctttaaattttattaaacggtctgctaatagggctgctcattgtattgcacgagcgtcttgtttatcttcagattgtatttttagtgagcgaaatgcttctcctaaacttatatctattgttgaagttgaatgtttttgattgaataaactattctttgctcaaaaaaaaaaaaaaaa

SEQ ID NO: 98004 - DNA, 1253 bp, Cannabis sativa
gatggaaagtcaaacccttattatgagtgactccattttgttatagaaaataaaaataaagtagcgaacgtggacaaccaaattaatataacaactcgttgttgcttatttttattccttgaaaattatattcttcaattacaaaagaaacttgatctcaaaattcaaacaaattaaacacaaagtaaagtacaatattagaagtttgaaaactaagagctcatgcatgcatgcatgaaactaattaattataattaatagtctcatcatgagctttattattaattattgaattggaatgagcacaccacggtaatcattcttaattaccttgaattattgactcatggccatcaatcaaaggatgtggagatcgtttagttgattgatgttgcgacaccatttctattttatgattttgtttcggaggcagatcctcgtattcacttcgaaaatcgaagttgaatagactaacacccttgtagatcccgtcgtccaatttatggacgacggcatctccattgtagtgaatgtcgcgccgagtataagaaaagggaacttcacacattccctcagtggccacaagagttactttaactctcttcattttaggcactttagcagtgtaagtagcctctattaaagtttcacttgtggtggtttctccccattgatattcatatgtataatcagtagtaaactcaattccattttcaacaatgaatggaatccaatcaactttcaaggttgctttgccacctaatttgagagaatgggtggatccaaaattactagaggttgttttcttgtacgaaaacttgagacttatctcattgtgttcttcaacatcctcatagttatcggcggatgcataacccttttggacaacattgagattgtagagtttgccctcctctttgtggtatctaatttcatatatacttttggagatgatgttctctacaacttccaacttcaccttatctgtaatggtaagcgcactggagttaagacattccttaatgtcttcacttgaatagctctggcagaatgagtacctcttccaatcacgaagtgcgatggtgtttttcgagagtttgatgggccagaaaacagtgtattctttaacgtcagtgtcttcagaatagtctgctgtaacccaatcttttcctgaatcaaccatccagaacattccagtggatttgttctttatgcggatacaaccatcttcatagcatgagatctcatttgct

SEQ ID NO: 98005 - DNA, 869 bp, Cannabis sativa
gtcagtccgtcagtattaaagagtaacagcaacccagtattatcagcgggtcaatagcgacggacactcgcatgtactaggctttagcggttgttttccgtctttttaccagtagattagtctgtcggtatttatagtaattcttgtaattagtacaaccataatatgtattataagtgtcaaagcactctttatacgggcacatgtggaacgaagaaccaaaatccaaaatccaatagtcagaaaagttttcatcagttatgacagagaaaacatcaaagtcactttcaaagccttcaccagcagcatttatggaatcagatgtgtctttgcattcttgattcctcattgcttcaagatgatttgtcaactcttcataattcctcctaacatgtccctttttgtgacaatagtagcactccacttccctccaagaaagtgaatgatcgcgattgtctcttccgtcatcatatcttcctctcgatgtactcctaccccgacttgattctgacctcgtcacaagagtttgatcagtatgagacatactacttggttgcttgatactatctgtctccaaaagagcagttgacacctcatctacagttaaagtagtctttccaactaaaaatatagtcactaatatctcatatgattttggtaaagacgccaacaaaataatagctagattttatcaatttgacatctacacttaataattgagttatgcagttatcaaatctatttatatgatccctaacatcttcttcttcaaccatttttaactcatataactgcttattcaaatataatccatttgttaggaattttgacgtataaaaattttataactttttccataactcaaaggg

SEQ ID NO: 98006 - DNA, 602 bp, Cannabis sativa
ggaatagagataacacagttaagaactttcttcagttgaataactttctagagcttttcgaaagcaacttagttatgtaacttcactgatgtagctttaattactatagaaggattttttacatcctctagaataattcctccaccccaagagtaaccaccatctcgaataggttatgagttcagtgtaaatataaggattctaatatacacccttatcatctaacatataggttactttcataaatatttcttgactgtctcctaatgttcgttgtttgattacatcttagatggctcccactcaacagtaggagtctggttaagttcgtacactagccacttaccctcttactattggttcttagggacatcttgttgtgacactttatcttagtctaaaactataagttccttctagactaagtcatcgacatagcattctagtattaagattaatgtaaaatacttgcttaagattaagtaatcattagagatactataaaacatttcatggggattaggagttttgcctaagtcattcgaatagattttgtaaaattctcctatcttatcctcataattctgataagttatttctat

SEQ ID NO: 98007 - DNA, 550 bp, Cannabis sativa
aaaatcacatttagtaacaaaaaacttatattgtgactaaaaaattatcactgcattttttttaatatatataaattaatttaggcgaatataattcaaattattaatttacaaatatgtacatatatatgatcataaaataaggtgaaatattaatattaataaatcatatgttcatagaaattcttgttagagtgtttcccattttattatcattgtcttcatcatataattttataaatttatacataataaattaaaaatttgaagaagaaaaaaaattacaaaagtacattaatacaaattcttttttttttatgctttgaactttttatttataaaaaaacaatttcagtaaaaataataattttttttattattattttatagttgtcttgagattgttttggattattttatagtttatttgatttatattaacttatagtttttgtgaggttataattttctcgttgttttttttttgagaaaagtatatttttttttattttaaaactttaaaaatatattattataaataaaaatttta

SEQ ID NO: 98008 - DNA, 797 bp, Cannabis sativa
tatggagactagaggttcgacctccgtccattttgtgaagaagtcgactaccacaactgcatactttgctcctccttgccatgtgggtaatgccccagtcagattaatccatcatatagcaaataggtacgtcgaggtcatcattctcaactcggttggtggtatggaaggtatatgtgaaaacctttgatatttatcgcattttttttaacaactttatgtgtgtctttgttgattgttggccaataataatcttctttgatggactctgccaacatgcatgatccccacagaagccttcatgaatttctttgattatttcatttgcttctgttggtaacacacatcgtaagagaggcgtggaataaccccttatgtacaatttccccttgaccattgtatggcgaggtattgagtataagagcttgtgtgcctcagttttatctgtaggaagttctccactgactagatacttgacaattggtgccatccatgttggtaaagtatctatcatcttgatttcttcctcttcacatatatactttggttgtctaagactttcactggtaccaaattcaacttatccagatcaaattgggatgctagctttgctagtgcatccgtattagagttttgttctcttaaaatttgttcaatttgaaaataatcaaaattttctaagttcttccaaactttctctaaatatttttccatctttaaacctttcgcttggtactctcccaagacttggtttataattagttacgagtcactatagcatgttatattttttactt

SEQ ID NO: 98009 - DNA, 836 bp, Cannabis sativa
ttgtccacccttgagttgaccatgttgttacttttgttgttttacatagctgagttttaagttgtaatgtttgatttacttattttaattattatttatatgttaatttttaatttaattgatttacgtaatggtttctttgtgtcaaatttttaaattagagataaacgtaattagtttctctatgtcaaattctaacgttcaactctgacatcttaactccggtgactttctattgacagtgataactttgatgattttttcagtagcgataaaaatccaacgaattttcagtgactttttctatagtaatgacaactttgatgacgttcaataattttttagtgatgattattcttggaagtcttattaaatgtatttgtgatattttgtttaggcttcgatttttaaaatttttttccctaaaattatcatattttatgacactagttagggtattggtgctacgcacgtgagacatatttacttttctctaaaaattaattactttgaagggagatatactactataacaatttcattaaaccaaaataaaaaaaaaaaaaaattaagaaaataacgccgtctacttcaaagaagcaacaaagagtgtgaccttctagaaaaaagatattactataacaattaaacagctattagaaacaaaattaattgaatatatttacatttagttacatacacattcaataattaaaattctctgtactctgtttatatatgtgtaattatttttttattaaggggtatatatgtgtaattattgagttaaaaaattattaaggtaatccctccaaaaaaaaaaaaactacataatt

SEQ ID NO: 98010 - DNA, 539 bp, Cannabis sativa
aatttttggttcccaccacgacggaaaccctggttgccctggaaccttttgtttgagcctatagttgttgattcattaggccttttcttgcgatcacccaggtcaacacccctaccaaaaccaacactagaaatctgcttccatgaatcccttctcgcaatatttttctttcgtatctgatcctctgtaccctcattagctagggccaactcaactatctgggcataagtccgaacaaccccaggttgtttagcagcaactatcacatctcgtgcaatgtgttcatccaatcctcgaataaactttgcttttctagcagttttagtagccattttgtctaaagcaaattttaccactcgatcgaacttagtggcatattctattactgtcatactgccctgagtcaaacgtataaactcttctacatttgatgcctgaatagactcattatagtacttctcataaaacaaggtccggaaagcattctaggtcatgaccctgagacatgatctcccaccaagtacgggcatcttcacgca

SEQ ID NO: 98011 - DNA, 599 bp, Cannabis sativa
aatattagatatccttaataaattctaaaccaaaatttgaatttaattgttactgaattattattattattactttaaaattatataataataaaataataataataataataaaaccagaatacaaatacaatgcattctcgctgaacccgtatatatataatatgctttataagataaaacaaaacagtaatcaatggaaagcatattggtatcacaaacagtaatcaatgctgtatctgtatcgcaaattggtttcgtaccaaaagtgcaatcaaaatgttattatctaaattgataaaccaacatatatatattctcaagagaatatatctctcacaaatttaattccacacataattatgcatatacatatgctgcaagtaacgattgaacctgagagaaataaaaaatttccaacagcacacatatatatacacagtaatcgataattacaaccaaagcaaatatatatatattcatagacttttaggatttccgtgtactgtttcaaaaaacagtaagactttttttaaagaaatctgatactgaattaatcccatgtaaactacaatcatatatacactttatcatataaa

SEQ ID NO: 98012 - DNA, 750 bp, Cannabis sativa
tacctgcccccgcccccgaaagtcaacccccgtacctgacccattaggggcgtgtacccgcggatacccgaacctgtgagtataattgccatccctatgggtcgggaatgattttttcgtgcctagtcatgctcatgcctttcgacaggggcgactcttaaggggtgcaagttgggctattgcacagagccccaaaaaataaagggcccaaaaaaataaagggcctaatatatgtttttttttaatgctcattaattttttttaatgaacccaactttttaaatagctaactacttatcattgatcattttttttgtcaattcccaaaatccattttcaattctattattgtttttaagcaaaaaaataaaaatttattgttgctattttttttttcaaacctttcatattttttttcctatcatttttttttttgttgtacagcaatcaataacaatttttataaattaattggagttttttggtgttttgtaaaatatataaccgtatgataatgtttaaaaatattatttagaaattacattttttttgtaggggcccaatttttaaaattagaacatgacctccaaaatatttaagacggccatgtttttcgggcttgtgctgatttcgtgtcgtgttaaaaagtccaacccatatttacaacactgtcctatcccactgcactagaaaaaaaaaacaattgttgataacaaattcatcacaaatttggtcttttttttttttttt

SEQ ID NO: 98013 - DNA, 603 bp, Cannabis sativa
ctaggtttatttgaattgttttattaaattaaattaaatatctaatatgataaatgatttaaaaataaaaaatagttatttttaatatcattttctaatataatttaataaaattaagaaaacaaaataatcaatttaaaaatagatatggttaggcaatttctattaaaaattaaatattattaatttaaaattgatatttaagtttgaatattttgaaaaaaatattttattttaattttaaggtttgaaaattaaaaaaataaaattttttggggaaaatccccaaaaaattggatttgagtgcttgctggcagctaggctgcacgtacagccatgagaggctgcaactgcccatggacgcgcgcggggaggaggagttacagcctccttgaccgagaaatctcggtcagctgcagcctgctggccgggcgacgtgggcgtgaagcagggtcaggacacaggcgcttcagataaaaattgtctgaattcatgcgcgtggatcaccttgtccgaaggtgtgcgcgcatggtgctcgaccatatgcacctaaaatttcaaacctttataacttctccgttttttatcggaatcgagttccgt

SEQ ID NO: 98014 - DNA, 1225 bp, Cannabis sativa
aataaaatattatattttggatgatgtggagatatagagcatcttcaaagaatgctaccattggagatactctatcgataaatgttgcaatgtaataatgttgagtaccttaaggtgttaaaatatataatttattgaaatagaggaatgtcatgaagtattgtggtgtctagtactcttatgatgtatccttatataattagttagtaattttttataatcattattaaaataaaataaatggaatcgaatattaaattatataagtatatcttaatatatattgataggtgacattaaccataataccctttacatttctcattgaaataatatatacacacttgcacaagttgcactccactctttaatagtactaacgtataatattaatggtgatataaacagtattgattttccaacatatccactctctttcattatcttattgtgacaacttttatttctatatgagaaaatatatatccttcaaaactaaattattccattattatgatcaagtagtggaccaaaaacaggaaaaccagtcacgatcccactcgagtactttttactcgtaggaactccaaccaccgaagccgtcgacgaagaagacgaagccacgcacgatcgatactcgggtacctccgccgccgcaaatttcgttttcacagacaaattgataatcccattcctttcactttcctcatccctcagtctgtaactcagaaaatgcaagtaattatcaggtaaatatccaccggaaaagtctgatatcggaactgtagccgttccgacgagtctgattccggtcatgattttgcagtatacttcgacggtcagtgcagctgcttgaaccggcaattcaaggacgagcttctggttccattttgggttaaccccgccattggtgtcgatctccgtagaacagaaatcatttccgccaatggatcggacgacgacgaaggtgttcttcttgattggtctccgatcgatctgaaggctttcacctgataagacagtaatttctacagctcgcgatgagaagttaaagttggacattggcagatcgatggggaggaggaaaatcgagtgaggttattataagagaaaattactgaaatattttaagtgagttattatttggttagtttgtatttataatgttatctgtacacgcgccgttgatgttgatggaaagaagttttttttttttttttttctt

SEQ ID NO: 98015 - DNA, 1074 bp, Cannabis sativa
aaaatattttaatcttttttttttcttcatatgtgtatgttatagttattgaagacattttgtaaaattttgagaaatataaaataatttaaaaaaaaaaaatcatattcacatacgttatagttatttttaaaatttttcaaaatttcagcatacatgaccatgtgagaaaaaattaggctatttttttttaggaggagtgctaatcacactctattttacactctcttttgcactctctttatattttaatgacaagtgtcattttttaagtaatgcttacttatacctaataattagtcttaacattataatttaattacatttgtgccattctaattaaattgtctattattctactaatttagcaatttgttctttataggagaataaatatatttttaattgtttagttttttcatcatttaaacaaaaactatgattaattatgtattcttgtaaattataatttttataaagtttgtatatcatttgtaggagagttataacacgagtacatgcaattttttttcttaatgttttatattgatactcttttaaatttaaagttactaatattataatggtgttagtatatatattattgtttttcttttcattttttaattaattaataaattttattatatttttatgaatactttaattttcgttatgtaaattatttcaattaattaatgatcttattctttcttaacattgaatttaataatttattatttttgatttactaatagattagaactattttcgagaagataaataattttaagtttttattttttattcacaattatatattgtgttaattgagctaattaaagaaaataatcaaattattttcattataatgttataataataaattaatatttattgaactaattaaatttttagtcattacttataaacaaaaataagttctaagatatttatatattgagttaaaattaattttactttaattgtatgtatcatatgaataatttgttaatgttaaacaagaatatatagtgataattaattttattcaatttaaaatgggagaactaa

SEQ ID NO: 98016 - DNA, 1077 bp, Cannabis sativa
gcatccaatgtaagatttctcatactttatatgtgtttaatttttatcgttttagaagttcatatctaagatgttaaaaaatacttgttagtaaatttagatcctggtaaaatataatccaagataatctttataggtggtattcctgtttttacttgaaattaaacaataagttcatgtgtttttgtccagttccaaacttttacagattgtgtcaacaagagttccataaaagaaattcctttgatgtaatatgtctgccacttcatagtttctataattgatattctcttcccaaaatctattgtaaaatagtattattgtcataggatccattttctaagaaagttgaagaatcaaaacagtaagtaacaacattttcaagaataaatttcttgaaaaaaaatatttgcagactaggttccttgttcctaacctataatttagcttgttcaatattagctttttaatagtgttgagatgctcaattagctttttaatagatcaagctaactgaatattaattatgaaaattaatttataaataaaatatgaatgtgttagattatgaatgtgaaagatgaaaagtttgagattagatacatttttgttgaaatctgtttatactttttctagatttttgttcttgacaacttttcctaatcccctgttctcgtctatctttgctgctggatcttcttttgtagattttttgataattctttgtgtgtatttgcagtgatagactaacagttgctattttgtgtaaggtttaaagtctggaaagttatcatcaatggagcttttttcacaaaaaattttctatgcgattagtcgaaggtttgtgtttttgaatattctaaacgtatttttgattttttgattatgagggaatgtattattggttgctattttgttcaaagtttaagctcagaagatctcatcaatggagtttttcgacaatggagtatttgcaattgacgatggagaattgcgattgtcgaagatttttagtttttttttttttttttttttcaataaactttcatttaaatttttttttttttttttgttttt

SEQ ID NO: 98017 - DNA, 513 bp, Cannabis sativa
ttggaagctcaaaattttattatttttctctataatttaaagattgaaatattttagctcattatttattttgagtgctttaatggcaatttcttgcaattttgttcaataccccatttagtttttctttggattaaaatctcagcccatacccaaaagtcttagggcaactccatcttcttctcccgatactgtgactcactagctatttttctttttttaaaaaaacttaaaacaacagtcattattattggagttgtgacctcagtacattctattttccttgaatggaaacttcatctgcactcactatttgaaccatacatataaataaaattgaacattcaacaatactgattctgccccttaaaatatacaacttgttgagaatcccctaaacttttacatttacaaaaatttagtccttctgttagcttttgtcctattgttccgtttaaatgatgacatgtctttgtaaattacaatttttctccctaaactttgacaactatc

SEQ ID NO: 98018 - DNA, 596 bp, Cannabis sativa
ttccatttacagaccaacatatagatcccaaaatgagctttccaacaataccaagaacatccaaaatagagtcccaagtcaaaagttatggtaaaaacaaaatagcaaaaaaaaaatatagtaaactaccaatgctatggtcgcgaccaaacttgcaatggtcgcgactagagcccaaacaagggctcatcctctctggttgagtgctagttcgcgaccactaaaatagatcgcggccgctggatttaaaaacccaaaaaatgcccaaaaaatcatattttaacccaaaagaaacataccaaaaccattccatccatccaaatcatgcataattctcaaattcaatatgaaaacagcctatactaatattaacatccatcacaaaggtaatcaaagttcaaaaataccaattcatactcattacacaaaaccttaaatcaaaaccaatataatttctccattttacaagcttgaacacaaagcttttaaatcaacaagaaataccctgcaaaaatccatgccaaacctagatttcaaacacacatcacaaccctaaatttccccaaaatcaagctagatgcaatactcataagcct

SEQ ID NO: 98019 - DNA, 544 bp, Cannabis sativa
ttagctaatggttttaaataatctccttctgaccatactttgtttatcaagaatgctaacaatattttttagcaattcttgtgcatgttgatgatattgtcattgcttctaacaatgatgctgctgtccagaattttaagaagcaattacattcaacttttcagttaaaagaccttggtcctctgcgatttttttcggggttggaaataggtcgttcctcggctggaatttcattttctcagtggccttttacacttcaacttcttcatgacacaggtttcttgggagcaaaagttgcctctaccccaatggaactaaatattaaattaagcaaagatgttggcactcctctttcggacccaaccatttatagaagacttatatgtaatctcatttatttgtccattactcgtctggacatctcctatgctgtcaactctttaagtcatttttatatgagccacacactcctcatttacatgctgcacataggattcttcaatatctcaaatgcacacagggccaaggcctgatttttttatgc

SEQ ID NO: 98020 - DNA, 1265 bp, Cannabis sativa
taattttttcacaaatagtcagatatgtacctttgtgattgataacttgaataaaataaatagaaacgcggctattgttttgagaatgcattcaatgatagataaaatattttcagactttctgttagctttgtttttatattatacaaagttacttctttattcaagtggaatgttgttttaaaacagttagacataactgtttacggaaaactaacaaaaggaatgggcaagtgtcgtcgttccacgtcagagacgaagcccgaatctcattcacaagaggtgggtggtggttgaaccaatgccatggtatgcggcttaagggtgttcattcaatctaatccgcactaagtgtgaattttactttttggatccaatacaattcacaaaatattacaaattccattgaagttaaaatgtgacaactcttagctgatattaagatatagagtagaccacatcaaagaaatactaaaagcctactaataacacacatggtaatgccaaaaaaagagttctgttcactcaccatgcctattgaacaagagaccatgcatcacatccactactccatgaaacaaatcaagataagagtcaatcaatgcttttagtataaagtagtcaacatgagatgaaacttagcaattacatgatcaactcaaaagaaaacctgaaaaaattggaagtagagaaactaagttcatgatcaactcaagcaaattcttcttattagccccattcttaccttaccttgaccttccaatatcaccatctttccaattcattgttgttcaaaattacaagaataacagagctgcaaaataaataaaaaaagggcatgcatttgtaataataataataatatctagggagttgaagggtgggaatagccaaaatttatctgagaaatagtctaaacataatttaatcccctttcatttattgttatttttgttactattctaattcttcatttcgtcttgtgtgactttccgaagtccacctaaataatgtgcgcagtacatagttcgatattataaactcgataataataataataataataataattgttaacgccgatttttattaactaaaatttagctttattgtaataaatacagactttattatatagtaattaattactaaataaataataaataacaagatgattttaacgtgattttgaaattaactattcatagtctacgaggctatcttattaaaaataaaatatttttgaatacagaatataatggtgt

SEQ ID NO: 98021 - DNA, 2942 bp, Cannabis sativa
acaatacacataaaaagaggtatgtttcaaataaatataaaaatagaggtaaatttgattaattgattaataaaagtgccatttttcaacttaccctagtaaaaatccaaatttccaagttaataggtgtggttaggcccgttattagtcagcaaggcccaattgatccacaaagcccgtttagaaatttgggtccccacagaaataacgatactccgcgaaacaccgtaacttttctctttctaggtcttaaaacccttcctcttcgagctttgaatctctctctctctcacttcgagcttcaggctgttcgtatcgtcggcgagaaaacgatacagcggccatggcggcacctgaagctcctctctgctatgtcggcgttgccagacaatctgctgctttccgcctcatgaaacaaatggtatactctctctctctctcttcatcaaaactttttggattgttatgttatggaggttgaatttcatatgattttgaaatgttgtttaggggtgggaagaaggagaaggactcgggaaagacaaacaaggaatcaaaggacacgttcgagtcaaaaacaaacaagatactactggtttgtttatttgattctgttttggttttctttggaaaaaaacaaaaaagaaaaggaatttttttatagctcaattataaaaatgatgtgaaatgttggattttgatgaataatttatgtgtgttttgtaaaaatagtctttatgaaaattttattagcaaaataaccatgtttgatattaccattaaacgactataatggtcgttttgcaatcatgccacagtgtaaattcaatgtcattattttgtaaattttacaatttgaagttgttagtttggcaaatttcccatacttgaggtttatgaatgattttttttttttcgagtttggtgtaggcattggtttagagaagcctaatgcttgggcatttgacaccactcaatttgatggtattctgaaaagattgaaagtggtgagttttattattatattttctcttttaattcacaattggtgtgttgtgttaaaaattgctttattttttggtggggtttctttgctcattcattttgtttaatttggttttgcagcaaactgcacaacctgatgcaaagaaaacagaagttgaagatgagtcagaatcagaatcagaagaagaggcagaagtgcaaaagcaaattgaggagaaagttgccaaggttactcgaccacagggaaggttagtattgtgtaattcacattggtattgattatcgcattccttatatggcactcctggtgcccaacaccatgacgggtgcaatttatagcggtctcacgtattatattttaaattaacaaaatgtggttctgatgctgaattgcattaatgacagtttgccgtttaaagtggtgttaggcactattggtgcaacttagcgatattctattggttatcaacttttactgcagcattatgatttattaccttgacttattttcatttatcgtcataattagatatatgagaagagagagagcaaagcttgttcattcctattcggcgaaggatcttgaaggcatccttgtaagttcagagtgttacaaaatttgcatataccctcaattttttacctcttaaaaaaatatcatagcgttgcatgtttttcagctcatgtctctgtgtctaacacatagctcatttttctttacatattttattttaaaaaagtttattctttttctttttatttacttttgaggtccttcatgggggtttcactataaaagtgcctcttgttagtgttttttgagaaagaaaatttgaatgtttacatgttctgataaaaattgtgcaagagaagttataatgttcaaaatttcatttactccacttgcctctaaaaaggctggtggggaattgtaaagcttatgcttatatattggtattgcgaatttatgataatttttcatgttgtgtgtgtatataagtaccacaaaattaaattttgtcagattcatagtgcaagtcaagttgtgtgttgagtcacataaagttgtgaaatttgattttgatgtgttctctcatgttttggaacatgtcgaatatatatttttgtgttatattacaacatctttacaaagttagtgtccacaacaggcaaaggtcgaggagcctactgcaacaaatcctagtctcagtggtcaagtgaaggagttggagaaggcatctgaagctgaatgtcatattatatttgctgagggtaataatcagatagaaaacagtgaagagttaatttacattacatttaatcatttcttttaatgacatgtgtaattatacacatgtgcatgcagcaacttggggtgcagatttttactgcttttacagccctttcgttttttttttgcattatcttgaattgaacgaacttgttcttagtcaattttgcttgatatggtaacaggtaacatgctggaagagatctctccagattggtggggctttaaacttgggtttacctctgggggtcttctaggagcggaatctagaagaaagttacaaagtgaaaagtcaaagacaagaactgcatttcacgaggatgatcaggagaatctttacaatcttgttcaagtaagatttttactcaagctttgctgaacaaatattgtacacttgttgccttttcctgctgtcacttataattttcaattttcaggataatgccacgaccggaaagcaagggctaggaatcaaagaccggaccaagaagatagctggttgttactttcaggggaagaagacatcatttagtgacaatgatgatgaagaatcttccgatcctgattgttcggaaaccgaaaaacttgatgtctctttagaaatggaaaagacaaaggaaccaaaaattaagttgaaaaagctttg

SEQ ID NO: 98022 - DNA, 566 bp, Cannabis sativa
gaatttttggtgatttaattggttaaagaccaaaggtattgccacttttattaaagtaataaataaagcaattaatataaagttatttgtttaaagataaatagagatataataacaaacatgtaataatatttaaatcacttaaatagcaacttatacatgccttattgcataaatacataaataaggaatcgggttcttattctcggaaaagggaaagcttgagatacaaaataataatttgcactacacaacccaactaggaccaactgccacaagagcatcgcaaactggctgtcacaaaaacctaaagagcttctgtttaggactttctttgatccacaacaaaaagaatataaataacaccaactctcttctcacccaccaatccgatctatgtgaaatattctctctctctgtgaactacaatcaccgagtttcgtcctcgagagcacggaaaccacttgtcaaatcatcataaagcttttggaatttctccacgagaactgcctctccttctgccggatcctcaaacttttgagacctgtaatgttgatgaccagagc

SEQ ID NO: 98023 - DNA, 761 bp, Cannabis sativa
atgagccttacttgtacaggcagtttctggatcgaataatgaggcgttgtgtgccgaaagaggaagttgcaagcatcctagagcattatcattcatctccctatggtgtacactttggtggacaaagaacaactgcaaaagtcttccaatcggggtactatgggcctttcattttcaaggatgctcatgattttgcaagaagttatgatcgttgccaaagagttggaaatattttagcaaggaatgaaatgccattgaattgcattcttgaagtggaactttttgatgtttggggaatcaactttatggggtcatttccaccatcttatggcaatctatacatcttgttagcagtcgattatgtcactaaatgggttgaagcagtagctagtcccaccaatgattcaaaagttgtaatgaagttcctccaaaagaaagttttcactcgctttggagcaccacgggcattaaaaagcgatgaaggtactcattttgtgaataaagttcttattgccttgttagctaaatacaatgttaaacacaagattgctacttcctatcatcctcaaacaaacgggcaagctaaactttctaaccgagagatcaagggtgtacttgaaaatgttgttaatcctagtcgcaaagaattgtctcaaaagctagatgactctctttgggcttatcgaacagcatataaaaaacctttgggtatgtccccatatcgattggtgtatgggaaggcttgtcacttgctggtagag

SEQ ID NO: 98024 - DNA, 982 bp, Cannabis sativa
aatattttcaagtttagcgaccctagagactcaattggggaccaaaaatatcataacgactttaattgatagaattgatgggaatattatgataaggtgatgatataagtaatggggtaattaagattatgttggatttgacttagcgccctagaagtatagatttttttaatggctaagaaataataagataattatgaataataaagtttttattaatattatgataataatattattataatattatggttttttaaataaacttatctgttacaataagttttttatatatatatattatatattataagtttataacagtaaacaaatagaacgaaagccctcttttcccttcgataaaattctctccctcttatattcattttttcaattttcaattcaatatctagtgatctaagcttcgatagtagcaggatagtgaattcttagtgtcgaaaaaagcttaagttaaggtaaggtaaggtaaggttttttaattttgttttaagtttaaaacaatttgtttcgtatgggagttttgcgaattaaaatagttataaaacaactgacctaatagaattgttctcgggtagtcatggaactacttctaatgtttacttgctgaaattgaggtaattttcgtttagaaattgagtttagaactttttataacttaaatcagaacactagtggcgtttgccaattacgggctcgatttaagattatattacgtaagtatgacagtatatatagtatatagatgccctatgaagtttggggtagtttcgataggttccactagtgtttcggtgagtgcgtaaacttgtaaaatcatattgtttacccctgataaaccgatcaaccatttgcaatcctgtcaaccggttctggctaacttgtttactatttcgggcagcctcaagaactcgggatcatatttttgccataacttttcactcgagtgtccgttttggacgtt

SEQ ID NO: 98025 - DNA, 697 bp, Cannabis sativa
tatatatatatatatttatgtaaatagaatagtccggggaaatagtatgatactaactaattgattttattagttcatctatttctttgatgtataattttattttattttattgaaaaaaaactaaatcaataatcaataataatatataattagataatctattttgtactaaaaaaaatcttatttcaaaatttttatacattaaaattattatttttaagttaatttgtattaatgaaactttcttttcttttttattatattaaagttttattttttatttaattcgccgcatgaagggcggctaagttatctagttttataaaaagagaaacttaagggtgtgaaaatacccgtattgacatttagaggcaattttttttgataaaaaccgtagatatagaatttatatatatctatgtcatcagttgggggttggggtaaaatgagtggttttagagtaaccctatggtgtcggttatttggtattaaccgacgtataggtgcagcaaataaccgacgccatagggttatgtatcagaactccaattttgtcctcctcatttcacaacttattgaacacaaagaacacagcagccatagcagcccaaactcacgaaaaaaccctcgccaaccaccactaaaacaacctcattctccctaatttcttaaccattttaccccatttttgtct

SEQ ID NO: 98026 - DNA, 729 bp, Cannabis sativa
ggtaaaataaattccaacactagatcctcttctttcttctcgccttcttcggttatgaccaccattaattgatgattggctcttctattttaaagttctatacgataacattcgcgagccaacaattgtccgcctcataccagacatactcatgcttgtgtttggaattttagagatatgtgtttgattgaactgactacccctagcccaatcaatgcaggacgacccatcaatataatataaactgatagaagatggacaactaaaaattcctgcattagtgtcgtagataacagtggctctcctacagttaatggaagttcaataatgccttggctggcgacactatcacctgtgaatccacataagcttaccatgcaaggttttaactttgcatcttgtaaccccattttctttagtgtattcatgtaaaggatatttactgagctcccattattaaccaatactctttttatcctcttgttagcgagctaaactgtgatgacgagaggatcgacaggcggatacctcacatgctttgtatcttcctttgagaatataatcagaggttcttctatttttgcttcttttagtggttcttgagcaaacaccaattgttcgctttttatttcattgacatatctcttttgggcattattactatctccagcgaggtgtagccctctcgagataaccaatatatcattgccctcaacagggggaggttgc

SEQ ID NO: 98027 - DNA, 700 bp, Cannabis sativa
tagtttgctaagataaaggacgggtacaggctttgtagtggtacaaagtgatagtgaaggtttctctatttgtagttagaagtgaaagaatataagaataagatttcattgaagataaatagtttgaagtaatagtaatcattaagataaatggactctaataagtatctttatttttttaattaattatcccactatacattgtatatacatcatatatatacattattaattttgtatttaattttaatacatatttattgatgaatctgtgaaataatttcaatgcatgagtatccacttattcaaaaaatacattagaatccatattctagcttatatatttatttataattttaattttttaaaaattttatttatatttgtaattttttatttgttaatattttagtccattaaattttcatatatacttgctcgaaccgctcaaagagcggttttgtttcctagtatataaataaaggaaagcacaaaagatcttaggtggcatcttatttttttttctaatcatttttactattttcttagactttcacattttgttaaaggacaaataacataagttacatatttaataccattattattaaaacatgtatatagtgacttctcatattttataactcttaatcattcattattattattactattgttattattattattattatagaga

SEQ ID NO: 98028 - DNA, 597 bp, Cannabis sativa
aaaaaaaaaaagtagaagacaaaaaaaagctggtagtgggcacccacgacgacaatagtaggctcaaccttgtccaataaaaactcaaagaccaaagagagagaagagaccaatgtttctttttattattattattaatttttttcttcttctctttgctgtaatcagcactactttctttctggctctgctatatacacacattatatttacaattatatataatacatttgtgggaggtgggtctgatgcataaacattgcttcgctgtattcaaccttacattttatataaaaataaataaatatgaaaaatctctctattgccctcgtcttaatattgttgtcctgagctccgtttatggcatttggtggggactctcatatcatatcgtataaaaaaggagacagtagtaatttgtacatgtacatatacatatagtatatatatactgtaatttgtacatacatatatagtattcaagcgttgttgttttcttcaatcttaaacaatcataacatttataacctacttaaacttaaatgatcgatttgcactcaccagtatttggtgtaggtggtaaaatttgaaactata

SEQ ID NO: 98029 - DNA, 690 bp, Cannabis sativa
gctggagtccaaggctcttggttctgttcttcttggccaaccggagcaggaggatctgttgtttgaacaggatgtgcatcagcagcctgactggaggttgaagcagctgtctcagtttcgccataggccacttgggacgtgcagacattaaggtacatgtccttagcatcgcccaagtagtcgaaattggcctgaggattagccttccaaaaatcaaagaagagctcgagacctgttgtctctaaggcattgatcttctccttctagctatccacctcagtcgaaagctcctcctccttagcttccttttcctccttcatccgatgaagaactgctcgaagcgaagtcctcttgtcctgaagactgttcacctcagcagataaggtctcaatggtctcctcaaaaaggtcatcaacttcgagatccttagtcagcacagtgattttcttctgaccagcaaacaacttcttgttggcttcacccaattccaaccgaacagcttcgacttctgccctggcttcttcagcagcccccctccctggtggccaagtccgcctctgccctcagggtgtcggatagagccgtgttctttgaagcagaagacttagcccgggagtaagtgtaggcaaacttcagaccggcctgcacaaggaaaaaactttagcatttgagctaagtatggaagattaa

SEQ ID NO: 98030 - DNA, 716 bp, Cannabis sativa
aaacttacattgcttagttggggattcaaggcttttgatgcagacacttttttgtttgtctatggttctaactctaatttagtcatcctacttgtctatctaaatggcattttgattatagggcctagttcaagtcttgttgagaaattaattagtgatttgaattcatccttttctctcaattatatgggacaggtttactattttcttggagttgagattcatagaactcctaaggatatgtacttatctcaaagtaaatgcatcataaaactcctagtcatagttcatttggagggtgctaaggtgtgttatagtcctactagcagctctctcaagcttgctctcattgaaggcacaccatttgagaaaaaaactctttacagaggtacattgggtactatgcaatatttaacttggaccaagcctgatgttgcaacatcattaacaagctttctcaattctttcatgctcctattaatgtgcactaggaagcttgtaaacgattgctaagttacttgaaaggcaatatttttgaaagtttgctctttaaactagcttctggaatgtctcttgaagcctattcaaatgttgattgggcaagttgtcctaatgctcgaaggtccgcatagggctatgtagtgttcctatgaccaaatctgatttcttggtctactaagaagcaacaagtagttgctcgatcctctattgagtct

SEQ ID NO: 98031 - DNA, 647 bp, Cannabis sativa
tgagcccaaggaaaagcttgttcgtgattattcaactgtccaccattcgcaagcaaattaggcggcgccaaattataagccacggatgggtcggcgccttgcataccagcgccaccgccttgctgtggggccccaccaatccccggtggagacccaacaccgcctcctcctgcggcttcctcttcttgttcctccagaggcaatctttcataagtagcgttggaaaacgtggcagcaatcaccattactggcccagcagccatgagtgggcccacaacgctacccccaaccacctgcccctgcccgccggccaggtatatagtcagcccggtcgaaccgggaggtgcaggtccgggcagaaaagcccctgtcagagagagaatctcgaaacgaccttgtagagccataacggaggtagcggctgaaggttgacggagcgtgacgttgttgacggttccgcttccgctcagaacacaaacccctctttggcggcggcgagcgaagtgagccacgctctcggctatgtcggcgccgctggctatttccatgacgtggcttcggagggcgtttgggctgtctcttgttacgaatatgggtggttttggcttgtttttggatccgggcggtcggcccctgggccttcggtt

SEQ ID NO: 98032 - DNA, 1220 bp, Cannabis sativa
taccacaatcaactaaaaagcttgaatcttgatcttgtaaacgaaatgcatgcaattatagctgttcaatcatgaggaaacctcatcaaattatcaattaacagttagggtcgaatctcgaaaaacccattgaggaaaatccaataaatcttaccatatagacataacactcggagacttgatagagaacaagctccaaagcctccgtgtcctcctcttctaccctttcttgatcatttggacccttctgttctttctccatttcggaaagacacccagattgatctgattccaagaagaactttcctgaggtcgcaattagatgggtatttctcgaaaccaactgggtttttcacgaattaacaaatcgatgtgaagaaggttcggtctccctatgtgggtctactcggttttactaagaccatcagtagagacttgtgtagtatactatgttactcttctaaacaactgtacgctcgggaaccgtttgatcgatggataatacaattagagccgtcagattctacaactttgtgttgctttagggaagagaaatgacggtcctgatggggttgggacagatgggttggtacaactagaagattagctttgcttgaattttaaggaaggcaaattacaaaaactagcaacacacttttggataacatcctttaaaatataatgctaattatttattttattttttttaataattagcaattttgcccctgaactttcaataatactgattttagctcctaaaatataagacttgttaagaattctccttgaatttttaattacatttatagaaatttagttcttctgttaagttttgtcccattatttcgtttaaatgatgacgtgtctttatcaattagcaacttcgttcctaaattttgataactatcaaattgtacccctcaaaataaaaatgagaaagattcaacatttttttttagtaaatcttaagaaaagtaatttaaatcttaagaaaaaaattattttgaataattaagaaaattaaaaaataaattaaaattttaaaactaattaagtgatataaaaaattatttattttttattagaaaattcatttagatattaatataaaatatattaataatttagtttttataaaaactaaattttacgagaacaaacttgagtatattttatttttatcaaaaatgtaaatttatttaagtaaacatagcatt

SEQ ID NO: 98033 - DNA, 502 bp, Cannabis sativa
  modified_base (37)..(41): a, c, t, g, unknown or other
atattcatttaacagaaaatcaattatttatttattnnnnnaaatagaaaatcatttccttaattagaaaataatttccataaataaaatattctaataatatatgctttttttaaagtattttgtctcctttcaaataaagaaaaaagtaattttgtccagccaaaatatgatttatttcaacttttgcttcttagctagctaattatgatttctaattatctattggccactacggtactaccacttgtgttggtatactataaattctttagtcttaaagattaaccagaaaagagcaaagttactcaccttcccttttggtaccttactgaactaattatatttttatttttatttttcttttacaataaaaccaatatttataggtcgtataaaatccaaagaataatacatgtcctatactctattcctacttccttgactgagcatatataatacaaatattactataaacccctactaagtgatgttgaattga

SEQ ID NO: 98034 - DNA, 534 bp, Cannabis sativa
aaaccgtggtgtggtttcgaatttcgaaccaaacgaaccaaaccaaaccaaactgttcttaatggtttggtttggtttgaaaaatggggcttattcatttttacatataaaaacagtttcttttttacatttttacggaattctacatagaaatccctattgcaagtagtgctgcaacctaaattgcaacaaaaaatcgtatagaaattcttattgcaactagtgctgcaaccactttagaaacccaaaccgtaaatttgaaagaaaaagttaaaaaaaatagtatatggaataattctccttgaataatttattggtctggtttggtttctaatattcaaaaaaccgttatactggtttggttcattatggaaattcgaaccaatgaacacttagagcgtatttagaaagtcacgttgtaattaaatttgtatgcaattagaattaattacacaatttaatatatttgtctgaccatgttacatgtaattactatataaatgtgtaattaggggttctaattacactctcaaa

SEQ ID NO: 98035 - DNA, 725 bp, Cannabis sativa
aactcttatgtgtttaatgtcattgttttagaaaattcatatttagggtgttaatgaaacatacatgttagtaaatctagatcatggtaaaataaatttcaacacgtacctcctttgaatatacctttctgtctaatgactcctctgagcgttttgtctaccacgtgcaacttccacccgatacgttccctacaccaacaacgatcctaactgtacggaccctttgccgcatgagaaagagccttcttgggggcccaatggtcagtatttttatgtattttactccaatagtaggtgggctttttccataaaactataggcgagtcatgggtatgcccatacctgcactttagcgtatataagattatttatttcttcacaaatgggggataacaaaattacatagctgaagctctgctaaaatactctctaagcttttatattctttaagaaaaacatagagaactagagttaggatttcattgtaaataccacttgtaatatatttaaacgcctataaggccaatattgaatcgtgaactagggataattaacacccgaatcccataaaatcttatgtatgtaattcttactgcttttattaattaatttccaaaaatctcgataaacaaagacaaagttgcaactattgcaacatcagtggttagcaaaattgaacctctatccaagaatacacttgggactaaataaattatattctaatt

SEQ ID NO: 98036 - DNA, 1410 bp, Cannabis sativa
  modified_base (1163)..(1165): a, c, t, g, unknown or other
tgtgtggggtttttaagaagtatttgattactactttagtaactgttagtatatataataatttgttttattattatttatgctttattttgaatatattttctattttgttggtccccaatgtcagattgtcggttgacttattattatcgcctgaacattctacgtcgtcggagcttcattcaacaacctcacttatcatcggctccgaccgattttcttcttctcaggcgacggaaaatccagtaagactgtggctccttcgatcccttattgttgttgcttttatctcttcggttccctttgctctgattcctccgacggtgtcgacttttgtctcttaattttagcataaaacacaaaacaacctctagaaaatccactaagttaaacatagctcattaaacttagattgacaattaccaaaatgtccttaaccttattctctataatcttagggtaaaattgtccaaaatcataaccccaagtaatagtgtcattcaaaatgtctaactatttttttgtgctaattccatatatactcaacggtacctaaatgactttggccaaattataccaacataaaaatataaaatatatatatatataataattcatatataacatgcataacacacttagaatttaataaaatatcttgggagattaaaactcaaatatctatttcttgaaaataaggcctacatcacataatatacatatataatcatttcatacaatttaatgttaactatctattaattctatattctaagtatgccgtcattaaaattatctccctattaaaaaaatttcgtcctcaaaatctaatctgaacaactctagacactgaatcatcaagtcaaactctaactttcaagtaatttcctccaccttactgtttccccagaatactttgaccaacgttatgaacttattccaaacactacaaaaaaatttacttttagatacaacaaaatttgtgactaaaaataaaaagttgtgactaattataaattattattcttacgttatgattaaaaggtctgtagctttaagtatttgtcacaaaaatctaaattttttatgaccaaatgtatttttggttacaacacttgtgaggactacaactaaattagtgataacttgtatttaaatactannntttagtcacaaataatattttgttatgactaaaaatcacatttagttataaaaaaattatgttgtgactaaaatgttatcattaaaggtgattttttttgtagtgaaaggacattatcctttctattaaaatttgaatgggttgtttctcgtaggaaaagttattctagttctaaagcttcataatctcaagattgagtcaaatctgacacatacttcttcagcctcgcaacatgagagacatta

SEQ ID NO: 98037 - DNA, 665 bp, Cannabis sativa
agtccattgttttgtgtgccaagacctttgactactcacaagaccaatagagattcctattcataacaaaatgacaactgaagacaacaaatcattcagacgatagagattcctctagccaactgaaaaatttttgtgtttgcagttatgaataattaaaaaaaagtcaggaatcctagagattccctttctagggaatgatgtaattaaagttttaacattttctattcgtagaggccctatatatatggcctctcattttcagttgtacacacaagtttagataataaaaatttcatctatctttctaaaaatgtcttttactgatgcaacaaaataagtcagtaaaagttccttaatatgtcaggtcgaagctccttccccttcaccatttttcttcttcttttttcttattctttttcttctttcttcttcttcttctctgattctccatcaccaaacacaaccatctttacatctatctccaccaccaaacaccaccacctttctttcctttctttctctttctaaatttctctctctctctccactacaagaaatatcaaaatgtgctggcaaaagttagtattgcactggtaaaatagaatttacttgtaatgcgttggcaaaagggggttggcaatcaatgttggtattaaaacttt

SEQ ID NO: 98038 - DNA, 855 bp, Cannabis sativa
  modified_base (825)..(830): a, c, t, g, unknown or other
aaaaagaaaactatcatctgcaaataaaaggtgcgaaactgatggtgcacttcggggaacagctaagcctttgaggtgtccaatggattcctcatattgtaagagacatgagagaccttcagagaatattaagaataagcacggagacaatgtatcaccttgacggagccccctctgaggaataaccgagccagtttcttctccatttatgagaaatgaaagagaagtagagtgtaaacacgtcatgataagagaaatccatctaatgttgaagcccattttccccataaccgcagcaatgtatgaccattcaacacgatcgaaggcttcactcatgtccgattttaaagttgcatatcccttagagcctctacttctatgctttaagatatgaatcatttcaaaagctactaagacattatctgtaatcaatctatgtggaaggaaagcactttgagtctcgagatgcatggtgaagcacattcttaagccaagaacaatgcacttggaaaccaacttgtaaacaacattgcacaaactaataggcctaaaatccttcatagtctttggctttttgatctttggaattaaagtaattagggtcttagtaaaggcattagggttagcaccattatttaagacttccaaaacaacttctgtaaccaaagagccaacaatatcccagttatgttggtagaacatggcagacataccatctaataccggacttttatcccctcccattattttcaaagccataagaacatcatccttagaaaaatcttggagcaagtaggcattatgtttgtaaagcccgcttagttnnnnnngaaattagcagttaattttgattaa

SEQ ID NO: 98039 - DNA, 2205 bp, Cannabis sativa
tgtgggcatggcactctttcactaagggtttcaaatgtgaagaacaatgaaggaggtgaaatcattaaggaaggagctctctaatctagattggttgaatagtcaagttaacattagttggatgagtgagagcatcatgtttcttttatagtgtttcaactagggcttagaaaaagaataaaatattgggcaaaaatcacatatggttgtacacttaaagtgaaccactttctagttacaattttgccactttattccaaccagttattcttctttcaataataccatattttccaattcaatcatataaatgccaaaacattttatttagtaattataattaattatcaaataaaattgtcatttatataatttattcattagaccatacaaagtctcttaattaacaaattgaccttaaaacctcttttcttcacaattaagcccttacttagtcaaaattcataaataagacatagtctaatatcagaattataattgattatctaaaataaatttactgagtctacaagcagtactatctcaactaattctaccttgtctatatattccttcgtgcataatttacggcggtttatgcttagaaaatacttgtcaaatcctccctggttgctttaggacatgcgactcaggctgggggtacgaaagatgcaggagggtatgttacctcttcctcatgtactggcccccagtggccccacgtcggggtaggtggcagcgaatctctttgagatctctacttctgcgggcagagggtcagggtggcatgacacccattcagagcgcatgacgtggtcatttttggctatgttggtatttataacagccaagttgacagcgattgcttactcacctccttggtaggttgaagctgccccctcaaggctggcagtgtcaatgctctggaacttactgatcggaaccgacctacgaaggtgctcagttgtcactaagcctccaaccttcaattactctttggagaaggccctgtattggtcatctttccttgccatatctttcgttctaacactcggaaggagaagttttgctacaaagttaaaaaaatgttaattcacacacaagaattggcagaatccaaaaacgagcaaggcttgtaatgaactattaaaatacctaggagttggaagctcaattgaagggatggcaccatgcaggtagggaacccgaaggaaaagaacaaatattcctgaagatcgtgggtacggtccgttttgaaaataggacaataggagggtggctgtttatcctgtcagaaaaaccccagctttgacctatcaatcctcatgggattggccttaacacagtaaaagtaaaggatttctttcgcagaaggaacctctagtttattaattttgcagaacacgtaccaccgagccaagagtctgtaagatgaacggatcagctggaagggcgcaatcccaattttttcaactaggctcgcaaagtaaatcctcaaaggcagatgaccacctctggaaatatgggacaaactccacacactaatggatgcaaattctccaaaaatggagaacctgtgccacatcaaactaggaacgttacagaggccagaaactttggagtacgcttttaacatcccataggattgaaagcaattggccttttgctccatatcccacacagattcaggggggacctgtgcttgcaaaggaaatcccattctcctggtgtttataggcaagctttcctcaacagtaggctcatcttcggggatagcttctaaatctccacaagctgaggcgttactatggggatttcgatttggtcttgtctcttggaaaatattttggcgacataaatagagtctcctatgatggatatagctacgtctgcaagggggacttcattcaaatccagggaagacagagtaaactttttggaggagtgaacggattaaaaggtgagattttttacgcagataatcttactgtactacccgagtacggtcttggccctaacctaagctaaaacgtttcttgccctaaaccaaaaaatgccaataaattaagatagggggttagtacacttacttgacgtaaaaaaaggagtagttggcgactccagtgttgggttttatgccctaaataaaactccttttcaatgtaatctttattctttaaatatcaataaagaaacataagtatt

SEQ ID NO: 98040 - DNA, 586 bp, Cannabis sativa
atgctacatttttcaggaacctttggtcaatgaatctaaatggaccaattcctccaaatattactatgttggccaacttaaacactctgtatgataacaaagaagtaatttcattttgtggtgttaagcattgatgttgtagtttaactaaatctatctctacactctaactcaaagttctactacatttttcgtgtgatgtgtaggaatgtgagccacaatggtttcagtgttgaaattctagcctttccttcttcctccatgttgacattagtgtaatttctctttcaattctactactttattgcactttaaaaaatagctttaagaacattcttaatatgcacagagttcggaataaaagttatgtaactatttaatcaatagctagtgatatatctcctcttaggggaatattatttaaacaagcttttgcaaacactttttactttaaattgttcttcatgtggatttgcaattacatgtttcaaacaagtattgactgtttgtttcatttttcatctcatgattaatttacattttcctaatagagctttgcgaagcaatgatcttagtgggtcatttc

SEQ ID NO: 98041 - DNA, 565 bp, Cannabis sativa
actatttttcttttcagcatatcaattgtatgtgtttttgaatgttaggagtttttctaacagctcaaaaaactctccagatcacctaattaatacaaacacccgttttataattggtaataactaaagactttatggtaattattcatgttcatatgagagtgaaaaaattctataaataatgatcattataattgttacattaagttgaaactactagttgtatggttagaactttgtaatatattcatcctaagacatgaggctacttgagccttgattaagcttattgtgtgttcttgagtgtttttattcttattctttttttattattttgtaatcttgatgtaatacatttctatatattttatgtatctcattgtataatcctccatattttttcttgtaatgagaaaatttctaacaatttaaaattctagaaagtaatatatgtacaattaggtatatatagtcattgtatctcattgtataggtattattatggaaccaaatacaagataactttttttattattctaatttgttagtggatggtaatatgatc

SEQ ID NO: 98042 - DNA, 5104 bp, Cannabis sativa
gtatgtatgccaacaaagtgaaaaagtaactgcccatttctgttttctatgttatacaaaagcctttttactcccttgcagtatgcaatgtgattggtacgtataagaaaaaaaaaacaagaacttgttttgagtaaatttatgtctctttcatggtttggattttgaaggaatcagaagagttaattcttgttttgttctttcacagcttgtatatgaaaagtaaagagtttgttggacctttcagattgtttggtgtgtggtcaggtatatggtgtaactcaatgtgcatataaagataggatttctcaatctatatattaagagagtgaattaggggataagttgagaagttggaaaatttgaggttctcaatctatgctttctcgccttctaatttggtggtggacttagatggacgtttcctctctggatcctaatagtgcgactgaaactgatcaattccctttgttaccggagcgaatggaaagtcatacaagtcgtgagcacacaattgacataactagaaatgatgatgcttcatcgagctcatctcatgatgatcatcatccaacaatgaatacagctccgcatgttgacagaccatctagcagtacaaatgtctccacttatcaagctacttcctcctccacaaaccgattaaacacaaggagttcttcgtttatgaggagaggtgacggatatggtcgtcgtcgaaggagccccttgaattctgcattatggatttcagtggagctatttgtcactgtgagtcagattatagcatctgtagttgttttatcgttatcaagagatgagaacccacaagccccattgtttgcatgggttgttggttatgcatctggctgtgttgcaatgcttcctatcctttactggcgttttcgtaaccgcaatcgtagtactcaacaagattctactcgacccgaacaaggctcttcacatagtaatcctcctgaactggcatcttatacagctatttttgttaatcaaccatcagacgtaggcaataatcaagcccctgaatcacccacaaggaataaccaaacaggagggtccttaagtacacggtacttgaattcattttggttgattatttgatcatggtttgtacttttctatcctttctgggattatgataaaccataaactaattataattcttattctgtagatttaatggctttgtggaccatttcaagatggcattggattgctttttcgctgtctggtttgtggtgggcaatgtgtggatttttggaggacactcctcccccgctgatgctcctaaattgtataggtacttcttgaaaactttactctttgtttttactggaaagaatgattgagttaactatgcattgtgtgctatacaggttgtgcatagtgttccttacctttagttgcataggatatgctatgcctttcatattgtgcgcaacaatatgttgctgcttgccttgcataatttctgtgctgggcattcgggaggatctttctcaaacaaggggagccaccgttgaaacgattaatgccctgccaacctacaagttcaagttaaagaagcatgaagatggtaatgaagatgagcttgattctggagttggtgaaggtgggatcttggcggcaggtacagaaaaggagcgtgaaatttctggggaagatgcggtaagtcaatatgctactcaacggtgaaaatcactacctaatcaaaattaagtttatcttatcaaaatctaatttaggttatgctaatatcagttaactgtattcgaggaagactactatcctaatgaatagcaatttagattattacaaactttttctcctcttaattctttatttgcatctgtctctgcaattgccaactgagatgttcttgtgtcttctctgtcaatgtgtactgcaggtttgctgtatatgcttggcaagatatgcagataacgacgagctgcgagaactaacatgtacccatgttttccatattgaatgcgtggacaaatggttaaaaatcaatgcatcatgccctctatgtaaagcagagcttactgagctcctcccaacttcaccggtggcaagagactccagctagcaatagggaggaaaagatgggcaatgggtcaccttcggtttaaacattaaaaaaaaaagcatggattttagtcccgatattctcgttctctgtaggaactgaaagtcagggattaggtacaacaaatgcaaatttcctggaaatccctgatactgtattgcagaggcaatacaagatagatgagaaaggctgtctctgattctaataagcttgggcccagaataaaacagggggggtatgcagaaagaacagttgtatctaagcttttcctatattgttaaagaagttgagtttctcctcaactctctccattttgacatttatagagctttgtgaaaattgacagggaacacgttttcacatgttgctgtctttccactgctacatctttaatcctatcgtggttggatgaacttttgatccttgtaagttgcaaatgtattatataatattattattattatgggtgaaaatgaagtcaagtccttgcaatttattttctgttgaaccaagtgatttattactgaaaatttgtacataaagcttcctctgttgatgcttatggcttaaaccaagttttggctaagtctccgtagccaaatgccagtcctataaaagagttaccttattcctttttagttgatttacatgaaatgactcattatgaaaaccagggtagaaaagtggattgtatttttctaataaaaaggtttagatagacagccatgatggattatataaaccatggcaaaattgcaaattattcaagataaaaaagctgcaaattgactaatttaaaagttccatggcaaaattgtttgacgtaataagctgtttgtacataccaattaagtcaataaaatgggcaaaatacaacacgctgaccggatctagaaccataaaaataaattaagaagaagaaaaaattcagctcatcctaagcaaacccaaaaacccgagaatcatcccgtctaagatgaaaagtgataaaattttgagaaaatgacagaaaattccaactctagaagcacaataaaaaagtatttatacacatttgcggaaggaatacattttcacagttgacgaggtagaactggggtttaaagaaaaactaatctgaagagcattggtaaaactggaatcaccagtaactcgttcgcgcagtccactccgaatgagctgcaacacccaacactggatgattgtttctcagcttggttagatccatgacagtaccccccggaaagcgcaactctaaaaatgttttaactgaacttttagcctcaatatcagagtcagatggtgagatctttaaatgcctctagctttccatttaacgcaagagaagaatctgcagttttcccagctaccaaatggtttccgttttctgagttgttactttggttgtacacagaattgggcatggcagagctgagtctgccccccaagtatgtggagtatggaaagtacttggcacattgctccttccatcctacaagaaaacaagtgtatgtaagttaggcaccatcaacacaattttccatgtgtcaattgtgagctttttggtactcactcgaagcagcatcatggtcaggaagaactgtttctaggagtttgtggactctgacacaatcttcaagtgtccattccccaataggcccaagtgctccatttctgcaatgaataatacatgtcaagcaaaaatgaaactcctcaaagcaacatacaacatttattaccttggcaccggattgtttgttgcctcttcaattagcttaacagcctcagctttcttgtcaggctgtaaagtatacagtagttcggcagcagcagctctatgcattaaggaatctgcaggaagccggggaaaagtttagccaaaacagcactagacatgatgaactatgcactgaattgaattgaataagtttgacgacaatccacctttatgtttctctaagaaaatcttgttggcctcgatcagagatttctcatgcaaaccactattaaaaaagaaaataaacagttaatttaatattaaatatgtataggcacaaaaaagagaaagtatagagtagagaaagaaccttattgtcgggcgttctgcttccaagacacttgaaatgagtttttcagcatctgtaacaggagtgggcatcgagtccactttatggaagaatttaatctacatttaagcagtttaacaataagttcaaggggaataaacaaatcatcaaaaactgataaggacatgtacaaacaccatggccatatataacagagatacatactaaacagcgatgtgtatctgggtgttcggcattcaacctcagtagttgctttacagcctacagtccaaagacaaattaatcatcaattgaccttttatgcacctcaagagaaaaagaggagtcaaaatgcaagcttctcagctgcatgcttaaaaaaaaagcttacctgaaaagcaagcaaaatcttttgttttctcacattaacttcaaaagaaagcaagtgagtttctaacgagttaggagagttcttttgaagcaacttcaagtactttgtagcttctgaaagtggatcttccacctgaataaacacataaatatcagacagggcaacactcttcctagagatgtacaataacgaaaatggaaaacatggttcaggaagctaataaataaataaagtcacacagaacctgcaacaatttctccccatggggatctggatcaacaggtttcacatttcgtttcccagtctttgagacactattggcattggattcttcatttttaacttcggcctcctgaaagaatgctcaacgttaggatggaaatgaattgtagaagaatggtcagaaaagctacagaagtcaaaaacattactttcttcgcccgagcttctgcttttctcaatttttgcctcattttctttttctgggaaggagccagcttggacatctcatcgtcttcctcagtggttgactttgga

SEQ ID NO: 98043 - DNA, 1807 bp, Cannabis sativa
aactaagcgggctttacaaaacccaacaagtcctcctacagttcctcccccgcaagctcaagccgctttagttcctgctgtgttagcagaacaacctgttgttggcaatcgtatggagccactgtacaagaggtttcgcaagcaggcacctccagtgtttctgggaggtctggatgtaatgaagtatgagcagtggctcatggtgatagaaagaacttcgaattttatggtggtcgttggaaatgatcgggttacttgtgctacttttcatttccaggaagacgcgctcatgtggttggaattggtgtccctcacccgagacatcactattatgacctgtgaagagtttcgagagctattcaacgctaagtattataacgaagaagtctgcagtgctaagcgaaaagaatttatcgagctggtgtagagtgagggtatgtgagttacgttacagaatatacgacaaaattttatcgtctggccaagttagcttcgggtattgtacctacagacttcaacaagaaggagaaatattaggcaggtctaaatgtgaaaattagacacgaccttgtgattactactaatgaagcgacgttagatgcaaagatggttaaaaaggctctacgagcagaaggtgcggtaaaatttctttaggaaccccgagtgactccgagtgttggtgggacccccactgttcctactcctgtttatggtatggatggtggtgattccaccactgatcaaaaaaagaaaggctaacccgacatctggtggttcgagacagagcaagcagttccatgggaaccaaggcagaggttgacaccagggttattcttaccttgagtgcccacattgtaagaaacatcatctgggagagtgcaaccggaagacatgcttcaagtgtggcatggtggggcatttcaggaaagattgccctaagtcaaagaaggaagagcagaagccaaaggcaaaacccgtacctgctcgggtgtttgtcatcactcaagctgatgctgcatctagtccttctgtcgtgataggtcagcttcttgttaacaactcatattttactatgttatttgactcgggagctacacactcatatgtggcaacacaggtaattaatctattgggtaattgtgattttatcgaaagagggtttggaaccctattgcctagcgtggagttggttatgtccagtaggcgaatgaggtctatgccagttaagattgaagataaggagttgagtgctgacccagtagagctagaattagtagaatttgatatcatacttggaatggatttcctgtccaagtattaggccagcattgattgtaagcgaaaaatggtaacctttcagccggagggtgacgatccatttatttatgttggatctgttcatgggtctcgaatcccgattattttagtcttaagggctagagatttactacacaatggatgtttagtatttttagcaattgtgattaactccaatagacctgaaacatttgggcctaaagtagttagggttgttaaagaatttctcgacgtatttcccgaggagctgccgggattactgccccaatgagaaatagattttgtaattgacttggcacctagagttcaacctgtttcgaaagcaccatatagagtggctccagcggaactcaaggagttaaaaacacaacttccttgatttagggttgctcttaaatttgagtaattttcaaaatatattttattttattttaaaaatgcatttcttaaatgcagaaaattttggatattatttgaaaaatagattaaa

SEQ ID NO: 98044 - DNA, 1792 bp, Cannabis sativa
gtaacggtaatcacatttaatggagtaactcattagatgcggaagtgacagagtatattggtaacttgctgactataaagtcttacacgagataaagatatacaaactgttgcctcatgtgttaaccaggaaccatacgacattggatgcgcaaggcgagacatcaactctattacacctgggaagacgaaagcaaggtataatgactatgaaaacacttagcgtataatatacaaactacatataacagttgggtgaacttaaataactaatagcgaggtgcctatctcgctataggagggcatgctcctgttacgatcaccaatcattttcagacacctttcagtgagacttatagtcttgacaagtcagaagctgacattcgaatgatggccgctgaagtactctttttgtcgtaaagaactatgactgtcaaaatgaagtgttatgccttcaagcaaagaaagaacgaggtgcacgtcatcaacctcgaaaagatgggagaaaaagctccaactcgttatcgaggtcattgggtttatattgtaaacacttatattatcctaatacttgtccaaagggccaatacaactgactcatggatcagggattattaatgcccgaaccacgtaaaaattatttgtctattatttgctattttatttctttcttaagctcgggtttattagtttttgaaagtctcggtaaacaactatatataaggatatatagtatcataaataacaacgattaaatagtttaacaagccaataaatagaaaaattaaagagaaaatagaattggttttttctcaaccctattctatctctctctcttctcacatgcccacactactcaaagtatgtgtgagatcaaaaaccttaatctcattacagtgtctcatgaattgaatacatactgtaatacccaaatatgttcatcctataagatctaatagcccactctattcttgagtgttgaggctaacttggaagatcaaggtttggattcttcaatcaagttcttggattggatgtttgattgttatacaaaaacaataaaggatacactgataggtatcaagcggtaattaattttctttcagtagtttagatttaatctatatacattatgttaagatccttagacttatagttcatattagataaaaattgttttatcaaaattttgcttttgcttttataactctagtatagaccataaaaaccaacacctagcgcactagaccatttgtcaacctggccactgggcactcattcctgagatcttgttttgatacttccaaggttcttgaacttgaggacgaggtctcctaccctatttttgaccaatctggatccattggttgaatcaaattcgacatttgagcaattaaaagcaacgccccaggttaattgtcaacctgggtgctaggccttgtttccaggagctcatgcttgtagttttcaccctgagtttgcttgaatctttattatttctgatgaagaaaaaaaatgcctaaaacacttcttcgtgaacttgattagaaatagtccgggttgacgatatgttaacttgggcgttgggacattgccaggtgtcaacctgggcgtttggcccaatttcaggtgtcaacttgggcgctgggcctagtaccaggtgtaggcgttgggtcctagttatggcccttcaaatgtagtgtttggtccctagaaatagtcgaatcttaatcttttctaaaagcaaagaagatgctcatgttgacaaaatgtcaacctgggcattgggcctt

SEQ ID NO: 98045 - DNA, 1273 bp, Cannabis sativa
ttaaatttttgaacacaaacttactaaaattaaaaaaataggcacactttatattcatacccattatacacttctctcttctcttctcttttaacttcaacatccatactttgtattcccatctatactgatagtggtccgatgatggcccgatcaggttagaaaaagattgaagagaaaggcatatgaagatgttgtgcccatgccagtgactccaaaactgttctcagccacattcaaaaatcccaagttgaagaactcacatcctttgtgtgattagaaaacttctttatattgttgtgtagccatgttctcctgcccaatgccaatgatcatctctacatgtctcactgactattctttaaaaataaataaataaataaacttattttcttaaaaaaatacaggtcgggtcacccctctatactcattacaaataaaatgaataaacagttgcattctactaaacatattgctaatcttcataactgtcctccttgcatttatcaaaacaaaaaaagttatcattcatttcaaataacaactttgctaaagtaatttttgaccttattcatttggacatttggggaccctatcccttaccttccattgaaggatacaagtatttttttttaaccattgtggatgatcattcaagataaacatggttatacttactcagggtaaaatctggtgccccactaatcattcgaaaaaatttcacctatgtgaaagtacactacaaaatagatatgaaagttgttagaacagacaatgccaaggaattaactcttaccaatttctatgccagcaaaggagtcctaaaccaccattcttgtgttggaagaccccaatagaatgttgttatggaaagaaaatactagcacatcttgactgttgctcgagccttagcattccaatcaaaccttcccctatcatattggggatacatggtcaaaactgcaacatatctcatcaatagaacaccctctgtcctattgaatgacaaaacatcttatgtactgttgcacaacaaaatcccccagtatagccacttaaaaaactttggatgtttagcatatacttcccatgttcacactccaaaaaagttttcagcaagggctcgagcatgcattttcatagggtaccccgatagcatgagagcatacatattccttgatatttaaacaaataacaactttcaatcaagggatgtcatattctatgaatctattttccctcttctctggggtactcacaacaatcacagtca

SEQ ID NO: 98046 - DNA, 1068 bp, Cannabis sativa
aaaaaactaaaactaaaaaaatggtagccgtataaattaatattaccattcttaaagtttttgcaaatgaattcttcaggtctctttttcttcattctccatagttgttttatgagatctattactacaaggttagtttttttttaattgattttattacttttcagtgcaatattaaatagaatgtaggtacaaacttccattttatttagtttttgtataggcttatatccatggaatgatggaaaataattgttttgggaaaaacatattttttaagtacatgactaataagaaattaattttataatttctttaatgctatctctcttgaatggagtattgtaagtgaggccatccacttttaatttctacttataaagaagtagcaagtccgggtaagaaaaaagattttttaatttttcgttaatgataaataatgttagaaaattctataatgcactcctttaaaaaagatgtactaatacatctctatccgttttagtatccgaaataattttttagataaattttttctcatggtcatgtaaattatagttatttaagacaaactataaaatttttaaaaattcaaaaaaatttaacaagccgaagattacgttcaaacagtttgttgcacgcgtgattattttattttatacatatgtaaaatagactatttgaacattaatttttatattgtaaattattccgaatttctcaaaattttataggatatcttaaatagtcataacgtacatgaatgtaaaaaaaaaaaaatgtgactaaaaaattcttcaagatgtcgaaacaagtaaagggtgcatcaatacatccccttttataagggatgctttaattgtagaatcacccaataatattaatggagatgtgatattttagttttgcttaataatattggaactactgattagagtaggaatgactattttttgtctcttttcttttttgctaacactttttgaggttatttactttagtagttttgcaatgatgaatatttgcttttttgcgcgaatgaaattgatttttttatgctacaaactt

SEQ ID NO: 98047 - DNA, 622 bp, Cannabis sativa
  modified_base (29)..(34): a, c, t, g, unknown or other
tgaggtaatttttctaataataataatannnnnnataataataataataataaacaacctaaatctttgaaatctcaaaaccacccattcttctccatcaatggcaccaccaagaaacgagaaattccattgcacacttgaaatcactcaaaccccctaccgacaacaccaacactatttcatgtgcctccaattaatcgatcaaacccaatatacatagtaacttctatgaaattagttatcattttcttctaaactattaacagacaacaattcgaagaaaaaaaaaacgaaacaaaaaaagtactctactttttcaatctaatatatgtgaatcatcttcctatttcttcaaaactatcaccggttctatcatcacatagcatcaagcacccattctaacaatcatagctaggatatcaaatatgttcgcaacatagaaaagggtgttctctcattacggtagtattacttcttcttccatatgaaccgtagaagtgttaaattagatctcactgtaatatttattattactgtgttacaagatgaagtgaaaaaaaaaatacagataaaatacaaacagaatacaacagaaaagagatcctatgtggctttgcctcta

SEQ ID NO: 98048 - DNA, 2324 bp, Cannabis sativa
ccccctcaagatggaccatagatatcatgaatggccatcttggagagatgagtattgaggatggtagatgggagaggcttggtgaaggcgtcagcgagttgtagattgctgctaacagggatcaatctaatggcagacttggtgattttttcacgaatgaagtgacaatctagttcgatgtgcttggtgcgttcgtgaaaggttggattattggcgatgtggatcgccgattggttatcacagtaaatgaaagcaggggtaggttgatcgatgtgaaggtcttgtagtaggtattgtatccatgttatctcacttgtggtagaagccaaagcgcggtattcaacttcagctgaacttctagagaccgttggttgtttctttgttttccaagagatgaggcaatcgccaataaaaatgcaatagcctgttatagatcgacgagtgattgaacaagttgcccaatcggagtcagaaaatcctcggagatggagggatgatgttgaagagtataaaatgccttggccaggtgaccctttgaggtagcgaagaagatgatgtaaagctgtcaaatgtgtagtgcgagggcaagacatgaattggctgagagtgttgacggcaaatgtgatgtcgggccgagaaagagtcaagtataggaggcgaccaatgagttgtctatagtgagatggattatcgagagggtccccatcttgatcattgagtcgtagtcttggatccatgggagctttggcaggtttgctgttggtgtatcccgtatcggcaagtaattgaagtgtatacttgcgttgtgagagaaaaagattggaattagctcttgcaatctcaaaaccaagaaaatacttaagtggtccaagagtcttaagcttgaatctgagctggagtgcgtcttgtaactgatgtaaaatgttcaagttaggaccgacaaggataatgtcatccacgtaaacaagaagcactacaaatgtgttttgtgttcctcgagtgaaaagggtgtagtcggcttgtgattgagtaaaaccttcttcaagaagagcgtcggtgagtttcttataccattgtcttgaggattggcgaagtccatagatggatttatgaagtttgcatacaaggttgtcacccgatatagaagggggaagttggagtccttggggtatttgcatgtaaacttcctcatccaaatcaccattgaggaaggcattgttgatgtcgagttgtaaagtgaaccattgtttaatagtgacaatggcaagtaggagtttgaaggtgaccatcttagctacgggtgagaaggtgtcaaaaaaatccaagccttcttgttgagtgtatccttgagcgacaagacgagctttcaatcgttcgacacttccatcactgttgtacttgattttgtacacccatttacatcctatggcgcgtttgttaggaggaagaggcaccacggaccaagtcttgttggtgatgagtgcaaggagttcattgtccatggcttggagccatttcttgaattgaatggcttgtttgtaattctgaggttcgaactcggctgtaactgcaagaataaacattttgtaagccttggaaagtttggagtaagaaacatattttgataaaggataagaagtggaagtgttatcttccagcaggttgtaacactcgaaatcctgtaggtaattaggtggccgtgacactctagaagatcttctaggcacgggttctggagcagtggatgaatcgggtggaccaggtggttcttcatgtcgttgtgtatcaggtcctggtgtgttggctgcaatatcttgcagaatagattcagtagaagcctgttgttgagcatcaggtcctggtgtgttggctgcaatatcttgcagaagagattcagaggaggccggttgttgagaagcaagttctggtgtgatttctgcaatatcctgcagaaaagagtcagcagaaaccagactgggatactcatcaatatgtgtatttgtaatatgtttattcggtagaataagaggtaaaaaaggatcaacattattaccactaggattaagtttatgaaagggaaaaacatgttcatgaaagactacatttcgagatataaaaatttgtttagaatttaaatcatataaacgatatcctttaactccccttggatatcccaaaaacacgcatgttcttgcccgaggttcaaactttgttcgatgagaagtaatggttgatgcaaaagcaaggcaaccgaaacatcttaagtcatcatattcgggttgtttcccaaacaaaatttcataaggcgttttgttcttgagatt

SEQ ID NO: 98049 - DNA, 741 bp, Cannabis sativa
  modified_base (561)..(573): a, c, t, g, unknown or other
tgtcttttttatatgtctaacattgagtaatagtagaatatatatatattcacagtacagtaagaatattgaagatttttggtgatgaaaaatctcgtaaaatcgctatacaatatggcatatttaaaaatactaatagaaaataaaaaatacataccttattaatcataaccataccaatagtttgatgctcttcctaatcccatacgataattttttttcttttaaaaaaaaaatcaagctctaaaatatatattgttatggtatatatgtgatagtctttaggtttttttcatgttattcaacaatagtaatagtaggatatacatataatatatatatagtatggtagggctggccctgaaaatatatgggtccaagacgaattaaattttgggaccctcaaaaatatataaaaagattagtgttataggatttgaactcatgaccttggacattatgcgatccacttcaaccaactaagctatgaatatttgttgcttataatacacttaaattttacttaaataatagcataatattttttttatttttttattnnnnnnnnnnnnnaagtgtgggccctaggcacgggcctaacccgcctatgcctagggtcgaccctgtagtatggcaagaacggtgaaaagatgaatagtctcataaatatatacaaagaatataaatagtttttatttttaatggtagaattcaaatagttaatacatatgttataatgtt

SEQ ID NO: 98050 - DNA, 1062 bp, Cannabis sativa
  modified_base (819)..(825): a, c, t, g, unknown or other
  modified_base (1027)..(1030): a, c, t, g, unknown or other
cgctcttccgatctttgtgagtagatctaagatcttggtaaaataatttccaagagagataacttttccaagtttcacaatgagttagggactaaagattgtcctgtttgcaactctgaagaggagagccatagtcatttatttttcaggtgcagatactcaagaactgttgtgcagcgaatctttaactggtgtgggtatttggcgtggcctttggactttaatggctggttatgttggctgtctagtaaaaatactggtataatcattcttgtaattgctgtcacaatttatatgatttggaagaatagaaaccattgtgtctataatgatagttgttatactgtgttgaaaactgtaaaggatattaaagatatagttcattacaggttgtatagcatgaaggataggaaagttgtgcttgctgaaaaaggcttatttttacgccttattcagtagaggtttatttggctgctataggccggctgtagaggttttttgggttgttttggggctggtttttgtagccttggtgtatttggttggttttgattaatgaattcttctctttagtcaaaaaaaataatatttaagtcaaactcatctttttttatcttttttttttgccaaagaatttattttattagttttttttttcaaccgatggaacaatctgagtccatatgatgtgaaaatgagagaattttctaattaaacacaaaaattaagcataacaattcaaattttcttaatattatccattcatgggtaatagccattaagagtgcacccatagatttatatatattgattgatatnnnnnnnatgtatataaacgaaatttatgattaattatacttgatttaaattttaatactttttttaaaatttagtttttttaattttctttctaactaactttttttttaaatattttatatttttataaaaaaattaaaataatagtaagatatcaatttgtaaattaatgcttttttttacagaaaaattattaaaataatagtannnnatcaatttgtagatttatgctttaataaaata

SEQ ID NO: 98051 - DNA, 500 bp, Cannabis sativa
ttataacatcgtcctggtaaatttttgaaaaatttaaaataatttatagtgtcaaaaataagtttaaaattttttaaatacgtgtggtaaattaaaatatcaagaagtactctattattgtatggtaaaaaaaattacgtgtttgatattataactataacaaatatcatcataataaaaactagaaaaatattccagcaacaattttcggacatgaaagttgaaaaagagattgaaataggtgattgatagtagcatatatttatttggttaggaaaaaaaagtttgtactagaagaaaaaaaatgagaggatctcaccaaaatatttaaattttatttttactactataaattatttagattttttaaaaaattgattgatgatcttaaataataattacgacatacaccattataaaaaattagactaaatatttctcctaaataccaaaaaaaataataataaaaaaaagacaattctacaatgtaccccttaaaa

SEQ ID NO: 98052 - DNA, 768 bp, Cannabis sativa
gaaagagataaagaatgagtagtcagcctttgccccagaaccttccaagaaggtgaaaaacgaggaacctcccattgtattcatggaggaagacgagaaaaacttgaggtatcctcacgtggatccattggtgattaccatacaactcgccaataaaaggatcaagagggtgttaatagacaatgggagctcggtaaatatcctttataaggagactactaaaaatgggcctcgaaaaagccaaattaagtccttgtatggtaaacctttgcggattcaccagggacagcattaccaatcttggcataatcgagctcgcattaaccttaggtgaggcaccgttatctgctactgttatgcaagacttcttatttttcaaccttccatctgcttataacatattgttgggtcgtccagcactgatcagagtagtagcagtcagttcgatcaagcacctatccttgaaattacaaacaccagatggcgtgggagtggtgcgtggttaccagatgttggctcgcaattgctaacgtatagagctgcagcataggaaagtcggtcatcagttgatggcgatcttgaaagaagaaactgaaaagaaagacaaagatcttgacccccgagttcaagatgagagaaaccttttaaaaccaattgaggaattataagaggttattcgatctaggaaatcccacaaagtgtgcatacattgggaagaacctggacgagcagctcaaatagcacctaataagctttttgaaggtgaac

SEQ ID NO: 98053 - DNA, 543 bp, Cannabis sativa
ggtacttcttgtacctttttatatgtctctttttaattcaaattatgctatataatgactatatatatagtagtctatatatatgaacaactaagttatcactgaatgtgattgagtgtttcatgaatcatgatcagtttcatattattattgcaagagtaaggtttactatttatagttcgatcatattaatttattgattaatgttgaaaacatatttagaggcatgtatacgtaccaatttgttaagttcagtatcattaattatatacttttttcacaattaaataacctttaaacaatatacataaaaggaaatagaagagggaaatctatataaaaaaattatatatatttcatgaattcatttacattttagccaccataactagaataagatctcttgagttttataccctaaataaaaccattcaatataactttattatttaggttaattagtaatttttttcccctaaactttgatatgtaccaaatcctaccccctgaactttattggcggttaaaaattccccctgaact

SEQ ID NO: 98054 - DNA, 749 bp, Cannabis sativa
ggtcactaacctcttgctgatgatgtgtggcagatggggctccaagggaaagttgagaagcaggtacctgttcaatatcagcaagaacataatattttagttgagtgtatttagtgaactgtatgattggaagctgagaccactattacttctttttctggtgcataattattaagaaaaccagctttgaaaggaaattcctcttcattgaatgtaacatttctagagatatagactcttcccgttgaacttaagcacttgtaacctttgtgagagtcactataccctagactgacacattttaatgagtgaaactgaaacttactggtttgataaggtcttagacatggaaaacacgctgaaccaaatactttgagaaaagcataatcatgtttcttgttgaaagtgtctcaaaaggtaatttatggtgcaatatgggagttggcagtctatttataagatagactgctgtttgaaaagcatctacccaatatttcaatggcatactagcctgagccaaaagagttaaccccatttcgactatgtgcttatattttcgtttagctctaccattttgggctgagatgtgaggacatgagtgaacaaattgaattccatgttctatgataatgtcagagaacgattgatatttcccaccccagtcagttctaagtgtcttaatggtctctttaaactgattttcaacaagaactttgaactatagtaaggcttctaaggcttcgaatttt

SEQ ID NO: 98055 - DNA, 673 bp, Cannabis sativa
tttttctcagacatcagttatttatttttattaaggaaaaaccaagataattgaattagaaaaacaacaaacaagataatccacccaattaaagatagtacatatactgtcaaaaaagaaaagatagtatacatattttgtttggtgtgtgagtttaatttctacatctacaacactggttttggttgtcaaagtgtcaatatatttatacaacaataaatgacacaactggaacaaaatttacatcaaaatgctcatggtgtaataggaccatagtttggcacccttccaaagccataagccttctttaccactcatgggcattcatgtaagtatgttggacagttggcactttaaaggtaagcaatgtgaattgtgaataaaagtttaagagtgaaaaatgaagaatgaaatctgtgtgaaagagctcagcacttcttaataagctagctgattatttatattgattaaccatcatagagttacaattacaagagctagttaaagatcacaccagtgaaaataaatactaagttctacatacttgtttttaaagtaatttaatttgaattagatagtagttgatacttaattacactaataatatataataccaaactaaccaacaaaatattggttcttacatgcattaataggaccttataatctatat

SEQ ID NO: 98056 - DNA, 842 bp, Cannabis sativa
aattggaatgtttcccaacttgatgtcacaaatgttttcttaaatggccctctcactgagacagtgtacatgagccagccccctggttttgaagataaagagcatcctacctttgtatgcaagctgcagaaggccatttacggtcttaaacaagcacctcgcgcctggaatgacaaattaaggcaaactcttgtctcatggggatttcaaggatcaagagctgatagctctttatttgtttatggatcaggtccaacatagtcatttttctggtctacgtagatgacattcttgtcacagggcctaactctaggcttatacagaagctcattgctgacttgaacaagagtttcgctttgaaagatcttggacaggtccactattttttaggggtggagatttatcgagattatacaggaatgtacttgtctcaaaccaagtacattactgaccttttagtgaagctaaatatggaaggagccaaagcctgtccaaatctagccagtgcaacaacaaaactgtcattacgagagggggaacctttttcagatattacattgtacaagagtacaatcggtgccttgcaatagttgtcattaactcatcctgatgttgcttttatagtgaataagttgagccagtttttacaagctccaacatccgttcactcggatggttgcaaaaagcttctcaggtatctcaaaggcacaataaaagagggtattcatctgcgacctgcatctggtttacatctttatgcttattctgatgatgactgggcatcgtgcattgatgttcgccgatctacaggaggttatttagttttcttgggtgacaacttg

SEQ ID NO: 98057 - DNA, 667 bp, Cannabis sativa
ttggtgtttcacttcttaacataggctttggcataaagggggaagaataatagttgcttggaatccgttgagctttgaagtaaatattatctcttgttctagccaagctatgcatctatttgttgtctccacagataaaaggaatcattgctttgtcacttttgtctatggtttcaataatgaggagggaagacttaaactttggcaagaattgatgctctacaaaacttatgtaccatgggtagttcttggggattttaatgatatccttgagagagatgaaaggataggggctcgggtaaagtacaatccttcttccttcaaggattgtattgttgcttgtaaccttgaagatgtcaaatttggtggtagttttttcacttggaacaacaaacaaaaaggtgaggatcggatatactctaaaattgataaagtaatggcaaaccgaagttggatggattcttttcctattgctgaagcactctttcttaatgaggggttatttgatcatactcctgctctgcttacggtttatccttccattcctagcggtaggaaaccgtttaagtatttcaggatgtggtcaagtcacccccattatcagcaacaggtgtgttaggctaaaattagtctaagtttcgggtcatattttcggttagttttcact

SEQ ID NO: 98058 - DNA, 845 bp, Cannabis sativa
acattctacttttgatatatcttcatttatttgctacaatgtatgcttacgggtattgtacactacaagaaaattatatctcgacggtctagagagcccccgtaatagaactatctcgacggttattgaacgctgaggaactgaccctcgagatagggtgtgtcaacttcacatggtttgagcaatttcgatacctggaactgccgagatagatactaatctcgacactttgaaaccaccgaaatattaggtcaattacgggggagaaaatataatttttttttttaaaatttgtccctgcgcgcattgatagtattgattatttggatgtattctcaatatatacaaagaaaagtagtacaatattatctaataaaatttattatacatagtaaatagtaagtatatatacatatacaattagttttaaatataaatctatataactaagattataattgctatagtaaaaaataaaatagaaaaactatgctcgcaaatactcattacagtagttgattcattttttacatacatatatagtcatgttaatctcattcattgtatagtcttaccattatactgcaatataagtgtaaaacaattttaaactttacgctagttttcttgataattcaaaatttatcaaatttaaaataatgtattaaaataaagaaaaaaaaaattaccttgagcagagacaatataaggaggggttctcgcaatattatattccgtagatttttgtattttgatttttttagttgtaaaacagagaaaaacagaaatggaaaaatgacttttattgatcaaagagttttgtacaatcggttgctttgtataga

SEQ ID NO: 98059 - DNA, 728 bp, Cannabis sativa
cagggtaaccgtggtttgtgcttaaaggcttgggaccacttatgccttctcaaataaagaggtggccttggcttccgaaagtccatggaattgaatcaagctttactggcaaaatggggatgggctcttcttacagatgaacagacgctctgttgcagggtgttaagggcgaagtatttgaagagcaagccgtttcttgaggcaacctataaaagttctgactcttggttatggaagaacgtggtcaaatctaaagtgattctcagaaaaggggcttgcaaacttgtctcgaatggggaagatacgaatatttggtcggatccttgggttgtccatggggaagatttctatccgaaacctaatacgtctcgtcctaagagagcgtttaaggtggcagatctgcttaactttaatggggattgggacattgccatgctcaagtccctgtttgactctgctactattgccaacatctttaaagggggaagaccttatggccaggggagtgacagatggatatggatgaaggatgtgagtggtaatttcaccacaaagtctgcttatttattgcaggctctcggagagagcccctgcctgtgtggttgcgccgaccttgttgaacaaacgttgggactccaaaatcttagaaatacataaggttctttggtggagtatcctctcgaatgctctgccagtccatggtctccttgctaggagaatccccattg

SEQ ID NO: 98060 - DNA, 620 bp, Cannabis sativa
gtttctagttgaaatttactcttttatgttattataggtgatctggaaggtatggttaagtttgggtacgaattgtgcaagtttttggatttggtgggttttcttgtgtaaaccagacctgtacacaagcaggatcctcaaaaaatctattttgctaattcgtgttatttttcagagccttagttttttttcctcgataattagaatattatcatgttaattatcgatagcgaaacttgtagttgtaagtttaggtcccaagttcgggttttagcgtgttatttacccatttgtgtaaatatgacatagggcatccatccagcgcatgattttctatttagttcggccagcacacttgaattcggaaacgagataagaatagcatagaacgtatttatataagaatatgtgtatgtgtaatatatgcatgctgtttatgattcgtatactaccaatactagtacgatagcggtactaagtgcattggtatattgtatgatgttcaaagagtacaatacggtattaccaacactagtacggttgagtatggagtgtatgtggcacaatacttagtggtcattgaggtacggtgcaaacctaccaatactcgtacagtagcg

SEQ ID NO: 98061 - DNA, 779 bp, Cannabis sativa
aagaaccaacttgtggttaggaagcaatagtggtcaaaaaatttggaaaccaggaggcttgaactcatttgagattgaccaaggaagcacctcatgtttgaaaaaacaaaaaaccttttccctatagccccactgagtatggggcatccagaacctataaagcctcgcgttaaagctaactggccttgagtaagagtattcctgaaaacgaacataatgaaaatttaagggggacttacgagcggtggaagtactagctctgagggtcccagaattcaaaactagaaaggggaaacactctaggtctaactgtcctgatatgtacaatcttgatatactcatatttattgctgctcagccttagctttgcccttacctacacatgtaaacaatagatgtgagtcaatgactcagtaagaaaagcataaccataacataaacttaaattggattacgatacacccaatcataaccctatcccacatcccacgcatactgagtctagaatatttgtatgccagtaatattgatcataatataccaacctattctcggtactctaatcgtaccgatgtgatagcgtcaatcaatactcatgtcaaacatacattcatctgtatccaatataactctatgtatactaatatcgctatctcaatatgttatccaataggctttcataaacatgcacgctatacatgtaattacatatgcatatcattatactaatcttaccttgattctgaatttaggtctgtcggtcaacctgagtggaactg

SEQ ID NO: 98062 - DNA, 648 bp, Cannabis sativa
gtggtggtgagtataggccatttgagagagttttaagtgatccaggtattaaatttcaaaagccttatccacattctcatgagcaaaatagagggggtggaatgcaaacatcgacacattagtgaaactggtttaactttgcttgccaaatctggtttagatatgccatactggttgtatgcatttcaataatgaatccatttggatgcttgcttccttataatcatcataagatggagttcaggtcagaagaatgtatcttcctgggatattcttctaagaacaaagggtacctgtgtgagaatgcaacatgccaagtttttatggctcgcaatgtaattttaatgagtcatattatccagtttctgtcacttcatccacttctacatctcagataccttctcttttgactccttgtcctactgctacatttcatacaatcctgtaattatggcacaaatttatcttcttcatcttctcatgttgatgcttgctcatgatgatggtatccttgagtctcactctaatgctgcttatgatgcctatagtggccaaaaattgctctaagcccaacgaaaaaggcccaacgatcgaagtacttacgaagcccacttataagtcagaaacaaggaacccgtaagcccaatg

SEQ ID NO: 98063 - DNA, 1061 bp, Cannabis sativa
  modified_base (389)..(392): a, c, t, g, unknown or other
caagaatttgaggtagcttctaaagctttaattcttatgtttattgttgatttttgatgtatgatgatcatggaaaaagggttgtgaagccttgtattgcatgtgtctgaattttgaattgtcctaaatgagtttatacatgttttgttgtgattttgttgttgagccctagatgaaatgattagggtattttcttacttatattcaggtcgcaaatttaatgtttattgttggaaattaattgagatgcttggctttgaagttcttaactatgagcttgaagttttggagtttaaacatgagtttgagttaatttcacaatctgaaattgtgggtttattaatggtattgatgcatgaaatatgtttatttgagcatctattagttgnnnncaaccctatttgatggtttggaagtttgggtgtgatttaggatggtttagttgagcttttgggctgaaattcgtggtttattgctcgttttctgcgttttaaacccaggtgccgcggcaagcccatttctttatgcgcggatccttttgcaaactttaaatagccataactttgtgatccggactcctatttgggaaatctatataccgttggaaagctcttttcgagctctatttgattatctaaattttaaatgccttgtgaatattttatgaaagtgaaatcaggggttaaccctatttatgaaaatcctagatttgtgtgactaggattactgacacctgattagaagcacccggggattcggaatctctgatattgcaggacaacaggtaagacagtagttagcacgtagagtatgcgcattggtgcttatattgaaagtgatatgtgtgaatgtttagtaaccgggattagggttaataccctaataggaacggtctaatagcatagggttattaccctagggatatatgtgtaattgccatgccttgttaaatgtaatgatattcaaggattatgtgtttaaggcataattaggttggactcggtaaccataaacgagatgaaccattctaaggccttattgtatttagacgtgtgagagca

SEQ ID NO: 98064 - DNA, 592 bp, Cannabis sativa
aaactagttgtgaatgtgattccactctcaaacgactccaatcctccacccctccgccatctctagtggccttattcgcccacacaaacgaccacatcgtttcttgccttgtcggagataacaacaagtaagttctcttttgtcttctcttttctaatccttttcttttctttctattttttttttttcgtgttgaaggatttggagctcatttttttctgtttcgtaagaatcttcgcaattggccagacattggagttcattgttctcaggtgctcgagttcgttgttctcagcatgtggtatgacacaatctcctcccttccctcatctcagttgcaccgatttcattctgcagatgaaaaggtcaatttgattgtcgttttactttctttcctttttatttttatgttgtcgtttgacaaattcagttgctatttattattatttacaactttacaagacaagatgagtagatataggaacttttctagcacgtgtgaatggtatatacatatattgcctcctcacatgcccagtgtcacacttctaatctcaggttaatacaaactcaggttttaatcttttttttt

SEQ ID NO: 98065 - DNA, 574 bp, Cannabis sativa
  modified_base (26)..(39): a, c, t, g, unknown or other
aggatgttaataaaacatacttggtnnnnnnnnnnnnnnctggtaaaatatttccaacaccgtagatgaagagaggcagcaactccgaatttccaaacataactacgccatggacgagtttagccggggacatgctgaggaggaagccctaaagaaagtcctgtgggaggctcaacaaaactctttgcccgaggaggccttcaaaaatgcctgggacctgaacatggatcctctgacagattggttcaaccgcttcgtcggtcctactttcgctcccttcacttttgagctaactagccagtttgtctcccatctgacccaactcccggccaaaagatatggagcctgtgcttccatgaactctatttaccaggttcaggatatcagcactgccctaactacggtaagtttttgtgattcgttcctctctttttgcttgtattttgtcttaaggcatttgacctcacattcttgttttcttttcccagattaccgcagagaccggccgcctctcagagacccggatagaccatgggtatgtcatgttcgaatttgggggcatggacgaggccat

SEQ ID NO: 98066 - DNA, 571 bp, Cannabis sativa
gatatccaataggtcggttgtaattggatcggtcggttctcattggattggatcgatttatgcacacccgtagtggtgatatcggttttggatgactagagagtaaaaatgtgtagaaatgatgtattatgagaaaatgcttatgtgatcagtgaaaggaaactttcaacaatgaaaatgatgacggaaaagagaaaaaaaaatactatttataatgataatgactctattaattacccaaattaatagctacattcttatatattaaagtgcttaaaatgtgtgtaataaaaaaaaaaacaaacaaacaaagtatattattttttagaaaggaaaaaaaataagatgatacctagaatataggagaattaaaaataaataataaaaattatatatgtgatacctcacgataatcaaataaactacaataaattattactattagattaaaagtcaaaggtttaaaaaaagttctcatgggtgagagcaaaagtgatgctcccacctaaaaattttcctatatttttatatatataaaaatgtttaatttgtaaaaattaaaaaaaaaaaa

SEQ ID NO: 98067 - DNA, 604 bp, Cannabis sativa
aattattttatcctaactacaattagttaaaattattgtaggcagaatatattgacttataaataatgggttgacttaaaaaattgttcttcttgactagctatagttgaatgatcatcataaatgtatgtaattcctctcaatatcatccatatacaatagaactattataattatggggcgaattagaatttttatttgttgaattttgatatgtactaaattataccgtttaaatttttttaaccattaaaaatatatttcccataaattattgagattgttgaatttattaaagacttttgttcaatttgattcaactttactaatttttttgattgtctatgtattaaattatatatgcttccttaactttaatatctaataaatcatttctcaaattttaatatgtaccaaattatgcccctgaacttttattcatattaaacttttcttaccaaaatcagacaaaaattcttaaatctaaccgtgtcaatatatagttcagggagatttttaacggctttaaaagttcacagaacataatttagtatatgtcgaaattcgagaaacaaaaatgataattagcctaattataaatttg

SEQ ID NO: 98068 - DNA, 531 bp, Cannabis sativa
ccaagtagcctcccataactccacacggtgagcaatggtgtgaaacctttgcaccagcggttggatgttgtgattgagatccttaatctttgaatgatcagtggtaattgcctcaattgcgcctttagagtccgactaaaaaataacattgttgtagttcagaattacagctacttcggccccctagtttatagcaaccacttcacccgcgagtggttcactatactgcagctttttagtggatatatttaagacgaccccttcctcattcctaaacactgctgcaccaaatgagaaggtttctcctatggctacgtcagtgttacacattgtccatcctgctgggggggggaagccatttgttgtgaattggaggctgtgcattgtgaacctcacacatttccattagccttcgattgattctttggagaaggatgtgtatcggtgtgatcgtgttttgatgaacacgggcatttctttcctgccagattttttcaaaaatgatcgcagctccatttaatatcatgttga

SEQ ID NO: 98069 - DNA, 621 bp, Cannabis sativa
taaaaagaaagacagtactaggagaatgtgcatagactgccgagaactgaacaaggtgactataaagaatcggtacccattaccaaggattgacgacctatttgactagcttcaaaggaaaaaggtattttccaagattgatcttcgttcaggatgtcatcagctaagaatcaaaaatgaagacatatcaacaaccttcagaacgagatagggacattatgtgttcatggtgatgtcatttggacttacaaatgccccaacagcttttatggacctcatgaaccgagtctacaacgaatatttggatcggtttgtcattgtgttcatagatgatatattgatttattctaatgcagaggaggaacatgaggaaaacctacgcctaaccttgcagcgactgagggaacatcagttgtatgccaagtacaaaaaatgtgagttctggttgtctgaggttgcattcttgggccacattgtcactaacggaggaataaaagtagatcctgccaaggttgctgcagtgaaagattggcctagaccaaagaccacttaagaggttcgaagctttttgggtttagtaggctattacagaaggtttgttgaggggttctcaaaaatagc

SEQ ID NO: 98070 - DNA, 1116 bp, Cannabis sativa
gcaaaaacacgatttttcaatattgaagagtgtcctcagctattttgcaataaaacaacaatttcaatacaaggtcaaaaaaatcttgcacaaaggaattttaaattgagtgtttagataaagattgtaagcggttactaagagcgtcaaggaatggtgcaacaaagaatttcattgtaagaaaatacaatgacaaacacacttgcccactaagcatcaaattctagaatcaaagccaaccatctgcaaagataataggggattgtattaaatacaaatttttaaacataaaaacaacaacaacaccagcaaatattagatttgagatgaatgataaatttggattacaaatgatttacatgatggcatgaaggagtagggagcacgctctaaacattgttagagaaatagtaaaggagtcttattagttgccgcctagttatttccatgtgctccaaaaaaataaactcaagatctgtagtgcacattgaaaccgaagagaataacaacttcttattgtgtttcatggcactaaacacttcattgaaagcatggaataaatgcagacctataattatagtggatggaacttttctaaaagctacatatgggagaacatactaacagctagtgcacaagatgctgccagtaaaatattcccactagctttttgtgtggcttattaagaaaataacatctcatgagaatggttctttgaaaaattaagagcaacatttggtgttagacaaaaatagtatgttatatctgatagatataaaagtaaatcaaagtaactcaacaaatcttccctgaagtagaacatggatattgtgtatttcacctacttaacaacctgaaaacaacattaaaaaaaggcaaggttctttgaaaagttcttttcttgtgcagcaaagacatacacagctcaaaaattcgaatatcgcatgaaagaggtcgacgccttagacaaacggtttcgaccatatctacaaaatattggttatgagaaatggttaaggtattattctaaaaataaaagatacattacaatgacatcgaatattgctgaagcgttaaatgcagcaaacctgtcagctagagaactaccaataacaa

SEQ ID NO: 98071 - DNA, 908 bp, Cannabis sativa
tcacgacaattgaaagattatgagtaacgttacccaactcatgacctggagcttgcagcactggtgtttgccttgaaaatttggcaacactacttatatggtgagtggtgtgagatctatactgaccacaaaattcttaagtactttttcatgcagaaggatctgaacatgagacaaaggagatggttagagctagtgaaggactatgactgtgaaatcttgtatcatcctggaaaggcaaatgttgtggcagatgccttaagccgaaaaagacctgatcagatattcaatatggtaattatttctcctcaattagcctcagagatgtctagggcaaatattgaatctgtgatcgggaaattgcataatctgaaacttcagccaaacttgttagaaagaattcaagtggctcaactagaagatcctgaactgtttaagattcgagaggatgtcttagcaggaaaagctaaggacttttcgatctttgacaatggaatgttgctgtttaaaacacgagtgtgtgtccctaataataccgagcttaagaaagagattctggatgaagctcataccaccccttgggagctggagtttgatatgaaaactcaatatccagagttattcaggttagatttcgaggacgaaatcctcttaacggggggataattgtgaagaccacctaagattaacattttgggttattaaataaattaggatttatgcatgagatttaattattatttaaaaatgcatattgtgaaaaatttgtttaagttagtatatgtttattatgcttgttgcccctgatttttcttaatatacgtggaccaaccggacagggacacgtggatcaaaacatcttgatacatgaattatttgctaagtcttatgaaagaaggcagcatccg

SEQ ID NO: 98072 - DNA, 765 bp, Cannabis sativa
ttaattttaaaataaacattaaaatttatttttaaataataatatttggtgtaccgtcgtgtgtacagtagtgtacatatatatagtctatattaacagttaaccaaaacaaataaatgatatataaatttattaatatgattcaatagtttacagagttttatcaccaaacttaaaactctatataaaatattaaaaaattaaattttaggtagcttctctgtaaatatacctttaactagtcaacaggccgcgcttcgtgtacggctatttataaaaattttaaatatatgtataaatatttatcgaataataaaatcgtatcaaataattttaaatttagttttatatataattttaaaatatatatttattaaaaaatttatatataaagaactctaaagatattcaaaataaaacacatacaaaaatatcttcaaatatatattatagtgaaaaaaattaaaaattgaacaatgttcgcacaaaatatagatctaaaataaaaagaagactatatatttattgaaaacatatcatataattttaaaataactgtcattattgtatctcacttctagtcattactacatttaatgatatcatgatcaccgtatttaagttgtagttattgttaatatccttccctattggtttgctctgtgcgtaaaataaatcaaataataattgataagtacttacttttatacataagtgaatctgttataaattaattacctaaagtaatttttaatagtcacatca

SEQ ID NO: 98073 - DNA, 1147 bp, Cannabis sativa
aaaaatattatagtaaagatatatttcaaaacaaaattaataaaaaagaaaagaaaaaaaactatactctattaaattgcacacttggcatgagactggtgaggaactctgagtaaggaacacatggagaaaaacaaattcagcgtggtcaacattatgtgcatccaaataaatttattttagaaaagaaaaggttattattgtattttaactataaaagccgaaaccattctcttttttatagaagttgtagattagttttaaataacatattttatcttttctcagttaaaccttaattctttaaacttgtttctctcagtgtctttttttttcagtcaaccaccgcctctctcacgcctgagtagatcatcgtggccactcccacgtctaacacgacgccatctccactagaattatacttgtgagattatcacaggagatggtgaggttgacgagattggtgcaactcccaatctcatgtgattgaacaaagggaggtttgtgaagttaagtgtgataacacgtgagtcgttgtcgcacatgactccagagaaggaacataatgatgaagaaaaagaagatgggttcttgtcgtcaagaccaccagaagctagtgacaaaagactgaacaaaaaaaaaaagaagaagaagaagaaaaaaattgaatcaaatataataaatgatatgcagaaaaaggaagaaaaatcagtacgacgtttgggtggagagctccttggctgttgagaacacatgggtgtattatcactgactttgcttggattctccctgattcacatttgtttgtttgtgcttagcattcttctagtgttaaccgaaactggttttacaagctttgttatgatattatatgagttcacaagttttgttatggtttcacaagttttgttatgaattttcataaggtcaaaactgttttcacagggttcataagtgttgacgtagtttttcattgacagatctaaaaagatcgtaatcaaggaagacaaacacaagaaatcgttaatcaaagtaaaccgatttgtgaaagaaaatttgacaaagatgaacataaagattttatagcggcacactgttgggttttgtgccctgattaataaatttttatttcaatgtaatcttgaat

SEQ ID NO: 98074 - DNA, 562 bp, Cannabis sativa
agagagagagagagagaataatagatagagctagaattgttgaattttagagggtaaattggagagaaaacaaaactcttatctttctcaattcttcttcttcatcattcatatacttttttttatacctactacaaaaggagaggggtattgagagaagagaagcttttatttgggaaaaacgtgtaggagaagattttgtaagaattttatcattagttttaataaaaaaaattgtcacaagtgacaagacaactcatcacttttatcattagttttaataaaaaaaattgtcacaagagacaaagacaacctatcacttttgtcattagttttatataaaaataattatatcacaaacgttaacatgtaattatattttgaatatgataaagaagataaataggtttagtatggggtaacgtgaatttagcatagaagaaaaaagactcaatgtcactgatgtgattactcaagatagtaaaaaattaaagttttaaaataaatacagtaaaaatatataaaacatatacaacataaaagttaattatatcctgtaaca

SEQ ID NO: 98075 - DNA, 968 bp, Cannabis sativa
acgatgatcttagagctacaaacttcttttttttccttcttctaaatctttctgtctactgcactccgggcatgggctaaaatatcctcctgctccttcctcctctagtatgtttagtacttagtttctgcctgttggataaattccacccagagcttcctcttgtcagcttccttgttccgagcatttggacacgtcacttttgacaaattagtgtccttttctgattggtggccttaaataagcccggtggtcctacagttagcagttatgacaaggtctcccacattaagctcctctctggtaagcgttacaaagacggcaacatggctcaggaagaacttaattggagctgtctagagtagtggagggatccaagtccactcagttaagagattaggatactcaaaggctttgaaactgaaagaaaagaagacttgatgacgacagttcttgacattcttttggaagttgaacgggacgatcatctcgttggccagatgaacatggagggagtagaaaccatccttccgtctgtctcccttcttggggaccaaaaaaagttcataacagaataaaatatcagcagggatgggagcagaccaaccccttaaagcgtaaaaaataaataagcatgacaataggtcgtatccttggggtatcaacttgatatggagcatgtcctacgaaaaccaaaaaaattacaaaataatgttggagcagaagcatcaagctggacatgaggtgtccttggatccatgccccaaaccatcaatagttgtggttgggagtctctgtctcctgggccacatggtggaacacctctagtcctaaggtatgattccattctcagtcacaatggttcccaggtgatggatgcaacccatggacaagtgcagctccttagattcccaactggtagctcggtgtacatagttagggatcgggattggaccctgcatcaccat

SEQ ID NO: 98076 - DNA, 535 bp, Cannabis sativa
actttgagtgacaagaggtcccactatatcccaatagtgctgaaaaaacattgcggacataccatctaatccaggggacttatcaggggccatagaacggagagccatttcaacctcaatagctataaacggcttcagcaaagattgattcatgtcaggagttatagccgaaggaatggtagaaaggacaaattgcaaagcttcactatcaacaccattagaggagaataaagtagagaaataattaattatttctccgctgatttcctcttcagtatgaaccattccaccattactaacttgaagctttttaattttatttactgcatttcgagacttagctctggagtggaaaaacttagtatttgaatcgccactttggagccaatctacccgtgcacgctgatgccaatataactcttcttttgcaagtaactcatcaagaactttatcagcatcttccacccgtttcaaatgagcagcagaattatcatgtatagtattcaattgcgaagaattcttatgagcagcagca

SEQ ID NO: 98077 - DNA, 2480 bp, Cannabis sativa
ataacaattagcttttataaaataataaaatattaaaataattggtatataaaaagtagcttgttttattacatgacaactcattagtttcgaaaatattttttaaggttacctaaatcattttaaattataatctatcataatataatttaaaaataactaattaatcataaatttgtatacaaataagtttttcgagagtgaccaaaatgtatcttaaattatatgatatgaaaataaaaaattttatataaaggtaactaaatggtttcttatcaacactattaataatcaaaaagttacttttaaaaatgcaggaaaataaaaaaaatacgaaaaaacatcaaaaaaggtcaaaaacgtcaattttggcaacgtaacgcgacagtaataatagtaacgttattattgcaaattagatgcaatatatatatatatattattgtaaacttctatttttatatatatattttatttacaattttacggtctaaaatttttacttataaaaataccattttaagtttcaaaattataaaaatataattttttcagcaaaaagtaagaaaataactaaaagataacaagaaatcaacctcgcttcgcaacaactataaataaactataaaaaaaattaaaaataacgggagaacaaactcatgacaactataaatcaactacaaaacaattaaaaaagaatattgaatagtttactaaaagtacgtatttttgtaaataaaaaaaagtcatacggtaaaaattaaaaaagttccatgctaacatatttttgtaattttttcaaatttttgatctatcatgtaaaaatttcaatgtataaaatatgattatctaacgaaaattgttattttaaatttttttttgttaaaattaatggttgaaactaacattattctcctcatatagaagaggtctcaagttcgaaacccccctcctaatctaaaaaaaaaagcgctaacattattcaatcaaataattaattattttatgaataaatttattaattatttttcttaaaatatctaaatttaattctttattttattatttattaaaataaacttatataattattttttacacattttatgtctcttttataaagaatttttttagtaaaaaaaatatattttatgagaaaaatgatataaggtaactagttattctatggggataacttgttactctaatttttttttttaattttttctgtaaaaaaacataaacttaagccaaaaaaattaataaaaaagaaaactctccttacttaaaagtgtatataaaattaggttcatattttttttttttatgcatgtctaaatttaaatttaaaaaatataatagaattaaattagatttaatttttatttgaattaataatgtgttgctattacatagtgtgcatatatatatgtatcattattatcatggattttttacatcacatattgaaatttttaatttttttttttatactgtaaggcaaaatttttttcaaaaatactatgtaaattttatactgtatactgtgttaagtttacacggttactttttagttgtttcactgttttaattgttctgttttgttgttttacggttattttataaaaagatagtatttttcaaaaaaaaatcgtgtagcaataaaattgtaaatttttgcctaaaatccagtatttttataaaaactcctattatcataacatacgatgtgtgaatctataaattacactaaaatattataaacagtgacgtgataatttttaatttaaaaaaaataaaaaaaaactaatcatatttatttaaatttaaactgagactcatttttattttattttatttttttatgtgctcatctgattataatacttgtttaaacttgaaaaaaaaaggtattaagcaatggaaagtacaagagtgttcttcataggagcttggtgaacaagaaagagactcgaatgtcatgggcggtgttttgtgcccctccccatcaaacgatgatcggacctttgccggagctcatcgatgaacacaacttgcctaagttttctaccaaaacatatgcagagtatcgccatcgcaagttcaacaagcttccacaataaaagactaaaagtaatgttaattagtgtatgagagagaggcacacatatgaactcatgttgggtctcttctacctttctagttttcctaataaaataaatctcatgtaagaatttcaagactcacaaatatgttatgttttgtgatctgaaggttttctcttcagtaccttttataacttcttttgaaagaaaaaaagaagtatgtttaagtttgaattaagttttaaataataatgtttctattacaataatggaaggttgtttcaacataatttgtctttaattttagtcaaaaaatgatcaagaacctaagttcacaatgaagaatagtacaattactataaactaataaactaa

SEQ ID NO: 98078 - DNA, 3525 bp, Cannabis sativa
tgccaaccatagtatcgagcatcgcatcggggaattgaaaattttaatttgtcaaacagagccattgcttatcactgttttcataattttttcatagatgagtcaaatttcaaatgattaagatcaccaaatcaaaactaaacagaaaaaatcacaacctactcagaaaaaacaaattaaagcacacataaaattacaacgagcatgatgcaacacaaactgaaataatttcagagattttccttgacattgtccgtgtcgacaaacaattcgaaatgcctagacttttttagaacagatccgagtcaaatagcaatatgattcgaagcatttcttttttacactattacggaaacccaagaactcaattgtatggtaaccgggtagctgcttccccgttaaaaatcatgtgaatattagtttagaagatagttaaaataaacttacggcaattgcaagtcaaatgatttagcaagccacaaggttcgccatcaggtgtatgaacagggcacaggaaaccccaagatctgtaaattcaacgtaaaacaattaacgaaaatccaacttgaattattgttcttattaaataaaaaccacacacatgttaacatatcaaaacaaaagcatatatgcttactcaggtaacagcttccgcacgctggttgtacgaagtcccgcaaaagaagcccctcgatgaaccgcacgaaaatgagaaacgaaacgtagataattaagcctctctgcctgaactgtatagcctgccctctaaacaaaaagtagaatcccttaatagcaattcatattatagtttttataagtaatgcaaatcattgaactgtagaagcatcaccaagaagccatacctgctgcaaatctaaaccagtctgagtcataattcttccggtttttaaaaggttttcaatagctaaactgacttgttttgccggagctttatccataaccttctttacttgagccactgcaattccaaaagtgccatttgaagttaaacacaatgaaacaacacaatttttctgctttgtaagaacaaccatttatatacgtatatgcactcgtgggacattatactagaagagagataggtaaggcgaaagcacatacagtcgcccaaatcaaaaggtttgccctttttgtcgatctcatcttgaagaagcttctttaccttggacaaccaatcttctaatttttcctacaaaccacaataagcaatgaatgagtatggtagagtttcaaactaatgttccagaaaacaagctgccgggccaatttaatgcaccgatggtgaatataattcgaaatgtaagatgtaagaatgaaaattcattattcctttcatattttcatttgacatttctttccaaataaagaggcattaagttcttacttaccttcaaataaagggtaatcaagtgaccagggagtaagacttcgtgattttgcagggaatcggggttgtctgttactgaagtctgatcgatgaatgaaaaaagcttctgcgccataaaactagaaacgggcaagaatttaataaattaagaacaagatgcaaactttaaaaagacaatgacgaattgtagctcacatcaacaaattgaacttgtcgtgattattatcaaggtgaacaaatatgtagtccttcagaacagcatttgcaatctgcacaggccaaaaacaagattacaaacatgaaccgaataaaactggaaaccaaagctaatagtattgttcgttccgaaaaaacaatacaaggctacagatacttacatcagaatagcttgcgttttcaagtccatgcataataggtttgaaatgctctcctaattgagagaaagtgagaattcacagagttaacactataagttataacaacgaaaacactttgaaaagataaaagattagaaagacacaaaagaatgtagaaagtaccaatgtgctctagacattgaatacgattaaaaaggtccaaatctcgaacttcatctagaataatttgtgctctttcacccaatagctgagtcccaacaacaccttttcccttatcatacttctcattatagcagcaggttaagctcgcataaatttcgtgatcagttgtgtcaataagggcctgcacaatgcattattagaaaatcgaaaatttttataacattagaagtaaagcaaaaacatgacataaaaatagtagaagcataaacaggaaaaagattctaacctttaaaacaatgccaacgggaagcaagtactctcttccctgtaccctgtaaaaaacgaaaaataagtaagtgcatttgtacatacattgtagttgtattggaaagacaaaaagcttgaattctttacttgagtcaaacctaaaactgctcaccagaatccaagtcttgcacttccatttcgaaggtagtacaatttgattgtcactgaagattcatcttcccttacacatctaagggtcaaaatcaaaaaatcaagcgggtgaacaaaaatcgaatatcctttatagatgtttgaaccaaattttagttacaacaaaccaaaagatctacttttaaaacatcagaaacttaaaagatgagggcattatcatgaaaggaaaaccttataataactgctttatcagtatatccttctcgccgatcacgaaatgaactacgaacagtactcattggctggagaaattaaataccaatataatgttaaaaccaaaaatttcttcatactaactcaaattttcgattactaaattaaagaaaaaacaatactgataataatcattacaagaaatcaacaattctcatcaaaaggctcagtggttatattataaatatggcaccaatccaatcacaaaaagaggctaaatgcatgatgaaacagattacttacatagttcctttttggcattattatgagtcgaacgactctttcaagcccattcatgatgaagtaactaagaaattgaaagaaaagattaacgattagacaggtaaagcaagaaatataataaaagaaaaaaaggtaagaaagaaaaggcacgagaagactacataattgctgaaatatataataataatgaacgcgaaattagagcgctgaactagtttcttttttaatgaaataaaatctaacagcagacataagacatgccaataattccaagaagactagagaaaaaaataaatatttgtaccataccccaagttcattttaaagtacatataagcttaaaatactcacccacccatctccgatgactcttctttgtatgaaactaacttctgaggatcagcatgtctcaagtggcaaagctttgactgcattaaacaaaaacatcttatcaaaagcatgataagaacaataaaatgaaaaacacaatgcacttcaaatatgactaaaataattgtgtaataggcaactatggattaagacagaaagtttttcggatcctattttagttgcttacttctcaaattacagagtgttcctaaaaacatatataactaataaaac

SEQ ID NO: 98079 - DNA, 1656 bp, Cannabis sativa
  modified_base (1343)..(1360): a, c, t, g, unknown or other
tatccgtgggtgtggaagatggagcctatacaatatatttcttcttccttctctatgtctattttgtggtttttttctattctggttttcctaaaaatacatttgacgacctcactagaaattttttttgaggtgtgtggttcttttatgtttttctaagtggttatatctgcttattattttacttttgtttttgtgttcttttagtagtttttttgttctgatttttttgggcttgcaaatataactgctattgcatttggtattgaggctgtgcagaacatttgtaattttttttaatcattttttcctttcttttgtttgatttgttttagtgttgttttatagttgttttgccatgattatttatctgacgtcgatttcaatgttttttttttctcaatttcaccggaattaatagttgtttttcaatttgttcaagtgttcctgtagtggttctgtatgtgggtgtggaagatggatgccttattttttttttttttgtgtttacagtataaaagaaaaaaaatggccaagacagtatgaaagttatttctaccgtgtgacaatattattataaagagtgggccaaaaatcagtatttttgtaaatttcccattcatattaccattttatacaatatgagcccgtttggtacacaagactggattgaattagatatgccaatttgttcagttcagtgtttgggcatgctgaatgtctagataactaatctaattaatcacatctggtatggtgggataaataatcccatacatttgtgattttttttttttaaaaaaaaatttgattttgttaatacattttaaatttaataagaattaaaatgaaaatattattacaaatttatttatagatttttttttatcaaaaatttattcattaaaattaataaacatatataattttgaattatcatacgtaagtttttaaaatttaaaataatattaattaaacaataattaatttaattaattattagaaaacaatatgatagttttatataatcttcttaaagtattaggaaatttatatcaagtattttaaaaaattaatatttatattaaattagtaattaaattattatttagcataaataattttatattgttcaaccatttttattttattattttaattatttattaaataaaaaatataataaattattttattacatatttatgatattatatttaattatatatgatatattattttattttacaatttaattatttttattattcattttttttttgctaagaattatttatttttatttatttatgattataattaccatatatactatttttttnnnnnnnnnnnnnnnnnnatttacggtttgagtttctaaattagttgcagcgctagttgcaataagtgtttctgtacgattttttattacaatttaggttgcagcgctagttgcagcaggggtttctatatagaattttataaaattacaaaagaaaaattattttgaaatgtaaaaaataaaaaaaccctattttttattttaattctcatcttaaaaaagaaatttttacaccaaaaatacaaattacacactttattacatataaacctacacacggttaaagcaacttttttaccttttctctatatttt

SEQ ID NO: 98080 - DNA, 624 bp, Cannabis sativa
gagatcatttgcttttgtggcatcagaatgagaaacaatgggacccgctagaacacggtcaatatctgattggatacttttgatgcggtgtgagaattgatttttattacgaccccaggaggacaaggaaacagaacaattttgctatttggaaagaaaattgaggattgggttattagggttggtagtaatggaatccgtagtccagctatttgtaagaagctcagggaaatcaggctcaagtaaccagtgattatcgaatcgaaaagtagggttacgagcaaacaggttaggattgccttccagcaagactttcagacctctgtgatcagagccgaaaaaacctaagtgatggagggaagccgtggggaataagtttgcccatttttgattgacaatggcccaatccaaacgctccaaggtggtaccatgcttccaagtgaaacggcttccagagaaagagagcgggaaaagagagtatttgccaataaaactttgaaaagaatgcatggcatggggtggtggtaaacagtgagtattacgatcgttaaaacctaggtaatcattaaaatcaccaacaataagccacggtgagaaaggggcaactgttggaatttattttac

SEQ ID NO: 98081 - DNA, 654 bp, Cannabis sativa
  modified_base (333)..(333): a, c, t, g, unknown or other
gtattttggggtatgtactatataaaaaaaaaattaaggcgaggacaatatttttgtaaaaatttccgtgtggcagtataaatgttaaactaccccaaaaatctagtaattttgtaagatcccctattttttttttgttgataaaatagaagctcataaattgacaacgcaatgtagacatttgaatttttgaaaaattttcataatagatcaaaaatttacaaaaaaatcatcgacaaggaaaaaaatttacttttactatttgaacttttttatttacaaaatacctctttagtgaaaataatgaattattttttagttgttttatagttnatttatagttgtattatagttgtgatgatattttttttagttgttttatagttgatttatagttgtcgtggggttgattttacgttattttttagttatttttttttttactttttgctgaactaaatgtattttcataattttaaaactttacaagtgttataaatattaataattatatggatatccaaatcttttatttattattatttattgtaattaatatttttttttcttagtttctcaatatttgattcttatatgtgtataaattaggcctgcacatgggttgggttgggcggtttttgggcggtttggcgg

SEQ ID NO: 98082 - DNA, 2240 bp, Cannabis sativa
  modified_base (316)..(316): a, c, t, g, unknown or other
agtattgcccacggttcttcactggtggcatttgtttttcccaacagtttttttgcttcagttttaaaccgttgggaaaaatctctgcttaccttttccaacggttttgaaaattgactcccttataaaccgttgggaaaagccacttttgtagtactggcatcttgccacacatgctaccttggtcacgagtgactaggtgagcgtcggtgtaaggatttgtcgtatcatagtgggaacctatggatagtgcgagtatcttggctagagagcctcgatgcatagatgcactcatggatgcttgcgagcatgattngacgggagttgttcgagagacggacgtgtacacgagggacacagtcgtgtgaaaaatgagcccattgttactcggattgttaaaaggcggaccctggcttagagaagtcaaggtgccgcatgggtgttttgcttcctgaaaaggtgagcccgtgacagttggtatcacaaccaagttcatctttgtgggaggtgaacctggttggcctatcctagagaggatgtaggcatgtggttggatcgagagggtccaaaagttagaacaagacatcgttgagccagttagtcttttaaaggggatcagtagactgagatagagttgagattgggttctttttcttcatgggaatactggacatcctagagaggagacgatgatggttgcttcgagttaagttcagagatgctagaaagacaactaccatgtgcaattgtagaaaggcgcaacagaatgtttgaaactcgttggcataatacaaggttgattgggtagtccatactgtatacttggtacgctaggccaagtttgcctgagtgacattgtaagccacaggaggcacttttgtcgaaaaggaagcttcttggcaggggtgtggaagtagtgcaggggctgccaaattcttgttactcactatagtggtcgagagttggtgaccgagatggttcaaattgggacagacatggaatgcttcagttgctacatgggtgtgtcaagagggacgcacatgaagaccaagggaagcagatgccgtaatcgtcagaggattgttgtacttggaggtgttcgcatgtgacttttatttgatctctatggaagcgtagaggcagttgagtgagatgtgttggcttgttaaagcgctagtgggcgtaagtcacacaaaggcattgatagagatgcatagttgtggaatgaaagcatcaaagaagccagcagggctaagaagaccgagcgcaagtgttaagatggcgctagagttggagtggaggccagagggctgtgctagtgagacttaatagtcatgtgagcatataaaggtcaagaagggtgttagagtttgcatgaaggccagagggctgcatcattggaacttagtacatcatgggagccagaagggcatgatgcaagtgtgaattagttggaaggttgagcagacattgcatgcatatggaaatcgataggggtactatatgagatagttgacttgagagtcacatcctacgggatgtacttttagatggcatggtgtgcatgaagagttgggcggtcaggcattcgcatgtgggcatgttgtcgaggacaccaatagatgaagtgggggagagaccttcacggttcactcaacagactagttattcgttacaagcatcgagatgaataccatggagagtgattattgtttaggttgtaaagtcaagaagactcgggacacaggcactgccggttatctagggtgaaagtctgcaagactcaggtactaagataacaccatggcaatgtttgcctaaggtgaaagtcagcaagattaaggtactaaggcaacatagaaatgtcgaggggcgaagagtcaaaatgattgaggcattagtttagcatcttcatcaaagtgacatttggaatggatggaccatatacaagtatgcgtttagcttgcgagctatatcttgaggggtagtcctctaagagagaagttcttcccaagttgaagtgggggagcccactaattcatatgtttgaagaatcagggtacttgtttagttttgatgtgtgaatctagagggaaatactaccacagatgggttgtttagtacaaaaacttgcatgattgctgtaagctgcagatagacaatatgtaggggcgtaggcagggatcaagactgagctagtttgcggcatgttatgggcatgttttttgtttatggggaca

SEQ ID NO: 98083 - DNA, 619 bp, Cannabis sativa
cggtcggtttttttgaatgttaaacggtcggttacggttttgtgaacaattacaccgtaatcgcctggtcggtctggcagcaggtaaaaaccgaccgtaactgactgaatttcacccctaattactgctatctaccccacgcgctggcatgtggaggtgcgtgtgactgggattttgacggtgaatcttctccagttctttttttgtctcaagcatactcccatctgtctcaggttgtcgtttggtatttcacccttctttgtattttggtgtgctttacttactcttcgttgtttgcttctatcttgtctctttcgatatttatttttgaggttatggcagagacaaaattagatccaaaaaaccggtggttgtttctgacatggttcccgtgatgtataaaatcacctaccataaattgattgattcgaattatttggaatgaagtaagacgattcgactttatctaaggagtattgaaaaatatgatcacttaatggatgatcctccgaaagaaaaagacgattcaagaaaagtgtggctataaggatgctcacttgtttcttcaaattagaattctattgataatgaggtaaatagtttgattaatcattgtgaa

SEQ ID NO: 98084 - DNA, 657 bp, Cannabis sativa
tcatagacaattttaaagctagaatagagatttaatatagttgtagcatagcaaaaacttaataacaacaattaacttaatcagaaattgaaaaagaatgaaataaataacaatagaatttaaccttagaattgccaagtatcccataactccttggcctcaccatccatatatccttcctccttcccacttccttcaagattctttctcctttcctttgacccatccccaacaaaagtgtcaatatttttcaagatttcaagccggagggatccaagtcagagaacttcccttgtttcttttatattaagccaaacataaaaataccaattagttgtgagattataaattaccagtagaagatagaataaagctaggttaactatgtcttgggtaattatgttaaaaatacaaatgatgctaacattattattaattcataaagagacaaataagatagtttgtaatcttaaatcagtacaaataaacttacatgattcgagacagtgttgtagagtaaattttttgagctttatcactttttggtaagtcttttccaacctgaaaaaaataaacaaatgattaatcttccataacaaataataaaaccagtgtccaagcaaaaaaaaaaaagaataaataataaaaccaaaagga

SEQ ID NO: 98085 - DNA, 854 bp, Cannabis sativa
aaaagtttaacacgccaaaaattgtgttcaagcagtgtgttgcatgcgtgactattttattttatactagtgtaaaatagactgtttgaacattatattgtaagttattctgaattttctcaaaattttgttggatattttaaatagctataacttacatgaatatgaaaagaaaaaaaatagactaaattttttttctagatgcagaaacaagtacgggtgcatcagtacatcccttttaagggggtgcattgtagaatcaccctatatattattgtcttattaaaggagcaccacaaataaattaacctttactcctaacagttagagaatttagtccttatttccccaatgtttatttatttttatttttttggcatgaatctccatgtgtatttttatagaagactttcaaatagaataaaaatatatttcaaatagtgcttaagaatacttacttttaatataagattggtttttgttgttttctatatatatacatactatttggatgattagaagttaaaaagtatttattaattatatcaattgattagaaaataaataattaagagaaaagaaaaattgtagaaattcaatggacaaaaaaatataaatagtagtcaataaaattttcattgatttaggtggaagttgaatatgtatggtgatatagatttagtcaattgtataaatgaataagtagtaagatatgagtatatatttaattgggttgttatactttcttccttaatattctgtgtgcaaattcaaacaggttgatctgtgatgttctaaatacatgggatttcatttttatgaaatttgaaacagttttttaatagttgcaaaat

SEQ ID NO: 98086 - DNA, 583 bp, Cannabis sativa
tctgaatacctgcctgtagtccccctcgaatggccagcagttccgccacaattggagtcagctcttgctgcatcacagtcgctgcagcaaaagccacctccctcgacttccccttgccacatagctagtggcagcccacttctctttaactttaagacgagcatcaacattaatcttaaagcaatcaatatcttctccttttaaaattttatatttttttatcaattttaaaagatatcacattttttattaaataagggcctaaaaatcgtgtcatacaaaacaacacaaagacaagattatatcacaaagacaaagacttggtgtaaggtacgtacatgaataataaagaagaattaacaacaaaacaaatcaaaataaaatcatgtcatacaataatactaaaacattcaaaattatatcataaagataagattaaaacacttaaaattatataacaataacaagactaaatgtattaataaaaatcaaattattgtagaaaaaaaaacaacttttaaaattatgaatttagaaacaaaaaatctatttttttataactattattaactcgagtttgcct

SEQ ID NO: 98087 - DNA, 1176 bp, Cannabis sativa
cttgtaatcaactctctaagaagtttttatcttgtaatttttcttttatttccagaaactgtaactttgcggctcacaatgtcgctagatgggcttatgctcaaattatttccgatatcgtggaggcctcggccatccctaacgctatcctttgtaatgaccgagaggtctaaattctgctatcaatcaacgttttcttttcaaaaaaaaaaaaacttctgaatatcagccgtccataataaatttggaccccacagtacatgaaatttgatgacaaaatgaattaaataaaacccagtcaaaatccaagaaaccaggaggtttcaagacacaaaaagatatgaacatataaaaatatgaacattatcctacactaaagtaaaagtaggattgaacaattatattgagtaaatgtatagaattcttagattgacaaactgaaccaacagagccaacaccaaaatgtcaatacctgcacttccaaaccatcaagctatactgcacacaaatctttgggcaaaaacagtatggattgatgccataaaattatttggaatggtattcattctgtcctcttggacctccttagttttttaactatatcagatttcagtttgcttccacaggacagaacctctagaaaaatggaatcaatctcttgttccttcttctcgtagatgtagaaagctaaaaaggcgacaggaagtcctgaaattaaataagccacattagtttttatttcataaatataggaaaaccatgaccattcaaactaagtcattatatgacaatccacacattcctaaaaagtgtaatcagttcatggtttttagttttcataattgcattttctgcaaagagcagaacaagatgtactaaaaagaacttccagaaaatttaactactatttgtcttaatttatttatttttttttgggaaaaattaatttggtttcactcttaatcttttttattcttcatattctacaatataagaaaagcaaacgctcccgccttaaacttcattcaatgtgcatttaggacacgagggagaacacaaacctatcacaaataagctccgaagggaaacagctccaaggaagctaatagccaacaggaaaaaagcaacctgttacattatcccccgaaaagtcaagggatcataaatccaacgtta

SEQ ID NO: 98088 - DNA, 522 bp, Cannabis sativa
tgtacttaagacggtacttggtcgttgatcgaccttgtacattgtgttttacctagaaggtacccttgggtactgttgactttaatatgtttgtaggtttgtcaagttgctcacctctccttatttcttccatgcaggtagtatcgcgtgttgaataagggtggtgacagctgcgtaggtccctcatgtacctcatatttatggccataacgtaatagaccctcagttgggtgcctccatatgaccctcacgtgtctagggtgaccacaaggggtttagttaggattgtgaaggagacgctcaacccctattgatgttgagccaaagattgaccaaggggctgagagttttgatttaaaatctgatctagagaaggttacaccagggaggtggaggaggtacaggacttgttctgccctcctagattttccattgggtcacgatgatgccaattgtaagccactgaacaggctccgagagccttcagagctcggactagatcatgtcctaatggagtcttct

SEQ ID NO: 98089 - DNA, 667 bp, Cannabis sativa
  modified_base (40)..(40): a, c, t, g, unknown or other
aatatttcaaattaaaagataaggctatcatttaatttanaatatgtccaatattaaaatatctgatcttataattaaataatataaaaatattcaagaaattaacaaatatttaaaatgtgaccataatttaaaaaataaaataatcaatttttaaatttagacctcaaaagatcaaagaattaataataatgtattaaaaaataaatattattaatttaaaaagtgatatttaagtttaaatatactaaaaataatattttattataattttagggtttgaaaattgagaaaattcgtggaaaaatcccacaaaaatagggttttggggtgttgctgctaggaggggtactcgtgcagccgaggaagtctgcaagcaggccttccgcgcgcgcacgagaaggagcagcagggtaggctgccgaggaaactcagcgtttgcagcctcttgaagccaaaatcgtagcctgggtgaggcccgtgtccgaacattgagcgcatttagacacgaaattgcctgaagcacgacacgctggttgctcttgtccgagggtctggtgcgcatgagcaccaccctcaacaccattgaacccgattttttataacttctataacattttcaatttttatcagaatcaagttctgtaaaaaccaaaattgcttaatt

SEQ ID NO: 98090 - DNA, 849 bp, Cannabis sativa
aatgccctggaaaggacataccccgtatcaatgtgcaagtaaactttatagctaattatcacgtcagtgtaaatccagtgtactgatgaatcatgggactaaagactttaaaatatatgatcatgattattttccactgtgtagaaaacactataatcatgaatacttatattttctaaatttaatagaatttatacattaaatatataatcatgaaagtaatcatgtgaaccatgtaacataaaaagatttttgatcctttattaattattaaatctaattatattgaaatgagtttatttaaagcataaaatcccaacaaactctcacttgcactaatataaaacttaaaagtgaatttcaattcatctcaagaccttgatgtccaaatcaagtgtagtatgtagtattatctttgtaatcggatatgacaagctgtaatcaattaccaaccttcccacaattacatctccttagtcacaaaatccttgatattgtgaaattcctttctatatgtttactcttcttagggtattggattccttactatttggcaactatatctgtgttatcaggaaatggcactagtagttaattatctagtagccttgtaggccactttaacattcagtctcactggtagagttagagactttatataagttttaacacttttccacaaatcactgctctaccccaagagtaatcaccatcccataataatactttctagcattaaagcaagtctagaaatctgagttgatgtagcctaagaatattaaaataccacccttatcgattaacatatagttcttcttttgatcttaagatttatttgattgtcttcca

SEQ ID NO: 98091 - DNA, 688 bp, Cannabis sativa
tgctaaccctttacgtggcaactctaataatttgttattttttatttagaaaaaagtcacccaaaaatttatcataaaccaaaaattctgttatataaccatattttatataaaataaatgtgaagccaaacaattataacctcatcgatcaaaaaaaaaaaaaaaacaaatagaaaaatttataaatagtagtaaattcttatttagaataaaatccaactaaataacataagtatatttaaaaaccctaatcgtagatgtacaacagcaaagaatttttgataaaccattttatttttaataataaaccattttatttttaatataaataaaaagtcaatagatatcggtaaggtctttatatgaaataaaattaggccaaattatattgtttacaaaaatacttctcttcctttcttgatctatctcttacaaaagatggcaaaggtgaaaattatagaagtgtgcaaggtagttccctcgcctgctagtatggcaacttcctcttcctcctctccaaactctctccctcttacttgtttggacctaatctggctaagatttcaaccaattcaacgtattttcttctacgagcttccaaacttagaggatccaaatagagatacaactctgtttttccattcagacattgttccaaggctcaaacactccttatctctcaccctc

SEQ ID NO: 98092 - DNA, 1394 bp, Cannabis sativa
gggtggttgaccgaaggttgcataagaagaaggtttcaatctaaggaagcatggatcgtgagttgatgttgaaactgtaatgcaatagttatatctgttgcgagcccactaacatgcaacttaattgcaactaaaaatgtaaaatgttaatttgtatacgtaagaaactatttgtcagtatttttttgtcactgatcaataattacttgtaccttaatagtaatatgtagaaaaataattgttagcaaaatatttatgcaactgtaatacaactgttatgaaacattaaaaatcagagtagtgtttccacgtacttaactctatctatatgtctcttcatgatttaatatgaacaaattcactattagaaattttgaaaacaacgaaaaatacactaggataaatattttattatagcattgatgtaatttttttggattatacttgagttgattggtttgggaactccagttcaattttttgagatctgcatttcatggatcagaaaattgaagtcaagacactagttttatgcgaatcaaactggatctctagttaaattttagttttgtagtaatttttctgcactttttttcatgaatttgaaacaacctccattttgattgattttgatcattttctcaggtgaagtcgccggaattaatggtggttctctttctggtagatttcgtagatttcgtttcagttatgttgggtttctccgtggttgcccgaaggttacataagaagaatgtttcaatctcaagaagcatggatcatgagttgaaggtgtgtgtaagaggtatatgcgtaatttttttttatttgagttgtttatctatttatttggctaactagaagtatttttgtaatgttattatcttttttgattaaaactgaaaaaaaaaagcccaaaaaatctcacagtttttttactcaattttttttttatgttttgtgcatctttttacctatgttcttctcatgagttttctttttaaattttgttttactcttttcttagattttctttttaaaaaaaaatctccttttatgtacatcattttttttttcaaaaaacatacatattgttaatattttgtacatttttttttaccattttttattttatttcatgttgttgttttttttttttcaattttatttgctatttttttaaaagatttttttttctttttttcttattagtaaataaaagtgtagaaaagtatatcaggttgatgttaaagtttagaaatggtaatagtaatagtaatagtagtaatggaataagaatggtaataaacattgattatgatgtttaatttcttgttgaaataagtgataagtttataaaattatttccacattaattttcttgtacgttatttttt

SEQ ID NO: 98093 - DNA, 505 bp, Cannabis sativa
ttttactgtgtgaaatttcaatctaaaacacaaaaaatgtttccttagataacataattttatttactataattatcaattattaattaatttaatttactatttaaccactgataatactgaaatgagttttatatataatagaaattgctatgcaatacaaatacaagaatccataattttaaacgattgtccctaaaagatcttagctattactaagtattggaaagaataaatgtagcattttattacttaattccgttgatacgtaagaatatccagattaaaaaacatatttagctaaaggtgtacaaattgaatcattaaaagccaaaatttttatatcaactagctaactaaattaatacatatatttctcattaaaaaataattaatacacataagaaaagtcatagtattagatactaataagtattgaaaactaaaataatgtaatcatttcaaaacaaagatgtcacaatgtaaatacatattatacgtaaaa

SEQ ID NO: 98094 - DNA, 3906 bp, Cannabis sativa
catacgtatttttcattgtacacgtgaaagaaattatttgacaaattttgattaggatgccatgcataaattgttattattattttatttttaaaaaaaataaaaaattggcagacctctagaggcggacccacattatagcgagaggagagggggcagtcgccttgagaaaaaaatatacatgtattttagttagttacaagatatatttgtattaaaagataatattaatagacataatagtaagcttggtgtaatggttaagatagattaccaatacattagtgggtaaaggtcaaatcccactaactacactttattttttctttttaaatttatttttgctccctacttttactaaaaaaaaaatacacctccactcactttaaattatgggtacgccattaaccatataatattgtatctcagattaattataattatcttcgtgccaaaaacaaggaacaagatggtgccactactctgctcccattcttagggagggcaccatagaaactatacataatttcataaaatcatgtatttaaggagactacagagatacacgttttgtattttccatatttgaatggtgaataaatattttaatatgataatatacattaatgattatagtagacattttattaattcttaagaaaaatattaaagagtacaggtgttaagcactacaaaaattaacatattagtagtgcacattagattgcggaaagagagagaaagaaaaagagtgaaaactctatttattattcattgaattagaaaaaacagagtacaagatatatgtaacttagagatacaagaaactaattagttacaggtaacaagtaactaattaactaacaacttctcccaactaatttctctaactgattctaactaattcaggtcagctcatttttaatactccccctcaagatggatggtatataactatatatttaccaatccaatcttgtctttaagagctctgaactacttaggaagaggagtttttgtcatcatatcagcaagctggtctttaggggaaacatgagaagttttgatcaatccttcttatatttttgtctgatcaaatgacagtcaatctttatgtgtttaattatttcataaaacaccagattggctgcaatgtattgagcgtctttgttatcacaaaacatcaaagatggacctttgtgttcaacccttagttccttgagcaatggcagcaaccaaataacttcacatgcagtatttgccatcgccctatacactacctcagcaaatgaccttgaaactatatgctgcattttacttttccaagagaagattgaatctccatgaaaaacaaaaaactatgtagtcgatctcctagtgtccacacaagctgtccagtctgaatccgtctaagctttgagtaatatctctgatgttggaggaaaaaatagtccctgtcctggacttgatttaacatattgcagaatcctttgtacgacttgaagatttctagacttaggaacagtcaagaattggcttaatttgttcacagggtatgctatgtcaggtctagtaattgttaattattgtagcttcccaattatcttcctgtataatgttggatcagcaaaatcatcttttttttcttgtgcttcttgtgatagtttcaagtttgtttccattggtgtgctaactggtttagatctcaagtaatcaagttcttcaaggagttgaaatgcataaggtcattgtgacacaaagatatcctttttggatctagcgacttcaagtcaaagaaaatactttaagtttcccaaatctttcagtttaaacctattgttctaactaatttttattgcttccaactcctcaatgttgtcaccagaaagaataacatcatccacataaacaagtagaacgatgtaacttgctgaggaagaatttcctcaataaagaatggtttatagttgaatgagaaaagccttcttcgattatagcagtggagaatttttcaaaccactgtctaaaggcttgtcttagtccatataaaatattattcaatatttcgtacaacatttgatggcaatttagtctcgcccttaggactatacccaggaggtagagtcataaaagcatcttcatgaagatccccatgaagaaagacattattgacatcaagttaatgtaaatgccacccatgcacagcagcaagagcaagcacaagttttactgtaaccaacttagttataggtgcaaaatttttataaaaatcaactccttcctgctggttatatcctttcgcaacaagtcttgccttaaatatttctactgatccatcagtattgaaatcgatcttatacatccatctacaaccaatgacatgttgatccggtggaaggctaacaatgatccaagcctcattttcttccaagaaaattatctctgtagaaatagcattatcccatttagtgataccttgagcttgctcaaaacaagttgtctctgtttgactttagatggccaaaacaaaggcacgaaattgaggtgacaattttgagtaatcaagaacctagtgtaatgaatgtgtagtgacaggcatgttatcctaagaagaagcacaaatattattagtggatatgaaataatgatagtcatttaagtaagatggtttagcagtgtgttgaattactctcccactgtgagaattagaagtatctttaatagtgtttgtgtcaaaatgaggtgaggaatgaggatgattaatagcaagaagagaaaagaatttgttataatggtaaggtaaagtgtcagaattgacaaaggtttcctcaaataatagtgtcttccaatcttttcacccgtcccaataccttatgtcctcaaattttcttgaatgacacagtgtttagtttaaaaattgaaagaattaacaccagaatgagttagtgcactaatagacaataagttgaaatgaaaatctggtacataaagcacattaagaagatacaaattgggtaaaacatgtattgttcctaagcaagtaactttgccattagctccatttagaaatttgacaagtagtgatagaagaatcaaaatatctatcttgaaataaagaaatgccaaatttcatgaaaaacatggtgagtggcacttgtgtcaattatcaaagtagatttatgaatttttagaatcttaccagaaaacttagaaaccataggaggttcagtagaagaagatggaatctatggaaccctttgagacaacaatgtcatcaatccttgacactgtatagttgaaagacttgaaaccaggtgctaggctaattttagtctaagttttgggtcgcgtttttgggtaactttcaacttttgtttctagttttactgctattttacgcttgattattttgttttaggtccccagatgtttaatggaagtattcacaagaatagatgacaacatataaaaaagttgagaaaaaatgtacaaagttcttttctgccaaagcccgtcacgacggggaaaggctttgccacgacgggacttggtaaaaagttttccaagttgagaatgctccagccgtcgtgatggggaataagcttcgccgcgacgaagccttcctgaccaaaaaaaattggcagttttgtaatttcacgaatttgaaagagaaaacttggctcatttaaaagggaactcatgattttttatcaatatttagaatttgagccctagaaacaaaggacacttcaagagcggcttgtggcgactcggatcgattgcttcaaccagttcttttctcttctcttaatcattctaggttattttctgtttcaattttaattatggatttgactatggagattataaactatactcctaatttggagagatgatgaatgttga

SEQ ID NO: 98095 - DNA, 917 bp, Cannabis sativa
ttcaccactgttttgatagctcctcaattggcttctgagatggtcagtgcgggaattgagtttgtagttggaaaattgtacaacttgaaacttcaatcaaatctgttagagaaaatcagagaagcacaactagaagatctcgaactagtcaaggttcgagatgaagtgatggctggtcggcctatagacttttcagtcttgaataatggaatgctgttgtataaagctcgagtttgtgttcctagtgttgatgagcttaagaaagagatacttgatgaagctcacaccacacattcactgtatccaggaaccaccaaaatgtatcaggatttaaaaccctacttctggttgtataggatgaaagagatgtggtagactacgtgtccaagtgcttaacctgccagcaaatcaaagctgaacatcaaaggccggcagggttgttgcaacctttggcccttcctaagtggaaatgggaggacattgcgatggattttgtaattggtttgcctaggaccataggaatgtatgattcggtatgggtcattatagacagatttacaaaatcaactcactttctacctgtgaaagttacttattcagtggatcagtatgctaaactgtatgtgaaggagatagctcatctccatggagctcctaaatccattgtgtcagacagagatccaaagtttacatctaagttttgggtgagtcttcagaaagctatgcgtacaaagctgaagtttagcacaacttttcaccctcagacagatgggcaatcaaaaagaacaattcagatactagaagatttactgtgagtctatgtcatggactttgagggttgatggagtaagtacttgcctctaattgagttgtcctacaacaatagctaccagagtacaattgggatggctccctat

SEQ ID NO: 98096 - DNA, 807 bp, Cannabis sativa
tcttgttctggcaatcatatttctggtctggtttattcggatcccccattcacccttggcttctctcgtgtgtgtatggtcctccatacattcatgctaagaaaaagttctggactgagctcatgtcgataggagaaagatttgggggcccgtggttgatatttggcgatactaattttgtgcctagtcattctgaacgtgaagggtcgtctggaagggaccccttcgtctcttttatttccaatctagtgggttctcgtggcctaattaatatgcatatccaaggtgagaaaatgactttggataaccaccggtctggtagtaggcatgtgaaatctgctcttgataaaggaattgtcaatggagagtggatccatctgtttcccaaagctattctctgctctctccctacgagcaattcggaccatagactgttatgccttgacacggggggagttgcccctaaatttagaaggtgttttaagtttgaagaggggtggacgagggacgaaagaagtaagctggtggtggccaatgcttggggttcggttgagcgttcatgggctcctgatcgagtgttcaagaaacttggggcgactcgtgttgctctcctcaaatggaacagaactcagtttgggaagttggatgaggtgattaaagaattggaacaaaaacttgatagattacagagcttaccagcaggtgcccgggattggaatgaagaatataatacacgtcgatcacttaatgaacacctgactagaaaagaaatttactggaaagagagggcaagaattgattggctaa

SEQ ID NO: 98097 - DNA, 1355 bp, Cannabis sativa
tcataatatacttaagcatgaaatggatccacatatcaaaattacaaatatttatttgaatcaaaatatgatacataaataatggagccacggagccactgttaggaaaaatatgcaacaggatagatttattttcatgtttaatttacaaattataacataataatatgtaaaataatttagaatcatgttactatttgatttataataaacatatattacgtaatattttatcatttctaatgctaggtattgtaagcaattaaaactgttatattcttttttattcttcataatcttccaccaaagcctttgaattacctaagctagtgtaggaaatttttttcaaactttgtggttaaatttttagagagaagaaatagagataaaaagtggcgcatagagagatagagagacagagagaggaggatatgatatgatattgcatcttattataattactacacatgtaatttgaaactttatttaaatgttttttattaacatggcataactttttgatttaataaactctctcttattttcatttaataagttgaaactacatgtgtgtaggcacatgtggggctgaatcggaagctgcagagtctgaatcgctggagtgtgggccaaccatagcctttgtaggatagccagccacctagctagtcaaagccctagccagccacctcctcaataggtggactggccatctcctcatcaaactgccccgaagatgatccttctagctagacggtggcctggtatgtttctaacctgctctcaaacaatgctttcccctgggccaatatatgtgctctctaggaaagaagcatccctcatgtaagaaagatcagctctggggttgcgcaacttgaactcgtagatgagttccaaagataattaagccaacatattcatctcttatggcatgctggccatcgagggttgcgtcagctctccccacacctcctgagattagtctccaacctggagttgtcagtagcaagcaaggtgttctcctgattcctagtgtcgagcatgacctctaaaccagaaatcatgttctggttctgctggccaagagcctccatatcaaccaaagccttgcccctcgccaagagatcaacctctaaggtctctacctactcctaaagagcactcaaggaccccctagagttgccatgcaaaaagctcagcttcataaaggcttgaaaataccataaggtttgaaaattaatatgaaaaaagttttaagtttcatcaatacaataattaacgggttttgggttggacatttacatattagacctaaataaatataaaaatgagataattacataaaacaccatttt

SEQ ID NO: 98098 - DNA, 871 bp, Cannabis sativa
taatttcaccacacaattaaacaataacaacagctgaattaggtttaaatcttcaatagaacataactcaagcttgccctacacaactaaaatgagaacctataaacagaattcaaacacaaaataaccttaaaaccttattttaaaattaccaataatataatcacaactcatcaatacaaccaagcactaagcgcaaagataatattttaatcttccacatacatgcatacaagaactccaacagcaagaagcatactttaccaacttaaattccagcaataaaaacttaaaagtaaagttgtagaaagctacctcaagcttccaataaaatcaagcttcaacaccttcccaaatccattcttacacttcaacaaaatttcaattgaaaagggtgcaagatgatgaaacaattgaggaagagagagtaaaagcggggttcgattttagggataggaaaattagaaaaatatattacaattcctttaaaatttccttttgttgaaagttattcaaatatgcaaaatgaccaaaatacccctagggccatataacacacatacatgcatacaagggaaattaagccattttcatcacatatcacatttctcaaataattttcagaagattcctatatcactgtaatgccaatataaaatcccaaaattatatttttgccccgatcccggttcggtccgaaatatccggttgtgactatattgcattgacttgtcaaaaaacacaaacacatgcagaaggacaaaataagatactatataataatatagtccataagcgcacaattaaattaaatttactattttacccttctcgggtctacaattacgaaaatgcccctagcttaccaacg

SEQ ID NO: 98099 - DNA, 2913 bp, Cannabis sativa
cctaaataataataggaagaaagctttcgaacttattgaaaatttgaagtgacccctcatattttttaaaattgcaaaaggggtcaatataattgtccagttcccatcttcaattctttctagggtttgaagggttttcgcaatctactatcttcttcatcttcgatctgcttattccttttcaacaaactcacccttctccaatggcgcctcctccaggaccctactccggaaccagcacccttgctttggtaaatcaatctcttcttcttcgtttcataatataaaaagaaaaatctgaaatagttaggacaaatttcgagttgaccttcttgcttttcgcttcgaatcttcaattttcatttcttcggatgctaaattcaaaggggggtttttgtgtttttgcaggtggctcgtgcttctgctttctcaatcggcctcgtttatggaagcctcaaactcaagtacctacaggtacttcattatatgctcttctctatcccctcaatgtctcattttacgcatccaatttcaaagaattaaactatgaatcacgatctcactgtataaagtaatacataattggaatcataatgtgtagaatcccaggttacgaaagtttgtccttttgaggggaatacatgtttgatagctaaatttctggtgaagaattggggctggtgtatgtatacattgtataagagtgttctatatgttaaaatatatctcgatctcgcagagaaagctaggagtcaaatacgtatagattctcaaggatttttcatgatgccatcatattatcataagggaaatctgaaattcaacttaagatgagatagtttatcctaaagcaaccaattcacacccattataggtaattatgatatctatggtgcacttaatgcttagatgtgattgtgtgagatgatgattcattgttgttggaatcatggatgcttaggaatgataagtaaaaaatttagagcaaaaggaagatgcctataacatatttaacagtatagacacagttatatgatataccaagttatatgtcctttttaggtgatcaaaatgtaaatatattttattagtaaatattactattcactgatgtatggggtgaggttggtaatggtggcatatgctgaactttcctgctttcttggagctattttcaaatggttcagtacatgggcaatgcccattttgctaatttttgtatagatttgagtttttgagtgaagtgtgtttttgctttttgtaaaatgttgtcacccttggttgatgcactaactaatggggagttaatagcctttggctgtctgcttgacaagtcaatatttgcaagttctgatttcgaatatggtaactaaaaagttccatgtagcatcattttccatcataacaatttttatgaatgtttctgcaaattttaacaatcatgaaaatgtttgtccttctctttctctacctgcaggcgaaggccaagtctcataagaaagcagaagcaaaggctcatcactagaataaattaaatagggagtgagacattgcattttgttgggcatggaaataatgcgtaataaaaattgacagatatttgtcttttcttgatatttttgttgcctatgaagaacaactttgctcatacttatgtggtttttccgagagtaattcattcagtacttgaaatacatttccaagtttttggccttcatcaatgaaataggcacacttgtgttgattcacattttttcttttttgaggcctttacatcctgattattgttggatcaacactattgtgttatgacattcatacaagtataagcttctcagatcaatcaagtaattaatgtgattatctaacttgggaaaagggaccttccaatctccaaagtagtgcttaatatctaaatatttaaagctgatatgggatggtagaggttcaagaacagtctcatgggagctatttaattgtgaaattgagcttccttggcctcttcattgtgttattctctctttataaaccttccaaacatattttacaaagctttgttcaagtaggaaaatctctcatttttcatgagatgttatgcaaaatcatgcatgatgaattctatggcattatcataatcatattcaaaattagttcactgtcaaattttgaagactaacttaacccatttattcaaattcatgttggtagttcatccttgaaagcaaacaagagtcctatcctacatgttcaaacttgacccattggttcaaactcatgcttaggggtggattgtatgattttagtactatattgtgtttgatgtagtataggactaaatctagtgtagataggtttttttgtatataatataattatattttttaataattaaatttattatattgatatactaatatttaaaaaaaatatatatatattgtgagaattcatagacattatgaaaaaaataataaatggaatgtaatgtattttctaataaaatatatttttaattttatttgttaatagaaaattatgttaaataatatttaataaaactaaagtaataaactaaatatttttttaataaaaataattaaatgtttatgatatatagtttactattttaaaatttaaatttatattataaaaataaaaaataaacagaaaatattttaataaaacttaaaattagcatgacttataatttcaaataaaaaaaacttatattttaatattttaatacatatatatatttttaaatgtagtttgaaaaaaaaaatagtttctaattgttttatccaatccttagttaaaaaacataggaatggacttgtacaatcctaccatgttatcttatgtatggcggacttagaatttaaattgaaaggtcgtactttttttttataaggg

SEQ ID NO: 98100 - DNA, 530 bp, Cannabis sativa
ttttttttttttttttgagatttagggtttctctcttttttctttatagattctctctagaagttattagccattgtttgatttttttttgcctaaccagaactcgccagccgcttctcaccttatgtcatggctccggtcgggtcttgttaattctcacactatttttcgatttcactagaattgttgctattcttctgtttgagtgtttttttcttctttgtcttcttttgttagaagtatgtctcgaaaatttaaattgttcattagctttggattgcatcttcactgatcttaatcctcttagtttgttatttttatttgctaagtttttatttatgtttatttttattttcaataatagtgttgctacaccacctcactattgttatggtggtagggctttttaacatggtaaggattttactcttgattcttttttggatattgagggaatgacttaatagacaattattatcgctatgattgattaaatagttgtttcctatatattattctagattgaataa

SEQ ID NO: 98101 - DNA, 771 bp, Cannabis sativa
tcatacctacacagtcttaaaataatcacacttaacctttcccaggcgatgtgggattttgcacagctcccgatcttactccttacgaatcacaggactctgactgtcacaatcacctccctttgggggtctgacgtcctcgtcgaccaaacttctggctaggtaaagattctgagattatttttaacgtcctcgtttcaagcttccattgggccttctcccacagactaatgactcttatacacgggtggtacatcactcttggttgcttcacaaaattacgattaaccctgtagaccaacacgagtctttccagcgtactgtcctcactcgaccgcttcttgagaaaacttcttaggaggtcacccatattaattaaaattacctcaggtcaaacacgtttaacatgatgggctaccaaaaataatatgtatcttgttgatataggtagtaccaatcaatccatttaaaccctcttcaactgtgtagtctcatacctacacagtcttaaaatcatcacacttaacctttcccaagtgatgtgggattacacagctacctgtcttttcccttgcgaatcacgagactctgactatcatatttttctcttacaaaattagaatacacattgaacactacaattttaatttatatataaaataatactacaaaaaccaactaccagctttagtgacaatcttttagtcacaatataattttttcgtgactaaatgtgactttcagtcgcaacaaaaagttacttgtgactaa

SEQ ID NO: 98102 - DNA, 544 bp, Cannabis sativa
tgttttatatagtttttttttattgttttcgtattatatatttttatagatcgctgtaaaaatataaatagaaaaaatatttgaacgtaaaaatgtaaaaaaatttataaaaaaaaaatatttaatgtaattatttctaaaaaaatatgtgagaatagagattaaaattcttaacggaaataagaacgtaaggaacactccttgtgcccgtatgcatagatacacttttgaccatttatatcatatacttttaaataaatggttatatttttacatatgaatcgatacttttacatttaattttgtgcgattgactaactatatttgaataggtatagattgaaagtctattaaaaatataactctgatattatgacaaaaaatatgagattctatcttaaaattaattaataatgagtgaaataatctatgttcttatatataacttaatacgtttatatttaattcatgtaaaataatactccctaatatctcttaatatatatctcatatttatgactatttattttagtcatatagctta

SEQ ID NO: 98103 - DNA, 761 bp, Cannabis sativa
  modified_base (433)..(442): a, c, t, g, unknown or other
  modified_base (590)..(593): a, c, t, g, unknown or other
cctataaatattgacctagcctcaatacgaaggggatcaaaagaatcgctttaaatagggattctaaagaaaatagtgatctaagagaattactcaaagatcaattgtaagagctttcaaaatggaagaatactatgttccttctcctcagtcaatacaatacaaggggagtaggctattacaccactcacggggccaaacctctttaaaatctagtgttctttttactttatcatttttgttctcttttaattatattattcaattgcttattatttgactcattctcgttggctaaaagtgaggtcaaaaagaacatatagttattcatgattatagtgttgtcaacacggcggaatataatcatgattatatatttcaaaagtttaagtcccatgatttgtcagtacactggatttacactgacatgatnnnnnnnnnnaaagtatacttacaccttggataggttttatgtcctttctagagcattggcaaagtattctagtatcaaatgtatggagcgtacatggtattggaccgatattgaacttggataagatatcattaacttaccgttatatctttctaannnnatatcactggttgatcttaggtctgtagatcttaatcttgagattgttaggttcaatctcaattgtattatttatgggcttagggttgttcgttaaagtctgtcggctgaaaacttacatcttgggaacatgatagtgtacttcagtggcagtgctaatcatagatat

SEQ ID NO: 98104 - DNA, 505 bp, Cannabis sativa
aatgcccttttctcaggtttgcaaagctcattgtgttgttgcagcatgtaagttttgtcagaatttaatcgtatattttgctttgcatcgaatcaaaccacatactccactgtttttacttgagtttcattcttgcgaacgtactcaccggtgacagagggtgtcaagggaagtatatcattttctttttccagggagaatatataattctgggattttatatgtgaaacatttgtgcagctgagtggatttagtttatagtttatttattattttttttccccatcaatttctaaggtttgtttggagtgtggattttttttttgtaggtaagaaaatgtagagaaataaaaatgcaacattttcttctgttggatacagtatgtgcaattttgtttggtgtttgaagttatttcaattatataatattaatttaccaaaaatgaaaaagaaaaacgagaaaattgtagtaaaactatccgagttacaatttctgctatgctta

SEQ ID NO: 98105 - DNA, 655 bp, Cannabis sativa
  modified_base (28)..(41): a, c, t, g, unknown or other
aaataaattaattcacaaataataatannnnnnnnnnnnnnagtgctaattgcccttactaatccaaattactagagcggtcattacacaactggtcatagaagctattttacatgcataagaggagaactgagattcattcttggtgtctttcttcatcagaatttgaaaatctgcactacgaaaggtaaatttatgtattatttttcttttagatctattgtcgtgaacgagaataatctattttggttatggttgttagaattgaattttttttcatgaaaaattataaatttgtttttatgaagtttgtgtggttcatcattcccaccacactttcttgcgctgcattcacattatcataataaaaaacgaactgttggttctgttaattctaagtaggagtgtaaatggatcggatcgaatttaatctgactatgatccaactcaatccagatgatccgtcccaccccactagatcaaatacttggatcagattaaattcggctttacatattcagattaatgtatctaatccaacccgacttatctttttttattttattttattttttttaagaattttagttttatattaattttaattttgtattagtattatttaatacaatactatgtttgatattgacttgta

SEQ ID NO: 98106 - DNA, 1066 bp, Cannabis sativa
tcgaggtttttgattttttccaacaatctgatcattcaccgagcatctacaacgaccttcatcagtgggtaagtcttcgtatctcacttttttattgttttcttgaatttgccattgatgactttaagctttttaaagcttttcgaaatctttgattctcacattgtagtgtagtcttttttacattgtaattttcttgatagctttaggacgtataatgtatgactctatgataaaaaaaaaatattggattttaaactccatttagattcttgactctttcagttacagagaacattatttgaatttttgaaaaatagaacgtttgattcttaggagcctctagccagcacacagggtatgttcgtgaccctggccggttcatgcatttaatttaggaccttggctagttcgtgaccatggccttaaaaacctgactggttcatgactttgaaccaaatacttgtccatttcatggcctctgataaacttaggttttcttgtaacttcattggccacttcatcataaacatatttggccagcctatcaaacttggtaacatattcagttatagttatgctaccctgaactagacgtgcaaataattcttctacttgagcggcacaaataatggatttattataatatttctcataaaatattaccctgaatgcgtcccaagtcatggtattcagattatgaccttgagaaattatctcccaccatatctgggcatcatcacgtaacatgtaaatatcacatcgtacccagtcattatctttgactcgcataaagtcaaagatagaagtaatcatactcatccactgttctgccttcagtgggtctgggccacccttaaacaaaggagggttttgtttcctaaactgctcataaattggttccatacgatcccccatattcggtggcactacctgaggtgcctgtataggtgcatgacgagcttgtttctctcttaggtcttgaatttgctcccattgctgcctaatattctctggcatggtagcaaatatttgttcccaattctgaggaggtggaggatgctct

SEQ ID NO: 98107 - DNA, 698 bp, Cannabis sativa
  modified_base (555)..(561): a, c, t, g, unknown or other
ttatttttctattatttttatatagtgttgtttgtaaaaaatatttcaacttaaaaatgtaaaaaatttacaaaaaaaaaaaagataactgaggaataattttttttttgttctgttattcaaaaatactttaatattatattttattaaaatgtatccacttttgtgaatgagttgtctaatataccatcactatccaaagtctagcacataattttcattaacctaagtgggtatagtggggatataatctataaaagtgagtatatattaaaaaatatgaaaataaaaataaaaattaaaacaaataaaataagggtaaataccattttggactctgtgttttgcaaaagttaccaattggactttatgttttgttaaatgacaaaatagaccttatattttctaaaatagtaaaaataggactctgagctcaatttttaaaaatttattttttaatataactaattttaagaccatttctaacacgagcagatacagaaaatgtaaccagctttgtcataatgtctctaaatcagattattattaagtttnnnnnnnacaaaaaattagttcagggtcctattgtataattttaaaaaatatataatttatattatcatttaacaaaataaaaaatccaattaataatttttacaaaacatatttaccagaaaaaataatactaattatcccaa

SEQ ID NO: 98108 - DNA, 727 bp, Cannabis sativa
tgttttgctgctatcgtcggaattcttgagtggtctaagagtatggctatatgttttattgattttttttaatctatagaacattttgcttatttttattgcctctgtattataaactcttgatattgagattttcatttgttaatgcaacattattgaatcatatttttaatgattgcctttgtaacgaagggcttgctttcttttgttttcactgattctaagattggtgtaatctgtgagaataatgtatgaatttggggtaaggaagcatttatattgatattgtttataatttgcgaaagtgtttttagtccctttcaatttgcgaatacaatttggttcaaaaaatttatgaatagaaatggaaattttttttttcttttcaaaatttaaatttgtttgtggggagatggaagaaatggaaattgagtaagaaaacaatgatattacgagcaaagcaattgtctgtatagaacccaattcttttttgctgtttcattttaatttggtgtattcattgtaaatcctattcattattatgtttacatctattttcactcaagttttctatttttaataaataattgaaagtaatgcataacatttgataatttgattagttttgtgttttggtgttttatatttttgtaatctaattcaatggtctcactctgacttgcattgtctatatttcaaggtgctcaagctcaaatcaaggtttcaa

SEQ ID NO: 98109 - DNA, 1734 bp, Cannabis sativa
tgaaaataacatctaaataacaatttagatgtaattggaggtaattacacaatttagtatgtttatctgaccatgtaattatactgtaattgtgtaattggaaattattgatgggttccaattacactcttcaattctcattgctccatgaaaattgaatgtaattacaacgtgaaattacaaaaaactttttgttttaaatattagctacaaaattatataattactaccctaataattagactgtatagtaatcacatagttatttccaaacacatgatttggttttgagtgaaatggattcatatattagaagttattgtcatggtttgtgaatcttatatctaactaattatatgtactttcaattatttgtgtttaatgagattcttgtacattaaataattacctaaccttaattcgtagtaaaataatataatttttaaagtaaattgtggtataaatatttaaatttttagtttgtaggtgatataaatttaataattttttagcgatataactacataagtactaaatgttagtaaaagtgtaatttttttccaattttattagtacaaattttgttagtgttttaaacatgacacatataaaattcatattctaaattattaagtctggacggaaacatgtaatattttaatttttttaataaatttagaaagaagattgtattgacaaattggatgaaaaatacagtttaacgttggatacttatgtaaactaattattaaatttataccgattacaaacacaaaattttaaatacttacgtcataattatcttaatttttatatggagtaacaaaattatgtgattctcattaatagcatgtgactctgtgagcattatagttgtatattgatatagttgatatcataatgcaatgcttattgtttaattatgtttaattattaagagcataatatatgaaagtcattttaagtaatcgtgcttggtaaaattatgtagtttttattgtaattttctacttcgtacatgaatctcatattatagtatcttactattgttttattttttttaaaaaaataaaaataaaataagtcataattatagtgtttagagtcaaaagtgatgatccatgattcaaatacaaaactccaccaaccctaaggcttcctgctacaagataaaagtatgactttagcgagtaagctaaggaacaacatgaaaataacgtcctcatgacaaacaacaatggaaactaataagggtcatggccccaacaacaaaaatcgcaactcaaaactcgtctttgagaaatcttgcaaataagggacgaagctctaaaccgtctcaacaacgcttcatcaatgatttttaaaccaatgtcagactaaaggttcccagggactgggtgcaaaatactattataaagaatggcactgtaaaaccaaccctttgaaggattcgtaaaccttattgagtcatttagtgttcagacatgaaagacacccaaaccatcagttaccagatgagatggccctatattgcaccttggacagtaagaacttagatcgtaatatttatcgtcctcttcaggtgatggcaacttcccattgacaaattttactttgtttatggtaacgagggcaaccatcattgaacatctccacgagctataattttcacatctaatcaagatcttcgacaccagactcacaccaagatgatcgccatgagagagagagaga

SEQ ID NO: 98110 - DNA, 1267 bp, Cannabis sativa
ccagatccataaaccattttttgtggatacattcgatcggaaaagatctattatttaaagtagttcataggtttattttttatttttgttttcttttaaaaaagaacttttttttttgtaagttttaaaaaaagaacttagtcctattatttgtttttatatatttgagtttcgtcattttttttttttatgaattgatgaggagaccaaagaatatttcttgaacctgatatcaaggtaataatgtgacactgttagacattattgataaagttattaattacatgaaattttaggtttgggagttaattttggtttgtcttagaatgaattttattattctatatatacattctctcgttcccaccatcttttgtcttcatctctatatggttcaaaacaatgttaattgttttatagacaataatctaggaagaggttttgctgagtggaatttagcagatcattgaaaactggatttcttttatttctattaatttttttatttttttaaaaaaaataatacactttgcaagaatatttaggcaaacgtcatttgtttgtatggaaaatattaaccagtagtcataagatctagtcatctttcagtcttgtggtggaccaaccatagaaagacatatatagacattgcaacttattggacccaactgatacatataaatcatcactctctctctttctctctcttttcttctctctccccacctatttttcaccctcttcaataatagtactacctgaaaaagaaaattaattttcctaaaaaattaaatctcaaaataataattttcttcagtattattcatgacagtgataattcattggatctgatcaagatattttggagacctgcgtgcctctttgatcaccatatattcaagccttgatttgcctactatggccatccccatttgtggtatatattctcttcttctaatataggcagagtctctctctcatacattaattttggtatatattcatttagtaaaagaagactttgagcctaggtgcattttttcattattaattatcattgtacatttaatagaaagagatatcgatgtatatatcgtatatgtcttttaaaatataaataaacaagacacaaatttaatacgtattgcatggttacatctaagtatgtatcatccttcatgtaagtataaaatgtaataattatgtatttatatacattgaaaaataaataattatttgttcggtcccttatagtgaaaataataat

SEQ ID NO: 98111 - DNA, 1660 bp, Cannabis sativa
taagaatttttatatatttttactaacatgaaaatcataggaagttagacacggggtacctcgtatttaacatgcgagtctacactttacaggaaattggagaagaatttgtggaatttcttgagaaggaactcaatatatcagatgatgaggacaaaacagataattacaatacaggtcctcagaaaggcaatccttcaacaagtcctggaacagataaaatggaaggtgaaattcgaaatgaggcaggaaaagggagcaccattgaggacaacattgatgagatagaggctacccttgctcagttaaaaaaagaattgggtttgtaaagtgttagaaattttattatttgccacttttataacatccaagaagaaagtgaattctcagctctaaacaacacaattgatcgctgttttggccataatagaaggaaaccgttactacatctacaaaatctgtttgattagctcattgttgtagcaaaatcagaaaaataagcattaaaactgtatcgagccagtaagctgtctaatctgtttgattagctaattgttgtaacaaaatcataaaataagcattgaaactgtatcgagccattcagctgtctgtgtaaagtggggacaataacattctagaacagcaaaatcttatgtggctttaaaaaaacaaaggttagtccgtgatgaagattaaaagtaaagcaaatttattaagaaaatttttcattccatttgaatcatgtctagtgcaaactaacaccaataaattaactcaagtacacttagtacagttgaaaagtctttgatctttatcttcaatatgaaatcctagacaaacgcaatgtaatcgatgaaacaaaaaagactaaatctaatcacatctcaaaatctctctccaaatcggaaaaataaagcaccggtgcccgagttatgatcaacagcatactcagctctcactaaacctagtttcacgccacaaccataagatgaacctttacccattctcctgtatacttctgtgggatttcccttgacatccttagaacttccaagatcattcccatgttcggcaaaagcatatacatgtgtacctctcactggaatcctcagctcagctgcaagctgtaataagcaaaaatagaaatgaaacaatccggtttgtgatcctttccctctccaaattttaaggtaaaaaaaggattatcatagtaagttaagacttatgcgagctcctacctcaaggatgtttcttgctgcgcctatctcacccatgttataacctctcacagaataggggccaccaagggtgaaagcatcataacttggaaggtcacctacacaaccaccatagtgcccatgaagtacaagaacaggtgggggtggtttaccagcaccttcctccacttctttcagctggaaaaatcgagtgagtgtcaactggtgacgattaaagaacggaaaattgctaccaacgccaagaccttggtccacctacacataaaatagattttgcaagttagagaattaaggcaattacattatgaagatcaaacaaacgggaagaaaacttgaattataagtagaatgtagacaaacttgtttttcctaacctttaaacccagattagtgtgctttatagtttttttgttacagtttag

SEQ ID NO: 98112 - DNA, 719 bp, Cannabis sativa
tattacaattgtatatatagtatattaatcatgtttggtgtgtgtattctattaatttttttaagagaatttataataatctatgtattatacggtagtgattttttaaaacggtagaaaaaatgtgacaaaatataaagttatttataaattagtgaaatgaaatagtcaatgacataagtgtaataaaatgataatattatgactaaatattaagtacaagcactactcattgaattattttttcgaataagacaaaagattttaatcaatcatagtttaaatatgttacattcaagaccatgatattataatgtagttgcccaattagaacaaactagcaaatgccctacaaatggggtattttttaaattccccaccttacaaaaatcctatatatattaacatataaaacttgatatctcaacacaataaaatatattaatacatatattactattatttaaatagtaaaacataaaatataccattatgctcacccatgaatgacttttacacaaaaattcttatatatccttgtattctcaaaatcttgatttatctcctcttccattgaaaaagaataggcttttgattgttagagattttatatattaatggaagataatcaagatatatgacaactcaattgtaaaataatacaagaactaagagattgattacataaatgttacaacacgtacactatatatatgaaa

SEQ ID NO: 98113 - DNA, 626 bp, Cannabis sativa
ttcatattccctgagattgacatgtgttgccttctgaaatactagccgaatttcgggtataacaattgcgccttaaaaagtccatttttaataaaaggtgctttttatatgattatcgagagtatttttgtcataatccatttttgacaatatgcatgcctttgatttttgcggttttgtgattttgagggacatcattagcattaatgagccatcctttccacttctctatcgtttttattggttggatcttttacattttgatctgacgattattaacttcaaagtataaaatggtaaagaatttatttttaccatttttgtgtttttaaaactcaagctttctgaaaattttcatccaagcttcctgaaaccgtgcatgccctctttatctttgacattcttcctgcaaatttactcagacttgctctttgactccatgtgttccaaaaactcatcacgccgttcatcacgtctccatctacaaaattttccaacacccgactactcaacttcacacaataagtgtctcatccccttctctttttttaagttttctgggttatgattttcttgcattttgtcactccattaggtttagcaattagggtttatgttttctgggt

SEQ ID NO: 98114 - DNA, 2738 bp, Cannabis sativa
cttctttattttgttaagaaaaaataaataaaagtttcatagtttatagttaagtgagtgagtagttattaacaaataaataaaaaaaaaaaaaccatctcttcattttttttcttggttaacttctttgtcaaaagttatttaaatctaagtctaaaacacttaataaagcaataaacttcaaaatccttattagctcatcttaacaaaaactaccaatataattttttttttcttctatattttggtctataatttttgaaataataataatgataataatatatagttgattaataatatataaacttactccacgaatatcagccaatctcttagttgcttcttcaacttttcccatttgagcttgaactttttctctaacctccattttccttctttcaatctcttcttccttggctcggaacatagccaacgcagacctagaaagctcttcttctttatcctccttgctcgggctaacattccccgagtttttaggtattatcatcaattgttgttgttgttgttgcggcctactcggtgttgtcattcttcttcttcttcgaaatctttcaaagaaagaagaaaaaaataaaagaagaaaaaaattctcaatcttatattaattcttcttactttgttttagtagtagttagtactattttttttcctctttgaaattatgaataatgatagctatctttctcctgttgaagagtatgttacaataacaaaatgttggctttaaagatatgaaaaccaaaatatagaatattacactaagctaaggcttgaaattaccaaaatgcccttgttctcttttttcatcataaagtggattttaactttgttgaatgaagaccaactcattaaaaactcttccataaacctttccacctttactcaaacgcttgcttaatgagtacccatttaaaaataaatgtaggtttagttttgtatgtatagaaaattattataaattttaatactttataaatatattaaggtgtagttaatgtattaaatgcatagacaaatataagttaattacataattcctaatattctagttgactgcgtgtcaaaaaaacttcaaacatattttcgatactgtaaactatttataattttttaaaaatttacagggatatgttataagtataacaaatactaccatgaaaaaaatactccgacgtgtattttcagacactgagattgagaaaaaaaattataataagaggttgtaattagcaattctcattaaatatatgtcacataaacatattaaaataagtgattttatatctttcatattcatattatcacatatttttgtatatttgttgcatcttattatgtatttcatacattatactatttatttagctacattatatgatataaaaaaatgatgagactttttggttggatgtgagttaggtatatgggcaaactcaaccaacaactgcaattctcaaagctttaagtatgggaagccttgtattttattatatatatttatacaaaattatttttgtacaacatatatttgttgtaattattaaaatgagtgaaaatttgttgaaaggtccaaaagggtattagaataattatttattttttatgtagaaaaaagtggttaagattgaagtgttttgatttggagtggacagtaagaggttacctatggaggaaatacttaataaagaagacagagtaggagagtttggctttatcacatatacattaattgttattccagcttgggtttataagacagaatcttcacttttaaaacttaaataaattgttctttatttgcattttacactatctaagataatatatcacatttaatattatatggtattttataatgtacatccttaaaaggggtagatcaatgcaccttttatttgtatcaatattcggaagaattttttagtttaaatattttcataatcgtgtacgttatagttacttaaaacattgtataaaattttaagaaattcagaataatatataatatagaaagcagtgttcaaacaatctgcttcacacacgtataaaataaaagaattacacgtacaacagattgttcaaactctattttcggcgtgttaaatttttttaaaggtctcataatttggtaatatatcttagataactataatatacatgactacaaaataaattatactgaaaattttctcatgtattgaaataaataagagtgtgttggtacattcattttaaaaaggtgtattataatttttttgttcaatattatataaatatatttacacatacacaacacatacactttacagcaatctcatgattctatttagagtttccaattttctaggatgacaacaattttttaagacaaatgatatttaattctttataattgcatatgaataaatgattttatagtagaccttttaaaaatgagtgtatcatatatattttatatttaggaccaatcctaacaaaatttatacaatcttgcattgtactaattattaaagatattttatagttttttaataaatttagaataatctactgttaaaatagttaaatttaaatataatatttcatacgtgtataaaataaaaaatatataaatacaataaaatttttcagaatttatttttaacatggtaaattaacacaaatttatcaaaaatttacatagtgtcttaaatattgatacattatataatttt

SEQ ID NO: 98115 - DNA, 670 bp, Cannabis sativa
cacacttgcactcacatggtttttggtcgatatataagttaacagtttgtacgtttctgtctcgcagaagactattcagccagccaagttgtaaacttactctacaaattgtgtttctaatgagttgttccatgccaaatgtacttacgatttcgtgtttgagttttttgttcttcccagctcaacatgtgtcttcttctgatgtgctcaccaaattttgggtatagcaattgccccttaaaaagatctttttttaataaaaagagcttttaaatgattacaaagggtatttccgtcatgttcctctttttgaaaagacgcatgtcctctgattttggcggtcgtgcggtttaaaggtacatcagaattaaatgaccatcttttctacttccactttaaatcatgtccgtaggatcaaatctttctttgatctaacgaagcctctatcatgggtataaagtaagaaaaaaggaaccacctttgcattattctctccattttagaaagtctgaaaaatctcttgagcttcttcatcaaggatcatcattaagtttttccgaggacttgcatgtcatctctgtccttgacctttttcctacgagtttcttccgacttcatcctctcaaagggatccttgcttcgttcgaagatttgtagatggagtaaccag

SEQ ID NO: 98116 - DNA, 518 bp, Cannabis sativa
  modified_base (170)..(174): a, c, t, g, unknown or other
catccgaaactagcatactttgccaatgtcttggaaagaacataacatttatccaaggtgtaagtatactttatcactgatcatcacatcagcataaatccagtgcattgatgaatcaagggacattatcattcgaagcatataatcacaattacattccactgtgttgnnnnnactgtaattgtgaataactataggttctgaaattaacagattttgtcacattaaaccataacacatgaaaactacatgtaaacataaataatttctaatcttctattgataacaaatcagattgtattgaaatgggttttatttcgggcataaaattccaacaataccaagggtagataaattaagcaaacaattggtgaacttgatgaaaaattcccttggttgctgcaggttgtagggcaggaaggagatgaaggaaataaagatagagaaaggctattttcttaatttagcctaagttatcaactaacatgtatatactctctcttttttttattattatt

SEQ ID NO: 98117 - DNA, 516 bp, Cannabis sativa
cgtgatccgtaagggaaaataccaagtaagctgtgcaatcccacatcgtctaggaaggtcaagtgggatgattctgagactatgtaggtatggaactatatagttgaagagggctaaaatggattgattggtactaccagtatcaacaagattttataatttttcatgttttgtgtccggcaacattggaacgcagtgtttggctattagaatcacatcttagtattttttagtataaccggacagtatatttagacattgggaatgtcaggaatagttgagattttagaatttacctaaattcccctaagtgaccttttatgacttttggtgtgagaagggcaaaatggttattttgcctaagctagtgttttgtcctttagtggacattagtagagttattaggctagttatttgatgattattagtttaataaatcaaattatttacttcatttttacaaagtaccaaaaattagcaaaatagaggatctttatctcttctctctctctctct

SEQ ID NO: 98118 - DNA, 1258 bp, Cannabis sativa
gattataaagtttttagattttatattttttaataaaatattaattagatattaaattttatattaaaaaattttgcaattgtttattggaacataaaactgaaatttaatgaaaatttattacaaaactaatttttatgctaaatatagcacaattttaatatatctcattggagttataatataatatcaaatatttatttgtgtactttcccatgtaacctatatataattttaagtttgcatattcgtacaagtgctaggaaaccttgagtgataggtatcctaaaactttaaaactgtgataaaatatattatatagtcaaaaaaaacctatttcaagggtagaatataataactctttcaaaaaaaaaaaagggtagaatataataatactttttttttttagaatataatataataatatactttaaatggcttcttgtctgtttattttttattttttaatataaatcaaagaaaatatttcattattttaatgtatcgtaaaggtatatatattcttaataccactccattcatagtagttggttccatgaaaattgcaccaagaacatgtcatgatgcaaagaaaagtaagtttaggtatcatttgactaatctatttatatgtatattaatattagattgatattacgtgtgtaatatatgtataattaattttaattagtaatgttcagtgcaatacatctatgtttaatttttttaattagataatatattttattttttaatttttaaaacaattgaaattttgatttttgagaatttcttttagctattgtgactacattagtgtgttttttaaatgtgattacatatatacgtattttatatgtacaataaaagaataaatttttttattgatctctatttataaggattatatattaaaaaaaattttgacaaaatttgagtttgattagaaaattaattatttttaaaataattttatatattatgtctaaatacatattttttaaaaaaataatgatagtgatagatacattcttataatttatagttaggagagtgtgtttataataaagtgtacagattattagaaatatatgtatatcaataattaatttttttttaataatatcattaatcatttttaaaataaaacgtttgtcgtgaaattaaagtataaatatatatttttatataaatgtgattatatatagatataatttttatgattaaatatatataataaaattaatttttttatata

SEQ ID NO: 98119 - DNA, 829 bp, Cannabis sativa
  modified_base (568)..(570): a, c, t, g, unknown or other
taccccatgctaccatcaagagctcatccaccaaagccactctaccccctgacagaaatgccttaaaccaatcggcgaaggtagattctgcagaataatgtaaccccacacccgacctatgtcaacatgattgagaaaaatggcagccaaccaaaacatgaaaaatggttttttcattagaattacaaaacacacagcgcgatcaacaggaacatcttttgtacgcaattgggtacgagttgggagacaccccgagatagctttccaagcgaagtgaagaaccttggggggactttaactttccagagaaccttccataagtcagactccaactgaatatcccattcacctttcagttcttgaagatagcggtaggagctcttaacctagtaaaactcattcgactctttaccccaaaaccaagaatcaacattaacattatcacttagaggaacctgcattatcaactcgatatcccttgcctcaaacaaatcatgcaagacctcaagatcccattgcttacgattgatgtgcatcaactgcgagaccgtgctatgagccaacacannntgtctagaaatgacacaagggttctcatcagaaaccagccatgggacattaagcacaggggtagacacaccagacccgattctccttctagcaccatcacgaaccagtcgttgtgattcaaacacactccgccaaataaaacttgggttaggacctatctcaaccgttagaaaattaccatttggaaagtagcgggccttgtaaatacgtcccacaagagaatcttcatacagaagaagacgccatccctgctttccta

SEQ ID NO: 98120 - DNA, 2199 bp, Cannabis sativa
aaatcaagcaatagaactcaacaactcacacagaatttcatttcaccattaaagctcaaagcttgagcttccaaaccctaacctcacataaacacctcactttgcaaccaaatcagctctaacctacctaaaaaatcacaacctaaccccagaatatcaatttgaacaataccaatagaaacaacaactaaaaaccaaacttcaacatcaaaacctagctcaacatcaagaaacacaaagaaagaaggcttagaaagtaattccttgaatcaaagtactcaattacaactagaaatccttgaactagatcaaataactccattcctagctactgcccagaaaaaatcgagagagaaagatagttatagagagagagagaggtaatttctagactttccctaatctttcttccaacttaaataactaaaaccttttgtttgttttttaattagattaatttctaatcagcccatactttccacaacgacaaaaaagaataaatataacataaagactattttaccctcaacataaagattaaaagtttaagattatcaagggtaatttggtcactatctacccccgctaaactcccgacacctctaatgtctaacaatgataccctgctatctaaaacattctaaatcatatgaaagcgtgactctctaatggcccaacgtcgcttttcaccgcttttgagcacaatcacagataaacgagaaatttacataaatagcataatatacatatattaacttcaaaaatttccacaatatgcatattataaataatatttaatctcatgaataaaccttagttattaattaacccaaagtgctaatcataagcggtctttacacatatgctgttgtggttatttaaaaatttaatattttaaattatttttaaactactataatattatttaatttaatattttaaactattcctattaatttttttttaataattttctttacttattaatttcatagtttctttattacttcaaatttttctatgatagagtatttttttatggcttaaataataatccatatagataattgcaagataattattagaggtttataaaatgtgggagtctctcaacactaagattttttattgataagaaggttgtatgaaaattgttggtccttttaattctttgtcagttatttcacacttaatgagtcatataataatttttttttatattattatttccttaatttttaatttgtcaatcatattatactgaatgtgacatgtaatttattttacatgaaatttaatgcacaataaagaaaattttattatataagtttaagaactaattgagtagcgattctttgcagatacaaaatttaaaaattattgcaaccacatgtgaatatagaccacttttaatgaatataaaatgttattttgcctacaacttcagttaagagaatagaagaagaaatagttaatattctattcaataacttttaattcataactccaaatttaattaatttacatattaatgatagcacaatattttgagatatttattcaattattaagttttattcatatttaagtttttattttaattaatctttattttctaacattgtcatattatttttatatcttatttagatgttattggatgtttatgcgatgtgggtgattttgagattgttgaagttcgtttaacaaaacaaatttctaacaaattagcaagtagatatcttatttttctttcttttttattttaaaaaaagttgatgtcatagtttatttgttttctttttaatacattattgttaatttttatgtcgagtacattaggtcacattaaaaattactaattcaattacttaaattattttatttttaaatcaataatataacgaccgcgcaaagtgcgatcacattacctaattattaataagaataatctttaaattgtaattaattatacatttttcaagtcccaaattaagaaagtatatctctatataagaataattatatctaaataaaaaagatataatttataaatttatttatgtagaattaataatttttatctaaattataacacatgcacacatattatatttactcaaaaataattttattatgacattgtattaaggattgtttattattgtttttatatttttttggtgtttttgaattttt

SEQ ID NO: 98121 - DNA, 2357 bp, Cannabis sativa
tttctatttttgtttattttctctatggtaggtcataaatgtaaatttttttcattttcagtttattatagaaaaaatcccatttggtatatgtcaaagtttagttaattaaccttatattaaatcatataaatcttgatacttaattatactaatagcgatataacactgatgaaatgctaaacactattagtattttttaatatttctttaattattttgatatatttaaagagaaatgctaaatacatataaatttttagagcactcaaaataagtgatttcaaatgagttcttttttctttaaaagggatcaaaaataaagtatgaaatttactccaaataagttatgcaagaaataataatgtattttatatttttcttaataataaatagtaactaaggtcctccctctaggcataattacgcggccaagaggactaaaaaaatagtgtgcgaagaaagtgatatgggtgctcgacccaacgccaaggtatcctctgcgtgctcggctaagtcgtgtttttgtgatgcacagctcagtttcatctatatacaacttttttggtttcaaatcgagtggtccaagtcattaagttggttgagctaacatttaaccataaaacctttcatctaagagaaacggatactaattacttgtaactaaatacaacaatttcattgtaatcgattttatttgtttgcctttgttgtgatatctttccaacttttttgagtaattgcctaatatttagggcatttggttcctatgataaaaatcatatccaccttaagaaataaaagtggaagggaaccaaaaagttattgaagattagcatgagtttgtgctattgaatgaaggcttttttatttctatttaagagtaagattgtgaatttgtgatgttgttcaaaaagatgtacatatacaaaacaatatagtataattatatgaattgtattggattggtagctgaatcttatttaattggcatatgagtcattatttgtactcattcaattggaatgatattatccatgttacattattactatatcaaacctgtcatccttaaatatcaattatattaaaaattggcacataacttatttattggcacaattatacattattatttcaaaatcatggttgctggcctttacttgacaatatcattgagaaatatatatatatattattactaattattaattattattacactaatatcagacagttttaaaaagaaaataaaggtatgacaccgaagaagatgttagtcactaataataccttttaataattctctaaatttattattcaaaccatatacatatagatatttcttaaaaaaaattgtagtacactcttatttattttggtatccaaattctttttttttttcatgatcgcctacgttttataattatataggactacttgtaaattttttaaaaaaatctaaataatttacagtactgaaattgatgttcaaacaattacttgacacgtgtgtaagaaaaaacaatcgtgttttcaataaaatatttaaaccttatttttcgacattgtaaattactcaaatttttttaaaaatttatagacaatcctaaataattataacgtgcacaattataaaaaaaaaaaaaagttgaactattttcttagatgccaaaaagataaaaatctacagatttaatgactttatattagtgaagttaagacaagtttaattaatgtgcttataaattagtttagttttgtacttaggatatataatgatctaacaacatatagtataataataatttacaccaaaatgtactgaacaacacttctattaaaaggtaaattaagtaagagagacacactaattgaatgagaaatgcttaaatgtattaatggtacttatcaccattctaatttctaattgttattgttagggttggttatgtgttaatttgggcctttaagcaaaaataaaaattaggacacagtgaaatagtgaaattgttgagatttgaactcttaggtattactctaaaaactatcactgtgctataacatatagtattatgagtattattttttattttattattcattttttcattttttttttaaaaaaaatggggcctgagcggtagagggctaaggcggccggctcttttatctcacttcagggtcaaccctattggtgtaattatatataacatcttatataatttaatataataatttttaaaaaatatcgttaattaattattaagtaacataactaaaaattactaaaataccacaaagtaccccataacaaacttctaactaaataaatgttgaaaataatataatttgat

SEQ ID NO: 98122 - DNA, 1496 bp, Cannabis sativa
  modified_base (54)..(56): a, c, t, g, unknown or other
agaggagggcaatggtgcggaggcgtgggtggggttttggagagttaagatttnnnttttagggtgtgggaaatggagaagaaataggtaggcatgtgggaaatcgaaaaaagtaggtgggcacgttggaaatgtggcgagaagtaggtgacgattttttaatggacccttataggcgacaatttaaaatcgtcgcctatagtcgcctatactataggcgatggttttaacataggtgacagttttaaactgcctataagggtccattgaaaaattgcattttattgaaaaatatcgcctattttgtttactacgattttaaaccgtcgggaatactaaatttttcctgacggttttaaatagttacttaattttttaacgacggtccccgaaaaaaatcgttttcaggagagtcacgaattctgatatttgtagtagtgatcaaagccaatcaaggttagattagtgcttggaggtgtatgtaacccatgatgcattgtacctttgaggtacctgagtattcttttggctgctccccagtgcacatcaataggttgtttgaggaattgaattagtttattgaaagcaaataatatgtcaagcctagtgtgacttactggagtgctcctatgatactcctgtagatagttggttctctaagtggtgttccatctattatggataaaggctttcttgctgtaattggggtcacacttggtttggtattttccatttttattctttggagaagttcaactatatatttgctctgggacaaatatacatccagtcctttggaaagaaagtcttgttgagttttgagatgaaggtgttgacttgccatgagcatgtaacaacaatattgttaacatagacaagtgccatgataataaatgttgggtgtttaagtataaagaaagatgagtcagctttattgttagaggtactattggacactttctaattctttagcattagaagctcaaattgcaccagatttttttagatttctttcttgaatttttttcatggtgctctagctagcgacaaaacactacaaataacagttacttttaatgacagttttttagtcacaacataaattttttgtgactaaatgtgattttcggtcacaacaaagaactacttgtgactaaaatatagtatttagacacaagttgtcactaatttacttttagtcacaacaagtattgtgactaaagcaacatttagtcacaacaaattgtaattattatgactaatacatttagccacggaccttttggtctcaacataggaatgctaattaataattagtcacaacttttttacttttagtcacagtattttttttttttgaataaaacttagcaacttttattaattaactaggaatcgttaataacaatagaacgcacttcgttggaacaattctccaactgaagcacacgacctgtagagaaacaagaatccctggctaaaacatgagccaactt

SEQ ID NO: 98123 - DNA, 603 bp, Cannabis sativa
caaaccatattctgtcactcttaccggagaagaaaaatctacttcggttgacctatgtggccagtttccaaaggtatggtttgtaccctcctattcctggatttccaggagccctagctgtagagggagcttgcactggagatggacaagttcctgaattgtacgatgacgtacctttgtctcgtataactcagaatattaagaggagagagaaggccctccactaatgcttggccagttggggtccaatttgtgatgctactctctggattaggcctggaggctagacttttgaggaacctgctcgccctttgccaacatctagaggcaagggcaaggaaattgtcgatgattgtgatagttcatcttctgaggatgatggtgtttgatagttgatatctccatcttttacattcttgtcttgcattgaatatttatgacttgcattttgactttgctactttctttttgtagatatgtcttccaggttgagaggcctcactgggggaacctgatgagccttcagcatgactaagggccaaggtagcccggacctctcgtggcagagatgatgctggatcatctctgcctcctcctccacca

SEQ ID NO: 98124 - DNA, 823 bp, Cannabis sativa
ttagttataatcaatcgatccatagtatttgtaatcatttatttcctatattgttactaataatatattctatagttgcaattggatttcaagaattttgcatattaatttctttccatatcctaataaattaatccataaagttattattggtgaatgtaatacaaaatcataattaataaaataaactaatttgtaataaaaatgctatagatatttttgttaaggaaaaacaatggctacattaggatccacacaagatgactaatttaggaaagaaacaaaaaaaacaccaccaataacaaaactcaataaagagttaaaatgtatgttacacataaggcatttcaaaataactacaaattattttagcattagccaaaataacttaccatggaatttttgaattaattgttaacttagagaaaataaagacattaacattcaacttaccttaaactgattaaagtctctatttaacattttaacaaatcgaagtaaaatgactgataccaatatgtttaagcctactcaaactcgtaaagaaaaacatgtattttctaataacatatttattattttataataagtagggatatgaatgaggcgagaaatcaattagaaagaaatatccttgtccataattttcaagtaacattctattttttaaaaaaaagtagttatattctgattccttcgtatggttgttcttgtcaaatttaatattcgaagatgaaaactattcttcatctccattttgtttgtcgtttagacaaataatctccatccatgtcaaatcgacatccctatttatatgctaaaa

SEQ ID NO: 98125 - DNA, 567 bp, Cannabis sativa
aaccaggcctatatctccatcacaaagaaatgagtaaatcttaagcttttaatattcaatgatcaccatatacgacggtttaataatacattttttcttctccaccagttactaacaacccactcaatcaatttatcaacagcccagtgacatgatcaagaatctaattatgttccaaatcctaacgaatcagaaaaggcaaaaatgaaataaaaaaaaaacctaattcgatatatttcacaaacatgatcagcaatcagcaatcaacaagaacaatatgtatctatctatacataatttaaacggtgttagattaatatagggataattataaataaaaaagacaagtcaacaatcgaatagaccgataataataataatagcaattatggtgtgtagagaaagcctaggaaggagatacatacagatgaggggaaagatggcaaggaagagaagaaggccagggctgctcctaaggagatcattgacaggcgagtacagaacggtgatggcggacaccaccgtggtaagaaggatttgggccgccagaataccgtacaccttgcg

SEQ ID NO: 98126 - DNA, 1315 bp, Cannabis sativa
  modified_base (27)..(38): a, c, t, g, unknown or other
  modified_base (445)..(447): a, c, t, g, unknown or other
agagaatggagagagagagagagagannnnnnnnnnnngagagagagagagagagagttacctctggcaacgctaccccggcacttgcagtcgatcgaagaagacgaataagagttgatcgaagaagacgaagaagatggtcacaatggttaatcttcagtttgctagggttagggttagggtttgttgggcttgggccaagagtagaagagagatatctggaatggaattataattccaccaaataaaaaatggaatagcaattccattagtttgggggaatagcattactatggaattcttttccaaaattgttatttttcaaccaaacaaaataatcaggcccattagtattccattccattcctttctggcccattactatcaaccaaacgggcccttagttgctacgtgagttttaatgtgaatttttataaaaatatannnaaaaaaaattattttaaaatgtaacaataaaaaaactcttaattaatataaatgattaattctgcatccagatattcaagataaataacattaatcaatataatattataaaaaaataaaattataaaattaattgaaatcttaaattaaaaaaaaaatacctattaatcacaccatacatattttgttggttgtatattattataaatttattataagtttatatattatatagtatactaaaagagttgcacatgtgacctttccctagtatagatatttttagaaaattccctagtgtaaatttatgtattaagaatttatatatctaacaattacaaatataaataaaatatctaagtagacaaataattatatatgatatctgtctctgaccataaaatcttattacagtatataaaatcagtgccttgatgttttctttttaatatatttaatgacttaataacaaataattattagcatatattcttgtgaagctgagtcacaatcacttgcttaggattatagatacatgtgttgaatttaaagcttattataaaccccacaaaatcaaatgtcattaataagttcagtaattgacggttcacctttgaggcctctccgatttcagaatgtattgtatattaattgatactcactataagacacgtatccacaacttcaacggtggtcattcaaactcattcccttaactgtctttacccattttttattttattttattttattatggattaaaatatctaacaagattgtagatattttattttaatagttttttatatttttttttttgaacttgaattaacagaagaagaacaaaactacaagctagagcaaagaa

SEQ ID NO: 98127 - DNA, 542 bp, Cannabis sativa
agcgcttgtccttttataaaagtgtgcagtatgtagtgtatgtcagactggcttaactccatagcccacttgaggagtcttccgaacgctttcggcttctgtaggacttgtcggagcggatggattgttaataccctgatggggtgagcctagaagtagggtcttaactttcttgaagccattaggaggcaaaagactagcttttcaatcaatggatactgtatctcagcccctatcatacgcctgcagacatagtacacgggatgttggattttttcttcttcccggactaaggctgcgctgaccgcattctcggagacggccaagtatagtaacaaatcctctccgggaactggctttgatagtggaggcttcgccatgtgttcctttagttttttgaatgccttctcacattcttttgtccactcaaattttagacagttcattaaaatatttaagaagggatacacttgtctgttgatcgggaaataaatcggctcagggtagcaacttttctagtcaagctttgcacgtctttgtgc

SEQ ID NO: 98128 - DNA, 509 bp, Cannabis sativa
caattgttactttgtcttcacacttaccgtatctatattattatatattgggtttttggccactaaaccctttcattttgatttgtatttaatcttctaagcttaaattttagcaataaaatctgtcaaactactaaactgttagtaaatttaaggtgtcatccaattaactgttaccatgaattgtttttgtgtgcacttatacacgtgatatatttatatttgtacacttaatattattattttaaaattaaataaaattataaaaataaaaagatatttaaaaaataaaaaatgttataattttttatatataatttttaaataataatattatgtgtatcaatataaacgtgttatacataagcaatctaagttggcagttaactgagaaatatatggatgacaccttaaatttgttaatggttctgtaatttagaagattttaccactaaaattgaatttaaaaaattaggtacaagtaaagtaataattgagagaatttaacc

SEQ ID NO: 98129 - DNA, 1325 bp, Cannabis sativa
ttaaatcaacatacttgtgagtaaattaaagatcctggtaaaataattccaacaatatcctcaaggtgttaaaggatatcgtttatatgacattaataataagaaaatatttatctatcgaaaagtcatttttaataaaatatttttccttttcataaactaaatgaccaatctactaatattgaacctgtaattaaattggtgctaccttctgataatgtcactaacactcctataagtgattaccccactattgtttcagatactaagggaaccactacagaagaagaagatgtccccactgctgcagaaaacagcaatttttccccttctgttcatccttctgcagacacatctacacaaaccagcactaatatttcacctccaattcccaggagatctaccagaaccacaaaaagacctacctacctacgtgactttgaatgttactccaccattcaagacaaaaattctactccccatcgtcttgataaatatatctcttatgcaagactaactgaatcttataaaacttttattcttgcagtaacatccctcaaggaaccgcagacttacaagcaagctatccaattcaaggagtggctggatgcaatggacttagaactcaggactttaaaaaataacaaaacatggatagtagtaccattaccaccaaataaaagagccattgggtgtagatgggtatacaaaatcaaatttaatagtgacggatccgttgaaaggctcagagccagacttgtagcacaaggctatactcaacaagagggccttgatttctttgacactttctccactgtggccaaaatggtcaccttcaaattacttcttgccatttccaccataaaacaatggcatattctacaaattgatattaataatgctttttttgaatggagacctcaatgaagaggtctacatgactttaccccctggactaactacttctcaatatacgaatacagatgctcctcacgtttgcaaactttagaaatccatttacgacctcaaatagtcatcgagacaatggtacaagaagctcatggatgctctactccaagaagggttcaagcaatcctaggccgattacacattattcactataggaacaaatgataatttcgttgccctgcttgtctatgtcgatgacatagtgctcacgggtccaaacatcaacactttataacaagttcaacactctctacatcaacaattcaaactcaaagttctaggcgagttaagatactttcttggattggaaattgccaaatctaaagatggtctttttctttctcaaagaaaataca

SEQ ID NO: 98130 - DNA, 896 bp, Cannabis sativa
aactaagaaaaagagaatgttgattacattaatggtaataaataaaagatttggacatccacataattaatactatttataacatttacaatatttttggtttcttgtacaatttttattgctgtactcgagaaattgttgaagatgcatttgttcctattactccataagttgtatatcatgactgccattatcaaagtatgtatcttgtgctacttatccttcttattctgtaacagccagtgtttctatctgtgaaaaccagttggccaagtcctaagccccaaccaattacacacctgctcaatgacctgctgagagagacatcagtcaaaaaacaaatgagagttactctctactgctgcatcacacaccggacagaggatgctgtcaagggtaacctgaaactgagcaaacttgtcccgagttaaaagctgggaattgattgcttgccaaaaaatgaatctatgattcggcatgtttaaggagctccaaacacacttgctgaaatcaaactgaatttggggaagattgatgttatataacatgttagctttgaagtgcttcacaccagcccctgccttaacaatatcaacccgagtgaacttgtcccttgaagttctccaataccaactagtatcattcgtattattactatataatcaaatagtcaatgattacaaaacctgtcatgtcatgtggtacattatacttttcttacctcaagttctggttcaggtatgttggtcggcctgcttggagaacgatcaattatcacgggtccgatgtgataataatggtaaactaataagtgtttatcctaaaacactacttagcagttgcaaaggacaacctagggttttctaccaaactctgtagttcaaatacactaaaat

SEQ ID NO: 98131 - DNA, 609 bp, Cannabis sativa
aaactagcttaattaaggtaacatatgtaaggataaattggggagtaaacttatagaagcgggtaaatttgaatgaattttaatatgcagttatttttgattaattgataaaaaaataaaagatattcctcaatttatcctaataaatttagaatagtacacaggtccactttctacctatttgaattatatatatatatttatatatatattgtaactatttttgattatttgaatattctttttttttttaatagtttacattctttaaaataatatttaaatattttgtagtacctaatttttacaagagttttttcattttttacacttcaaaatattttttttttacgaaaattcacatagcaacctacataaaaactaacggagcaacttaaattacaattaaaatccacatataaaccatcgaagcaactagcaacaaaaaccataaatttgaaaagattttttttttttttaaaaaaaaagtatataaagtaatctcattatatatatagtaagtaattatttaaactttattttaatttatattaaattatttagaattttataaatatttataagcagtacaagataactacaacatac

SEQ ID NO: 98132 - DNA, 935 bp, Cannabis sativa
tatataattttttgtacttatttttaggtgcatgcattatatattattattattattatttatattagtatatatggatatttaagagacatatataaatacatatcgattctttctttcttatatatgcatgtgataacttatatatatatatatataagtacgtatatgtaaccaaataagtacaatacacacacagtacttaaggaaatctaataagtttaattaatttggtccaagtataggataaccaatattttaatttgctaataatatataaggtatatatatgatatgaagcaataagcaatatatagagattgatttttattagcacatgggaaaaagttgaaaatcatgtggatccatattaatctttttaattttgctaactttaacaaaaatatataacgaatataaccaatgagggcaccaaagccatgtaataataaaagcaattacttttagatattctcaatttacatctcaactcctacatttctcaaagacatagattctcataatttacgtaattaattaaaggtgtttaatggattgaaaagattggaatcaaacctgtccctttttttcacaggaatatcattctatgttttttttaattattttatattgagcattgttacattagtgatagaaatttgatttataggacctatcttgaatgggacgggaattacctggtttaatgggtaacgagacggggatagaattttatataatcgaagcaggtttgggatgggatcggcctaatcattgggccattacacccatttttaaggcccatttttttagaagaaaatacttttcttttggaaaatttacaaaaatactagaatttatgttaacttttataaaaatactgtcacatggaaaagttttcaaaaatactgatgtttttataaaacatcagtaga

SEQ ID NO: 98133 - DNA, 511 bp, Cannabis sativa
atatatatatataattttataatggtaagtcatgtcaacttatttataaacaggttgaattcaagtttaagttttttgattctttttttaaaaaaaaaaaaaattgacaggattaataaatgagtcaattatccatcgagtttttgaatcttacatttgcttgtaatacttaaatttcaatacgagaacacgatctgattgatttttgttttccaataaaacatatcaacaaatacaaatgtatgtacagctagttaattgcatgcctactatatatatatatatgtaaataagtatttggtacgtagctttcgttttatcaaaatacacactcatatatacatataaaaaacacatacttttagtattacttttttaaaacgtacatagtttgatgataaactaattgtaaaactagaatatgaaatatatagatttaaatgtctctagctatatgcacactataaaaaattgctacgtacttttagtgataattttttagtcacaacgt

SEQ ID NO: 98134 - DNA, 567 bp, Cannabis sativa
catgataatagccaccattgaaccgagtctcaaaggtcaaacacacagccaaccccctgactatggcctcaaaccaaacccaaaaaagggtcggagagggagtgagaaaaactagacgacgacatatgcaatacctagatagaaaaccctaggagcgggcccaacatttcaagctaattggaggtcttgggccaaaaaatttaattgagttttttaattttatatgaaaaaaattgtgttttttaattttgtatatatagtggtaaaaattttaaatatagtattttaaaaatgtgattgtgtttttttttaataaaatattaaatgcagtatattaaataataaattaagtatttttttttttgaaaaaattggttacatttttaataaataatagtaaaaatacaaaatataataattaaaaaaaaataaatttaaggtatttttattaaataattttttaggtttagtgacaactttaatattaaattacactaataaaatattatatctcataaaaataataggcgtgcacaagacttgtttaattagaagaagagagtcaag

SEQ ID NO: 98135 - DNA, 661 bp, Cannabis sativa
ggctccggtaagtctcctttaacgattcaccatgttccttctgctcaagaatattctcggtgtaggcctatagaatttgacgaacgccttcttaaatttaggatgccccccactcggtgggaggatcatgccaaggccttttatttttcccacctaggtaattttttaggcaggtcccggatgggtttcagacctcctgcacccatccctctggatcactcagcttatctgtcttctagctggtttctcccctcggacagctttcttggggatgaggaaaccagcattgtagttcaagaattcgctagggctgagttagatagtcagtgtaggactagctttactgtttttctttcctgtgcgtgctttcttatagccattatgacactttgtttatttcttttttcgaagcagccaggccaatggacgatctcctagcgactcttgccgagacctacagcccggacccttccctacctctggcgcctgccctgatggtgactccgaggaggtcctcttgcagcgatcctctaggcacaattgtcttaatcgacgaggacggggaggccgaggaagaggaggaaggcgagatcgtagctccgctggaccggaagcgcaaaggaaaaatggtagaggttgagtcttccaagaagcctagaag

SEQ ID NO: 98136 - DNA, 722 bp, Cannabis sativa
gaaattagtttcctcattatgaaatgtaggaatttttattcctaactaatccctacacacagcaaaggaagtagtcaaaagcaaggtcaatttagacctttacccagtcaaaccacctttttgactccctgccattaatgcaaaacgacagcctttgttttctattactacaggtcgtatatatatatattaatctaaaaccctaagatatatttcttacatatatattatcttttcattcacacacacatcccagccacaaagaataacctagccgcctatctccttattcgttcttctctgaagaacacagaaacactaccaagaaaaataaaccccaggcctctctttcttcactgttcttctttgaagaacatgaagaacaccatcaatacaacccaaaaaattatcccactgcccagaaaataaaaacccagcagaaagtaactaaacacagtagtaaaaatgcagaaaattaaaggaaagaatgcaccagagattttatagaggttccccaatgaaatctgggtacgtcctcttcgagctcgccttgtttcactatgcttcttcaaagttcaagagttacaagcatggattccaactcacaatggtaagagtggtaatccgaatattttacagtatttttccttcctctcttttctctctgtttttctctctaatctcagtactaacagtttctctttttctttgcatgaacactc

SEQ ID NO: 98137 - DNA, 649 bp, Cannabis sativa
acagtccagtggcacttaactgggatttttggacggatgtgtaatgagtaaaatagaagtgaggttcagagggttttaccataaaaaataagttttgggcttaagtgtaactaaatgtatagttggggtatattgccacaaatatctatttttcttattattttgttacgattgtgggtctggagtttgggccgagctgggctgggaaggtttcggggctggggctggggtcggtgccggtgctaagatccagggtctaggtcgggctagatttgagattgggattcgagatctgagactgtggtcgggtttgagtttgggtctaggagtcggggtcggttctaaagctggatccggagtttgggtttggatcaaggtgtcgagtattaaagtaatttttttttggctaaaaaaactaaaaacattttttttaaaaaaaaaattattaaccaaattggtcttgttttttaaaaaactacaattttttttttatttttctttttgaaaacacaattttaaaaacaaaaaacaatatcaaacatacccaggataccgatcaaaaaaatctcttaggacattctcattagtttttctattctattcttcaaaatagattctcaaaattctactttctctattttacttcgta

SEQ ID NO: 98138 - DNA, 713 bp, Cannabis sativa
ccctcacccacatatgtgtctataaatacccttatttttcatgtgcaaagggtgaacaattcatacttgcaaaacctctgccaaaattcctactagctttcttcttcttcttaaagataaacaacatgaatatagagttagggctcttattgtaaacacttataatattcaaacactcgctggcaaggctaatacaacagactcatggattagggattattaatacccgaaccacgtaaaaattactggtctattatttatcattttgtattttttaagctctaattaattgatttctgaaaatcttggtaaacactttcttttttatataagaaattgtatgatgattaattttataattttttaaagttctttatgtatcatttttttaatatatattttttaaaattatatataaaaatatgtttgaaaatatttaataccatttaattgttaaattaatattcatacatataattcaaaatttttataaggaagaagtgtgatttgtttattaattattaatatttttatttttttaaacctctcattttttttctcataaaatctctcattttttagtctattttcttttttaaaatattttttatagtcttttccatagtttttaagaaaatagaaaaatacaaaaaaggaaaaaaaaattacaaaaatactatgggctggcccattaaacatttatacagtccaca

SEQ ID NO: 98139 - DNA, 543 bp, Cannabis sativa
gaagaagcagaggaagatatggatggcttctcactcaggacactgccgatttgctaccgatttcaaataaggtctttgagccagacccatgaatacgactcagacggtgttgttttcgctacgaaacattcaatttcgaagaacttatgatgatctcaataaaaaaagttttcacgatttctaattaaattatttttattatacatataatacgtaagatatacttctgttttgctttggtcttctttaaattttcatgcaaaattgatgcggagaagaggaacacagtgagactatggtggtgacaccagagaagaaggatgataacactgcactctgcacagaaactcaaggaattctttcgggttggaaagataagaaaaatgaagccctaagaaagtgaatcaaccccatttttcaggaacaaagagaaggttctgctcacttgcttccgaagaattaatttcagtttggaaatcaaataataaattttttatctgctaatttatgggtgatggaaaatgtctctacctgttaatttct

SEQ ID NO: 98140 - DNA, 587 bp, Cannabis sativa
  modified_base (264)..(274): a, c, t, g, unknown or other
tgatggaatcctgactttcctaatcgatcgaatgttgattccttttatgtgttaattttgaaattagaaagttacgcgaaaatttagatgggatctaaattatacttccacgagtgaattaatggtactaaacgataacgaagtaattagaaggataaaacagtaatttaaccaaaactaattacgaattaacacaaggaaggctaattactggaattgattatattaatggacactataataaaactcaataaatataattcnnnnnnnnnnnagagttcaattccatatttataatagagtaatcatgaaattaataaacatgattatttggttgatgagactcaataaataatctagtttattggagttcagaattataggtccatgttacctgaatcgccaccttcaaacactgtcaatagtacggataaagagttgtataatgttgttcggaaaaatctatattaaataggaaaaatagtaattatttacttttatattaaataatttattttttcaaattaattatatcggaaaaaagacaaaaattgtaaagaaaattttttaggacaaaagttgttaag

SEQ ID NO: 98141 - DNA, 788 bp, Cannabis sativa
tacttaattatttaattttttatagaaaatatatttaagttaaaaatcagtttttcaaactaatttttgatcaacttaaattagaatattttgaaattaataattattctagaaaactagttattcagatattctttaaaaatatttttaagttaatttttgatcaacttaaatagggatatttttcaaattaaggcgattagttcaagatacttaatttgttatttaattaaattttggaaaattatttaagttgaaaattttattattttagaataacttaaattagatatttttcataaatttattttcttatattttaatacaatttcaaaattttataattatttatcaatagactttctaaattataaacatttaaactctaaggtaaaaggttgaaggtttgaaatttgtgatctagtcttaagaagattatttctagcctcttaggagcgaggagtgggggttctaggaccgaattcggaagatccatatgaaattcaagacaaagtaggtgatggagcatatcgcctaaagtgatgagatggctcacaaatcccaagagcatgaaacgcagaccacctgcgctgatcatactatcagtaaattaagggtggtccatttccttttcttttatctacattttattttatgttttatttccatgtacacctcaaggtaggaatcatttaaataaaatcagaagggatttttcttgtcattttataattttctccaagtcttgaaacaatgtgaccaagagtcaagactcttaatcacttggg

SEQ ID NO: 98142 - DNA, 618 bp, Cannabis sativa
taaagaagttgttgtatgatgtaaggtaaaaatttgaggtaaaatagaaaaagtggagttttggtgatgtattttaaagaatagaataaagaagctgttgggagtgctcttagtcgtgcaaaaacatgcatgagttatttcttcttttttttttaattattttttttttattattcaccataactaatagttaaatgttaaaataagataaaatcatttaaagcaaaaggaaggttggcttgctaaggtcagactctttccatttagaatattttttattatattattattttaagttcttattatattattactttaatttaagtactcaatacaaaataaaccaattcttaaactttatacacataaataataatatatgtagagtgaattaaagaagcttatgaccaaaatttttacgtagttagagcagttaggtcctcaagccacttgtttgctacaataatagtggtgaatactactacaaggtgatgctttacgtgttagacatttatattatataaactgaaacatacatgaatatgaataaagtgcggaataaataaatcatatatgcactataatttaggatcgaaatacctccagccattaaatctt

SEQ ID NO: 98143 - DNA, 578 bp, Cannabis sativa
  modified_base (218)..(220): a, c, t, g, unknown or other
  modified_base (316)..(328): a, c, t, g, unknown or other
tgttctgtaaagttcattttcatttttattttttgattttatttacgtcgggtctaggttcggggtcagatttgggttcaagtcagaggtcgggttcatcgctaggaccgtgggtggatttgggtctgggtcatgatcgaagtccaagatattgattaagaaaaaaaagagttcaaaaaaaaaaaatattgaaagtgatttttttttttttgtttttnnnattttgattctcaattaaaaaatggaaaagtaaaaacagttttatggaacatgtttttgaaaaatatttttactttttcaattttaaaaacagaannnnnnnnnnnnnagtgttaccaaacgtcaccatagcatatagattttatgatttaaatgctcatgttattttggaatctcactactacaaaaaccccttttagaggcggtttttaagccctttcagcgtcggttttggtgaaattcgctaccgacgctgttcagggcgacgctaaagggttttaaaaaaaatcgacgccatagatacccctatggcatcggttattagctaggaaccgacgccataggggtatctatggcgt

SEQ ID NO: 98144 - DNA, 544 bp, Cannabis sativa
attattattattattattgaaaaagtattaactaatttatttaaaataaaaaccatcacccaacccacatacttatacttatagtattttttttaacaacacttaaatattattaatataatataaatagttttatgttaatttttttgaaaaatagttttaagttgagtgtgttgttaacaaatagtttggatcatgtatttttttttctcaaaaaaaaaaaaagaaggaagcatacatagtcatttattctaaaaaaaatgatattataaaaaaaaatgaacaaacttttaaaatttaaatattattttattattaaaatattaagagaaaactatataatatgctaacatctatacttttatcctacacctggctcttcataaccattagatggatcatcaatggctcaaaaagtgtccttagcataggaacattttagctatccctactatagtcatgtcttatttatattaatctaaaatgaataataataataaatgatatctttaagagaaagaaaaaattaatatatatatattta

SEQ ID NO: 98145 - DNA, 534 bp, Cannabis sativa
aataccattgcttttcctttcatctattctaaccaaacgggggcatgacttaccaatcaatcctgtgaggagtacaccttgtagttatgctgaagaaactagaaatcaaattgtgctcagattaatcgaatgtcttcaaatgtgtttgacaccagcatagaactgcatgtcatggtaggatagaaagctccactttgtcaaaggaaatgaaactcactcgtccttgctccacatgaaaaaacttcaaaggaattcctccacattttctctccatgtgttgaagatcgggtttggatggtggatagccgctaaagaaacaaaaaaaacacttagcaattaatccacaaatggatatgtgagtctagcagtgaaatccaatacaacaacgttaatacagtggtcaaatgcttgttaagttgaagtattagcaaaaagttgatgcaaaaactgttccattgacttgttctaaagaaaatggagaggaaaatacagaagataatataagatattatacttgttctaggaataggggta

SEQ ID NO: 98146 - DNA, 1348 bp, Cannabis sativa
  modified_base (279)..(297): a, c, t, g, unknown or other
gtgcattgcacgtaacttcagcctcgtatatatatatgtaaaaataagataaatgaatatctttttgaaagcaataaaaaaataaaaaagtgttaagaaaaaattctaaaaaataatttaatttgattttttttttaagtagataaaaaattttcccttaaattattaccactaaatgatcatgtcattctaagttttataagttttaatattacatggaacaaaaataaataacatagtgataaaatatatagaaaagtttattttaattaataaaannnnnnnnnnnnnnnnnnntttactaattaataaatatatttctttaatgaataattattctatttttattataattaacattaaacaatacgttaaaaaaatatactaaacgatgtaattcaattaataggaatatgattatatattatcttatacgaccaaatataatttacacatttctctatgattatattcttttttataatattctatataattaaattattttgaacatattattccaaatccctttgacaaatcgtactttagtgtccaaaataaaattacttgcaactatttcaaagtatcaacattacaaaattacaaaattatacccttaaattattattgaattgacaaattgtcttccttcaaattaccactattaaatcaattacgctacataggagcaaaattcagaagttgtaataattgatatataatttaaaacaacataaaaataattaattgtgatagatatgataataattcagaaggtaaaaatcatatgtattcacgtttttaattagagtaaatagcggcataagtaactaaagtttcaagtttgtaattagcataaacttaatatttatttttagcggtataagtacctaattataaaactgtaatttttctttaatttcatcagtacagactctattattttcttaaactgaccacatataaggtctaaatttttagattattggatctagacagaaatatgtagtatcagttacttctaaatgttcttttaataaatttgaaacggagtctgtactgacaaagctggaggaaaattacagttttttgaacattgagtacttatgccactaaaaataaacattaagtttatgtcgcttacaaacttaaaactttgagtatttatgcctctataattaaaagtaaagtgtctttatatatcctttaggtacaaatataatatcccattttcttaacataaacatgtttcccaccctccaataatttactcaaaattaatataaaaggaacaattttaataaaatataacaagtttcaatataactcaaaataatatatttatata

SEQ ID NO: 98147 - DNA, 830 bp, Cannabis sativa
tttgtacaacactatagcattctccaacaagagaatctaaataatctctaatatttacaaggtttcaaaccatattctatctctattggtaatttttttaggacaaatacaagaaattcggcactttgtaatattcttgacttgtgctatgattatatcactttttacaactttgttttcccataaaattgaattttgggagcaccacaatgtgtacaccaaagctgcaagtgcaacagccattacacctcttcgaaacttgctgattttggcctttccaagccattttattactcatggcagcgaccttctgcacatgttccagttcagccacacctgaacttgattcaagcaaacctgcctaagagagcagttgaaaaacaagtgctccatcgtttcttcttccctactgcacaatagacaagttttatcaattttgggttggtatttggctatcctatcctttgtcttgagttggttaagcatgaccatccacataataaacctatgctttggatagtttagccgactccaaacaatagtcgaccaatgctcctttgtttcggctgtgatgagtttttgatagccttgagtaattacatacttgttactcaaaagctccctttcttctaaatcatagagctctttcactctctcttttattgccacaatctttttccaataccaactatcatttcttttagctttgtaatcccaccatgatttttcttttaagtatacacaatgcacccatttcacccacatattatcttctttttttagcaatagcccaaacatatttaaacatagcaacaatattccattcagtt

SEQ ID NO: 98148 - DNA, 662 bp, Cannabis sativa
  modified_base (62)..(71): a, c, t, g, unknown or other
tccatgaagcagccagagtggcatactcgtgtataagagccatcattccgtgggtgtaaggnnnnnnnnnnggcttgaagcagggacgttacatagtccttgttgaaacgttactgggtttacctcccgagcttattttcaacaagttcatttcctttcgggcttcttccttccggacaaactcctgagctctctcgttgaactcggtgatgtttcttaccaggcgtccttgtagatcatccccgcctgaaggggtgtaagttgcgtgctaacatccaagtttctaaccctagcggcagccatgttaaaacgacttaagtacgccttaagtgtttcatctggctgctgctttatattggttagtgaggccacttcgggtctcctatccctagcagcttgaagttgcttcttgaaatccctagatagctgctcccaagaaataattgaatgacgagtgaacttgttaaaccagctactcgttgctccaacaagcgaggtggggaacaaaatacagcgtaaattgttcgtcatgttactcgctcgcattatcgtgttaaagttattcaaatgcaagaccggatatgtggttctttcataggacgagacatgcgggtttttgaatcccaaaggaaaagggatattcataatatctgggtgatacg

SEQ ID NO: 98149 - DNA, 892 bp, Cannabis sativa
caactttaaaataaatattgtatgcaatgttattgatattgatttaaaaaaacggtctaacacatttcatgataattcaattgcaaattatttataagttattttaaaaacaataacagaatgctaaaattgtgaaaaaagacaaaaaaattatttcttttttttttttgacatgaagtgttgataattgaagaaattttttgaataaatattgtagaaaagaaaaataaaaattatcataattgatggtttctaattttcttttgcttcagcggagactatagtgtaatgtttggattttacactttttattctagggtaagacctatggttttgccctcatattattgagtaataaattaaactaatgaaaaattagaaaaagtaaaatgtagatattattccattaaagagttgtagcagattatgttcacattatttattattatttttttttcgcttttatgaaaatttcaatattttttttattttaaatcaaaattttaatacttttttttttataaaacatatttagtccacacagtgtaccacgccaggcaaattttgtttgggactgattttttttttttttgcaattgaaaaaaaacagttatatttctaaaaaaatatataattttaaaaataaaaaatatatattaaaaagtatcataaaaattatataatgttcataagagtatattaacaagtgcaattaatgatatttacattaaattaaaatttgtgtataaataagaaaaaatgtaaatctgaaaaaatgtgaatccgagatgtatagatagtgacattaaagaaaaattcaaaagtagatttaatctttttttttttggaaattcaaaaaagtttattgagctcaacaacaacacttacaaga

SEQ ID NO: 98150 - DNA, 534 bp, Cannabis sativa
  modified_base (36)..(62): a, c, t, g, unknown or other
  modified_base (135)..(144): a, c, t, g, unknown or other
  modified_base (470)..(473): a, c, t, g, unknown or other
atcaaataaaattgtcatttatcttatttattaatnnnnnnnnnnnnnnnnnnnnnnnnnnnaaataaaccctaaaacctcttttttttcaataaagccctttgcttagcgaaaattcataaataagacatagtnnnnnnnnnnaattataattgataaattaaaaccaattaacttgagtctataagtagtattatctcaactagtgtggggaccatgggcctatctatgcaagcttccaataagtagaacttgaatttaccaagtaaattctttaacttattaattcctccttataccactatcaattcgaaattgcactcttaattatatagaacgctctatatgtaccaagcaatagatatgctatgaattatccattgtttgaatccaaaaagtaaaagaccctctatagatattctacatcgaatatggacacatttattgttctatccttcaatgtattttannnntaaaacacttagctacatataaatttatgtacatataatattaatattatatatgttttaa

SEQ ID NO: 98151 - DNA, 672 bp, Cannabis sativa
aattttgttatgaaatatcatttaatatagaaactcattttcttttccatttgtgattcttttagtaattcctggcttaatgtaggtaaagactttgatgagattagctaataagatttgagaagagtacaacatagctaggaccatagcaatgcaagcttcatcttcattttcaataggcaccatttatttattattgtggaggagataaaaaaattattgtgtttgtattcaaaattttacaaaaagaggggagtgaataaatatattatttcattagtatattaaattattatttatatttaaaatattattaaagactaaataaaaaataatttagtgttctccaaatattaactattatatgcacttatctatttgttaccgttagatctattattaatggttgtaaaaacgttcctaccataaggacaaaacaatagtttttaccatagacatatcctatatatatatatatatataaatgtacattatttcaactatgataatacaaatttaagattaaattatttaaatcttcactatctaatataaaatagtataggaaaatttatatcataatttttataaagtaggttacactatatagctttttttcttatttattttattttattttttatatatatatatttaataagtgatgaatag

SEQ ID NO: 98152 - DNA, 733 bp, Cannabis sativa
atgaacaaagggaagtgttggtttaaatagaatacaaaaggtggccaagaaaaggcaagtggaaggcggaaaggtgaatctgcctacatataaggcattaaatggaaacaaatgtacattcccaggtgtcaaaacgtttcaaaaaaataaataaataaataaataagtaaatataataccacccccctcccccacttgtaaacgcccataatgaggaaaataagattaaaacataaatccaagggaaaaatccttacaaacctttaaacaataaacgaaataaataaataaaaagattgttccataaatttgtccttgaacaaaaacgataataaaaaaagagataaacataataataacaacataataaattgtccataaaacttgtcatacacgcataaaaagggaacagtaaggaaatcattgaaatttgagtagggaaaaatcccgcccatctctttaggcgccgtcgtcatccttgcccccgctgccttcgtcggactctgaagaagaatccaccaaatcttcatccttcttaaactcggagtatttctcaaagaattcgtccagattccaggcatcagatttgccttccttaaactcagagtacaacttaaaggacgactgataactcccgctaaggaacgcctttttgacttggcccgtcaggattttaacctccttggccaaggattccttctcagcaactagagcctttcgggcctcagccgac

SEQ ID NO: 98153 - DNA, 1401 bp, Cannabis sativa
tggcgtcgtcagttattatttatttggaaataactaaccgatgccataagtggcgtaaaattttcttctaaaaatttccaatcctatggcgtcggttaattattattacgctaaaaaaagcgcctctaaaatcttgttttgtagtagtgtgttctaaattattgttgtctctatttttatcaaacaagcacacatgccaccctaaaagagggccataattagggtcagcctaggtcgaagctttgataagggtccaagtgtaacaaggacccgactcgacaccctttgctcccaaacaacaactatcctcccggacagtaactatcctcccaaacgaccattatcttcctgagcagcaactatcctccccgacaacatcctcccagacaacaactaaactcccgaacaaccattaccctctcaaatagaccatatgacaacatttaatgcctatagtcatctctcattgtattttcttccattagtaattagactaactaaactcttcatggctaccaataaataagatcatgggtattaagtttatacattgccaaattttagagagaaaactttatcttctttgtcaagtgatttgtggactaagacttgttaacacaccaactacataaaaattataacctatatatatttttgttttatttttttagctccaaaactttacttattttattagttgccaaaaaacttgataaacaattataattagttatacactttttaattatgtttgagccatattaagaaaatatacttttatataataataataataataataataatatccttcatcatccttacctactatgtatcatgagattacttatttacaagataaaatatttttaaaaattaatatttcttttttctttttagatctcgagatagtaaatcaatgtcttaaacaactttacataaatattttttgaaaaagttattagggagttcttattcttactatatcatttcttttaaaattgatacttttgggtgttgagattttctttttcttttttcaatcccactatttagttatataaattaaaatatacaattaatttagtccgacatttatttttatataaagattatttatgtagatacctataatgatagctaattattactaataaagtttaacactgtagattactttctctcaaagtttcatcagaaaatttaagaaagtgaaaatgtaatgaaatgaaaaaataaaataaaaaaatgttttctttcccttaattaattaagtcaccaaattaaaaattattttaagagcgcattgcgattgagaaccagtagtttacggcaatttttaataggtgacgttccacgattggttagcgatatttcttaagaactattttcttaaattat

SEQ ID NO: 98154 - DNA, 2847 bp, Cannabis sativa
attggagtgtttttgctgttatatataatcaactgttgtagttaaatttcaacttcagcaccttccacaaagttgacacagacaccaccacagacaagaatacacccaaaaaatcccaaatggcaacactgtcagcttcaatttccatctccccaaaccctagcttcacctcctcccacaaaccctctcctctcttctcaccccctcacactctcaaaattcctgccttcgcccaaaaccccattaaatccttaaccctccactccacggacgcgccttcccgcgcctctctcgtcgtcccacgcgccgcctcacaatcatcttcatcctccaataatgccacctcgttccacggcctctgctacgttgtgggcgacaacatcgacacagaccagatcatccctgccgagtacctcaccctggtcccgtccaaacccgccgagtacgagaagctcggatcctacgctttaatcggcctcccagcgtcttacgaagctcggttcgtggagccgggggagaccaagtcgaagtactccatcgtcattggcggcgccaactttggctgcggctcatctagggagcatgcgcctgtggctctaggcgcagctgggacgacagctgtggtggctgagtcgtatgcgagaatcttcttcaggaactctgtggccaccggagaagtctacccgctggaatcggaggtgaggatctgcgaggagtgtaggactggtgacgttatcacgatcgagcttggtgagagccgtttgatcaatcacactactggaaaagattacacattgaagcctattggggatgctgggcctgttatcgaggctggtggcattttcgcttacgctagaaaagctggaatgattcctcaacagcctgctgcttaaattttattcttctttcaggtattttttttcttttccatatagtttttgttggttttattggtcattttaaggaagaaaatgatattgaaggaagaaaatgagggtgtggagtgttggaaatggggtgactctgtaaaaatgattaatttgttccaagtgattgtaaagaaaatatttttgccaattgccaaaaacttatattcatatttaatgtatctattgattatctctgttttgtccagtggttttttgggcttttataggctgtaagtctcttgttctgggatggccttgcttttaatggtcgaatgatcatgtacatgttgtgtgttatgtgtatatatgcctttattcattgatttttgggtttgaagttgctaaagtcatttggtttcacactgcaatttccgttttctgatttgagattggcctgagaacaaaacaaaaatttgtgaaattcaaacactttactttccatggtagtttgaattcagctgttttttgttgtttgcatttattaactgtgcaagtcatgattattgttgttacacaataattcatgattggaaattcaaactttttctctcaagggggtctgcattttcggttttatatagctcaagctgttggatttgtgcaagatcgatatctatgcctatgcttgtatcatttttgttttctaggcttatctctaatctatgcttgtctcataatctgcatgtgggttgatcaaatttcattgttgtttgcagggttttcatcatggtatgagttgtaagggccaatgaataatattgattaccataaatctttagtatttacagcaaagctgatcatggtccttgttttctgagtttggaaataaaccattgaattgattttacctatttgattaggatatgtccattagaacggtctattttcttattgtattactttgtattagaattttcagttgtttgatgtagcttgttatgacttaagttggagcaagaaaaattgaagtttgcttacagaacatatttatatatatatgtggttgcttttgaaatttggacgattttctctaatgtttccgctttagattaaccgaacttagtctaatccacatcaacataagttagtaaccaagtcaaataatgagatgttatcaattttgaggagactattaatttaacttattagttttctttgatgactagttttttaacacgtccatcgaaacactaagcattggcttacataaataaataatacaaaaatatatgaaattgaaaaattaaaaaaaaaaaggataaataaatttgataaaatttctatcaaaaaaatcatcgatgttagaaaagtaaagttgttgaaaaagtcactgatgccagaaaattattattatcggaaaagttatcgtcattggaaaagttatcgaaaaagttattgtcgtgagaaaagttattggaaaagtcactagaagtagatgtctcagataatagaactggttttataacataatgaataaaaataaataacatagattaactcaaattggttataaattaaaatagaaccaattctataacataataaataaaaacaagaacacgcaataatttaaagtggttataattaaaaatagaattgcttataacataatgaataaaaataaataacacagaataactcaaatcaattataattaaagcagaactagttctatcatataatgaataaaaacaaataacacaaaataacttaaaccagttataattaaaatagaatcgattctataacattgttataacgaataaaaataaataatacaaaataactaaatttagttataattaaaataaaatcaattctatattataatgaatacaaacaaatatcacaaaataacgcaaactatttataattaaaaaaaatagagaggagaaaatcaattccaaaaatattaata

SEQ ID NO: 98155 - DNA, 533 bp, Cannabis sativa
agggggcacgatttactacatgtcaaaattcaaggggaaaaattactaattagccttatatatataggagagttactagcatcatttgttttcttaatcattttatttttttaaaattttttattaacttcaaaatataaaatatatacttctatttattttctttttaattttcttatttttttaattttctattttttaaaattataatatcacatatatatcacattcatggctaatttcttttttaaaatttatatatatataaccatacatataattaaaactaaaatctctaaattaacataggtttataaatgataacctagaaatcacccaaattttttctcacaagcaatgtttgtaagttttaatatgaattaaggtgccatttagttaactacttgaggctaactcaagtggtcataggtgggcatgtgtgttggaggttctgggttcgagttcaggtaaaacatgattataatatataaacgcttaaattaaaaaaaaaaaaaaaaaagtggcatttagtt

SEQ ID NO: 98156 - DNA, 714 bp, Cannabis sativa
tctttcctctcttctccttcctcttttttcttctctttcttctgtttgttgttctttgtttctttgtgtcaatggtgagaaaagcttccaaaactaacatggtatcagagcctttcccacctttggtggcgaatatggcaaatgttggcaacacgaattccaactctaattatcctggaccaccgccaggtttctcgactgcaacacgaaccagatccagagatgatgagtcttcaccagtgtacttcaatcacacattgtcgatcaagttgaatgatcacagtttccttctatggaaagaataggttcttgctgcaatccaagataacaggctgatgaggtacattcaagactatgctccacctcctcaattcttaaacgatgcagatcagttagctcgaatctataatcctgagttcttggaatgggaggttcaagatcagttgttagtatcttggctcctatcctccatgacagaaatcttgttgacgcgcatggtggggtgcaacacagctagacagatctggagtgctttggaaaagcactttacattacaagtatcatccaagattttgaaatttagaaccaaactccagaatcttaagaaaggatctcaatccctgaatgattacttgcttaaagtaaaacaacacgttgaccttcttgcctttgtaggtgaagttctatctacacgagatcacatagctgcaatct

SEQ ID NO: 98157 - DNA, 930 bp, Cannabis sativa
taaccacggttaaaaactaatagggtgagttggagggaaaaaatgaaaagttcttactcattactttctaggttaataatatgacttttattttttttttaattggaaatttgacttttacttggtactatgatttcgtagaatttataatttagtcctttcaactttattttttgaatttttttctccccaaatatattttctttatttatttcaaaatacatggttgatatagcattaagtcacaattataaataaaataaattaatcgtctcataaaaaattagtcgaagttaaatttaaaaatattaattttagaatataaatacagaatctcaaaaatttgtcattgtttatttacacacaaacaaaatttctgtgtatttttttttttaagaatttcgatatgtattattattatcattgtgcctatacgcctagtattacattaaaataacattttaaaaaataacgatattaataaaatatttgcaataaaaaggtaaacgaaataataataataataataataataataataagttttggtttttttttaaaaaaaaaaataataaatttcagttattttcatagttcgaaatattaaaaatcaacactctagaagatcatatcgttttcattaaaaaaataaaaaaataaaaaaaaaatcatatctcagaaagaaaaaaaatgtcctttttaaaaaaaaaaagaaaaaaaaatgctgttgattattattgtttttaccacggtgggcacgtgagccgtatttagaagagaaagttagaaatagcaggtggcacgtgcgttcttcagtcttgggtattcaagaggatatggtgaagacacgtgttggaaacgtcgtcgtttggataattggcacgtggcggagattacttactgtgttcggaaaatatattgcgcgtgcgg

SEQ ID NO: 98158 - DNA, 605 bp, Cannabis sativa
tagggaagaaagactagaaaataaaatattatattttttttagttatttttcattttataattatttcatattatttttgaattacttttatttatttaaattattgaaaggaagtggactaatgaaaatttgtgtacatagtggcagtttatgttggtacttaacacatcaaagtaaatggaataataaacagcaaaagagaatgaaagtttggacaatttaacttctaaaaatttagtaaaaagggtttagctcaccaaattttaagttccaataatttaacagccaattaaccttttttttatttatttttttaagaaaaaaaaacaattaaaagttgtaattaaagacaaaagaaacaaccatttcagaaaaaaaaaaaaaaaacaaatacaaatacaggacctacatgtaattaataaaaattggaattcctaagagaaggaaagtattgaaaaatagaatgtatgtatattggaagatgaattaataaaagaaaagtctaattagtaatttttttttcctgaactttgacatgtactaaatcgtgtttctgaatttttttggccgttaaaaattcttcccgaactattgaaattgttaa

SEQ ID NO: 98159 - DNA, 1126 bp, Cannabis sativa
ataataataataataaaattaagacaaataagtatgcacagcaagaagagtgatgaaagtattttcgaattgattaccagtaatttgggaatgggaacgaagaagaaagctgggagagaagcccaaatcgatgggggaccccagtatgagcttgaggagctcttccatggagtctcttagctccaccattgatgttcccggtgaggatacttctccctccatatgtcctatattcgtatggaaatccaggaaaatgaaaccgttgtaaaagtataaattgctgagcttttctcagaaaacaaaaactacaacaacaaaactaacgttacaatgatttatttatacatatatatatatatataaaatgaagtgagtcccaattaaaaaaagctcagattacttacaatctaatagtgaaagtacttgtgtttgtgctgatctttattttactttaattatgtggactttaattaatttttgaatggtagcaaatagggtcaaatcaattagtgttaagtgaactaacaatgtctttcaaaagttcaatgtggactctattactaataacataatgcaacttgttatttgaaagaatctcacaaggtaaatttaaaattttataggaataatttttaacacctcaaagatgaatcaggaaatttgtggctatataaatatttatatatatatgtaatcttagttggtttgaaacaaatcgtaaatggtggtcaaaggtcaataggtaaaagcttaatattgcccacttgatacgatttttttagaaaattgtggagaaaatcaactggtggtacactagtattattgacctttgacctccatttaagattcatcaactgtttcaaaccaactaagaaaatcaagaggtgaagaagttataatattgttgaagtatttgattcatgcaatagagatggtgaaattggatgtagcaaatgagaccttcaatgatgcattctcttggtcaaatattgttgaatccatggctgagatgggtttggaaattacacaagcaaatgaagaaggtgatcagaagatagaagaggtcaagaaggcaaggaagaagtgtagagaattaaacaagctgactttcaatgtaaattatgag

SEQ ID NO: 98160 - DNA, 924 bp, Cannabis sativa
aaataacatagaaataaactagcataaaatttagtatacgtgcctcgcgcgtagctttttgctagtaacaatcataaccaactagttatagtcctaactaatcaattacagaattaattactaactccttggacagttggttctccttgacagcccccttcaaactcagtgtagttttggaaacaacactgagtttggatcgaatatcactgaacagagagctggagataggctttgttagacagtcaactaattaagcttgagcaggcacatgctttacttgaatttgatgttgtagaaccttgactcgaataaagtataaatccaattcaatgtgctttgtacgagcatgaagaactggatttgttgtgagcagtagtgtactctgattatcacaccagatggaaggaacaactggtgatgaaacatgcaattcatggagtaaagattgtagccaggttacttctgtgacaacacttgccagacttctaaattcagctttagtagatgacctactgattgttgtttgcttctgagacttccaatgcaccaaattttattcaaagaagatacaatacactattgtggacctcctatcatctggggcagaagcccagtcagcatcacagaatgcttcaatggtgaaatcagttgttactttgatgagaagaccataatcaagtgttcctgcaagatatctaattaatctacaagaaaatagggtctttacctacaaattataagtgtaagtaaaagtcaccactactacaaaaatccgttttcccgacgtttttaaatagtcgttcaaagtattcctgccagtttctataaccttggcctatacgaccgtcgtaaaacgggcataataggcgatggttcaaaaccgtcgctaatgtgggtttcccgacggttttaaaccgtcgg

SEQ ID NO: 98161 - DNA, 680 bp, Cannabis sativa
attattatttggaccaataaaaaattaacatgtggcatttgaattgggtttaacggatcagttaatttgaagaccaacgaactttcagaaaatgtgacattggggactattactgccaatttttaaggttggagattaatctgcatcaactttaactttttagagacttttaccgcaaatttccctataaataattaaacaaaacacttgaataacatcaacagagccttgtgtttttatcgattattttgctaaggataaatatatgttcaagatatttattattttatagatttggtagataatacaaaaagtaaaaataaaaaactgattgaattttatcattatagctaaactgttctcaattacgtagattttgaaatatatatattagtgaatattcttttactcttagtagcaggttactaatatttttatagaattaaattagttatggttaattatagattaataaaataataattttttgaaaattaaaaaaaaataacaattaattaatatgtttaatagaattttttagtaattaatatttataaattatattattttttacatataaattcctattataatttttttttaatattcaaactatttgataataatatttataataaaattaaaaccttattttttttttttataaaaagtagacttct

SEQ ID NO: 98162 - DNA, 1305 bp, Cannabis sativa
atttttcaggcgaaacaacgaacaacaagcttatcaactgagaatcttcttcttcttctctgaaggtattattattctttgatttttgattttttttaatgttttttttgtgaaggagatctacactattattagacataataattaattatttaaaggtaattaaatggcagaatcataaattgaaaaccatttttaataaagtgaagaggatcatactatcatagtactgatcttttcactctttgaaattatattttctttcttaattgaatcatcggtaatataattcgaacccagtaaaaatgccacggttaatctccaaaaaggtaaaaaaccctttgagtttttagtaaaaataaccgttttaaaagagtttattagcaaaataattacctttgatagctcaaataattaaaaattgcattttgctactgaaaaagaccataattagatttgagccttattttgttgagtttctgtttgagggtgttaaaattggcttaggtaaaaaagttagaattgaaattcattagttacttaactagcaatagaagtatttttgaaggtttaaaaatagcttttaaaagcccaacttcaatataattattttgctaattttatattttaataatgttagagtatcttcaataaaatactactataaaattgaattttaatgatagtgtataatatagtttaaatttaggatatgataaaagttgtatcaaatttgttatagaatatagaactaaattttacactacaataaatatatctttatttcattttttgtctctcattactattatttatgacattttacattttatttatatatttaataaaattttatacattgaaaattgaatatttttgtttacttcataacactattttatcaaaaataaagttgagtattattataaaatttaagccaaatataatattgagttatcttttaggcttagctttacataagatgatcttagtttaacaaattttcatataatattttttttaacttttatttgttagtttaacaaatttttatataatgttagaaaaattggttatttaagatatttgtcccttaaattataatttatgaattattgtgtccttaaaataaaaaagattgtaaatatgtattttataaaagatcatatttaatttaaaaatcaattaatgattaaaaaaattaagtaaattaaattaaaaaattttaaattatttttttcaataaattacaacgctgacatgataattgtctaaataattatattatcattctatttgtcacta

SEQ ID NO: 98163 - DNA, 3117 bp, Cannabis sativa
tcggtttgggcgggttattcggtttaggcagtttataaatttttttgtacaaccctactttcagcactctttgtactttttaatcttatttatctatttattattttctaaatatttatctactatctttaacttaaaaaattaaaattatgaatacaatatacatttaggaaaacttaattttgggtacactagtgttttgtttaagatatatgtatatttttgaaatgatttaagatactattttattagcagtatttttattatcttcaaaaattatggatataaattatataattaccatatatagtttattagaaaagttagtatatataataatttttattatgttactaatattatctgtaagatactatttttgatagttttataaaattctatattaacatatcaaaattgttttatcaactaaattttatattagtatatcatattgtaacttttaaaataatagaacgaaagattttatagtaatttataatgtacctgatttgttgaattttattaagtttaaagttttataattttgttgttgaaaagttataaaaaaaaaaaaaagaaacgaaaaacttatttttaatgttagttttcgttttttgaagatgataaaaattagagaaaattacattatatattgactttatactttatataagtcatattgcttttgagactctaattttgataggttatgtgaggttatatttgatatttgattaaaaaagatagtatttatcaattaaaattattttgaagttatatttaattaatgtgtaatataaaagagtagtttaaccgacatgctccaacttctctaataagcgggtcagagatatactaatataaaattattattatgagtttaactatattattctcaaaatcaatagtagtaaaattaactatattattctcaaaatcaatatgagttttttttcttaagaaattaaatatctttattaattttggtaatattaaattgaatcccgtcaaatttttaaaataccactcgtattttatttttaatttaattatttgattattttttaaaatattgtataaaatatttataaaatttaaaaaatgataatattttttacaattgacatacatccttaaaagatattttagtcaccgaaatttaaatttgttgtatattgtgctatccgatattgtctctcccaactatttagttataactccgcccctaagtgtacacaattaggacaaaagaaaaaaaaaaaagaaagctttatcattttattatttgagtatttatgtcacaaatatagtagtatttaaatagccaacaacaaatccgtaagcttcctccaatttatattaagaaaaatctacatattattatccctatattattcaaagttgttcaattgatcctttaaaaaaaaattggtgattaattttataataatactcccgttacaatctctcatactatcataatatttcttcaataataaattatataaaataaagttacatatcagctcagctggctcctatttgttactcaaaactaagtcaacccagcaccgttgtcaaatatatactaggagcaatatatatattttattctactaattttatcaattttcacgtttgacatcatgaaatatatattgtgatatattttacttcatcaattgaaaatagatcacaaaataattaaaaatgcaagtaccgggaacatagagtcatctaatctacagataattctttaagcaattgaaaaactaaaaaatactaatactcttaggtgtcaatataattaatagtataattaaatatcatatctcatataatataatttattgtaataatttttagaaaatattactaaccaattacaaaatgaaacgtctacatgatgttaatcaccactaatgcttaataacaatactattattatattatatttagtaataattctttttagtaatataagaaaccattttactaattttttttttactcagaaaataaatttatatattgtagaaaaatttataatttattgtatgaattattttaataactttgagtatgttaaggttatgttcatttcttcgtccttgaatcttgtggttgatcttcttgcttgttgcgctagagtggagaagatggtttcctcttggcagtttaaaggaagtaaccctctttgtaactaatatttccatttagtttgtttttgttttaaataaagttagttatttactaaaaaaataaacaaataaagcaaacaaattaagagatagcttcaaatattataatgaaaaagagaaaagattgaagaatttttaaataaaataaagatctaagaaaatacatctaataaaataaaaaaattgatcatactattttaaaattattgtcatcatcgtctcgtagttgctactacatttaaaatcgttctcatcgcatattactaataatcataattatattcatagtccctactacaattatattttatttatagtccctactacaattttttttttttttgagataaccctactataattatatcatctaataatcgttatcttatttataattatcactactacaattatattttatttatagtcctactatattaaaatacaaataattataactataagttttctttaatgtttgtttaagaaattagagtttctttatacacctacaatactctatattgcgtatacctccataaatattccacaaaagactatatgtatatatttttttagtgaataaataatatatttgaaaatgaatctgaagttggacgacttttgttacacgctttgtttattataacaaaccaatactaatttaacaactgatccatgttgcaaaagtctttataattgtgtttacaagacatataggagcagaagacccatatcaacacatggcgaaaatgtcgttactgatctctgttcttgtgggtaatatattccttctagttgctcaacaagccacagcccaaccgccaagcttcttataccacttttgtctaaacgacaaaggtaactacaccctcaacagtacctaccaagcaaacctcaatcacctcctcac

SEQ ID NO: 98164 - DNA, 706 bp, Cannabis sativa
aaagatcagttaaggcaccaccattttggtgtaaccaaattgccaaagtgactttggaactcaatagtgcaatatatttaagatagagtttaatgattgagattaaatgatctataattaactaaatgatattaaagaaaaaaatattacagtaaatttataaatttttttcactgttaatatcagttcagtctaatgtataactgatatatctgatattagtttactttactaatatcttgaaaaagtcgttccacttattcaagtgtaagcaaactccatttttgattatcacgtcagtatgatattagtttttagagtctatatcatagttagaaaagcaaaaacaaatttaattaaaaataatttaatctaatataaacaaaaattaaaaaactgagacaccaccattttggtgtaaccaaattactaaagttgtttaatttcttagacaattttacataaaaagactatatgttaacaaaattaagaataaaaataggtattttgccacttaaattttagtcccttgaactattatcaatgttaattatatccccaaattataataactattatattttacctttcgaacttttactactgtcaatcgtgtcctttttattaaaacaaataaatttgttagtggtaaaatttcagcaagcaaaatacgatagtgatcatacttcaagaggtaaaatttcta

SEQ ID NO: 98165 - DNA, 514 bp, Cannabis sativa
aagcaactaagataaaaactctcacacaaaaaccagttaaataaaagtagaaattacacaatatatgagaatattataacagtttactttttgatggcataaataaataatactatgaggttatgtattttttaatttttttttatatttatatgggattttttactatatttttgtaaacaaaaagaagtaaactcttataattttttcatatattgtgtaatttctacttttaggggttttttcataaatatgggaaaaggtagtatagcttactttttatgacataaataaataataccatggggttatgggttttttttttctttacatttatatgagcttttttatgctatatttttgtaaaaaaaagtgaaaatctcatatttgtaaaacgataataagtttcgccggaacagtagtcaccggtgccgaaaaagtcaccagaaaagttagtgtgaccagaaaagtcaatgtcgctggaaaaatcaccagaagtaaatgtctcagatat

SEQ ID NO: 98166 - DNA, 570 bp, Cannabis sativa
aaaacctactttttatcatgtttaaaaccaagcaaaaagatcgctttgaatcgaagtggaacaattctcattccacaaaaatctcggcggttatacggttatacatcataccgtatatgcataagcatattaacagaacaacaacaacaacgttaataataataataataattaacattattattatacaaaataattgaatataaatgataaatatcaactttaatatctcatacatattactactattattatacttacaccaataataatatgcacccaaatcaaacaaataacacatttatttaatgtccagatatatatatttatttggcattatgcacatgccaataaaatcaaatattatatcatcacaaaaaaaagtctcatacatatttaaacccataaatatgtaaaataataaaaatactctcagctaaaaaaaaatataaaaataccctttctgagttagcgggtattacagacataaacatgtattccggagagtatggttgagtttggggttgatttgtgtatagggagtcaatttttgggtttccctgcacaaaa

SEQ ID NO: 98167 - DNA, 598 bp, Cannabis sativa
  modified_base (158)..(158): a, c, t, g, unknown or other
tttctcatatcttttatgtgtttattttatatcgttttagaagttcatatttagaatgttgaaaacatacttgttagtaaatctaggtcctagtaatacatatttcaataaatggcctcagagtcatgataattgatttactttcaagaaatatgganttaaaacgatgtatgtgtgatttaaatatgattcatgttgatctatgtgtttattgatgattgattgatgtttgcaattttttttacgtaaaataattagaatttcgttatagaattatttttcttggatagtatggaaaaattaagcaacttaattttttacaaaacttgatttcgattttattggaattagttatgattttttgaaaaattgaaaaaaaattaagaaatggatgcccacgtgcgcgggcggatccccttgtttctcgggtgcacgcgacttcagacaagccttatgtctgagttttctcgttcaggagggaagattttgtctgaaaaccccatctgcgcgcgggaatgctgcttgcagcctcccctatgcggcaatcctcgatcaaccaccctagcatgcgcgcggatggtataaactgtataccatc

SEQ ID NO: 98168 - DNA, 1064 bp, Cannabis sativa
  modified_base (27)..(38): a, c, t, g, unknown or other
  modified_base (213)..(224): a, c, t, g, unknown or other
  modified_base (1030)..(1038): a, c, t, g, unknown or other
agaggtatgtttcaaataaatataaannnnnnnnnnnntttgattaattgattaataaaaggagtatttttcaacttacccccaaattctatcatatcggaccgaaagccccattgtctacccaatgtcggcccgtgcctaggcccactcattttaggaatccaaataaaaaaaatactctttaaaaaatatacatatattttttaataattnnnnnnnnnnnnatttatctttatagtaagggtttatttttttttttttattttttttttttttgcctatagcccatttcaatttaggtcccggccctgtgtctacttgctcctggtctgcgatttaatgcctcgtacagactccctcccacggacgatggccctctcctctctctgtctcctaaatcctaaatcccatcgggttggggcgaagcatagcttattccactccttctaggtatgttcttcatctcctgccactcaattttttctaagttcattttctttgttattgatgaattgtgtcagcaaaagatacacaatttcttttatcttcttgagaaattttagagtttatatgcatattgtcgatattttgcaaaatcatatataacgtacaccaccctaattaaggtttcttgattactaagaaaattcaaagtaatcatcattattattgcattgtcacttccaatactcacacgcggttggtcttaatttctttattttatgctcttttgggtgatgaggttgaagcaagtaaatatctctaataaataaaagactcacttactatatctgcaatacacattgttttagtaagacatcaattttagttcgataatttacagacgataaaataatcttttccttaatttagatattacagaaaaataatgtaattcattttgctttggataaaattgactattttttttaaaaaaaaattgataaaattgactattgatcaaattaatccatttggatattttctatctatgtgtgactgctctcaatatatatatctttatatattnnnnnnnnntatctaacggcatttcttggtttaac

SEQ ID NO: 98169 - DNA, 773 bp, Cannabis sativa
atagataatataaaatacatataatatttattaataaaaaatccattttgatattattaatttttttttttttgaaagaaaagcttcaatttttttttattattattgggttgtactgactgaaccaaattttaaactaaaataatttattactattatttaagaattaattgggatgtatcagtattattcctaaatcctaatcttctttttcataaaattataagaacaaaatgtgtaagaagacaaaaacccccccatattattgtttcaaggacatgattatttaatcatatatcctaaagaactattctaaacaataaaataaattttcagcctaggaatatacataacttatatattataaactaaattataatagagttcataaactattttcattacttttatataaattcaaatgaattgatattgctataatgctatggactatgagcatctagtgagaattaaaaaataaaataaaataaaattatgtgggatcccatctaagtggagaatgggatggggatgctattcttgtgataataattatatatatgtatatattttatattttcttgacatatattatttttaaaaatttgtgatctttcttaataatgtgttactatgcatattttattatgttgttggagttttcatttaaaattattttattttagaagtttttgcaccagggaacctaattttgcacttatttacggatttggcctcgctttaaataatacggttttataccgttttttttt

SEQ ID NO: 98170 - DNA, 2183 bp, Cannabis sativa
  modified_base (46)..(56): a, c, t, g, unknown or other
tttcagtgattgtttatgtactatttggtagatatcaaagtctggnnnnnnnnnnntagtacataaacaatcactaaaattataaaattgaatgaaattagactaagtctttaaagacggccaaaaaaaattcagaagcacgatttaatatatgtcaaagtgtggaggaaaaattactaattagccttaaaaaataatttttaaaaaatatctagcaattattatattaaattttggcataagattaaaaaaaaaaaaaaaaaaaagagatcaaaagaagtgtagagagagagagagagaatgtacctgaagaaggctatgtggagtgagggaatatcagcagcggagaaagattcgacggagtcggagtctgacccaccgtcgacggaggtgaaagacctcgtcaatgtcttgacccaacagagagtttacagggaagtcactctcgctctccgtagcggtctcagggacgcccgagctgagttctctttcctccgagtccgcggtctcacaaggctcctcaagtttctccgatctgtggctcaatccgatctcaccatcaatcttttctcccagactcaatccatctccgagcttcaaggtttgaacttccatatcccaattcaatgttagcgctttcgattcattcatggaatttgtgctttacgaaattgggggatatttgcatgaattctaagcaaaaagatttaaatttgggatacatttcgttatagaaagaggatcaaaattggtgttgctgatttgatttcgaatacaattcctttacaatgtaatgaacagtggttccggtcctctttcaacattcattgaatgagtctgaagatgagattgtatcaactttggatcatatttttgatgtggaacccatgaagatcactagtccttctaccgattctgaagtttcacttgctcttcgtgttttggaaggttgctgtcttctccataaagatagtactacgttagctcatcattacaaggcaattcaggtctctatagacttattttctatttgaaatttgagcttataactataagaaattttcacactgaaaaaagaactaaaacaaaccttgtgtgatgtaggtattgatgaccatattatcaactagaggagtgcttgaacagggtgcttgtttagatgctttgatctccattatgctggaatcatcagctaatcaaatggtacagttatatattatagatgttgtataaaaaatacatgatgataaatgtttgaagagtgagtatttgtgggatctatatgtaacatgcatatatgtgtttgatatatttgatcaggattttgaagcatgtaatgggattgaggaagttgcagagcttataatagacaaacaagtagatgaaaatctcaggttttttcttctatttatttttgcccttttcttttagaggttatatctcatgctgctgttagtttctagttgcaacgtaaaggccagtaggcttgggagttactggaatcgacatgtttgggtcagggtctgaacttagtttagccatagatagtttctggacaatcgattccctttcgggtctatgtcacataaatccaaccatatgctgacaatagataactgctgctttcttaggttgaaatgtggagaatttttgttgctgctcattgggcatgtaaacggacgagggaggcctccattggcatccatacaagaagacataaggcggcttctgggcgagaactctgcctccttgatatgggcagccagtcaatttggctctactcttgatccagaacagagattgactgcactgcatatccaagctcgaagagtgctcgaatccttagacctgtactgagttcgtcctttagctttttctccttgttttctgaaaattcttttcttcaattatttatattcaagtttctagaatgcctgataattggggcattagttatcagtagaaactgtaaacatatagtagtaccacacaatagtgtctttccttttattttgtttgatgtaatcacaaatcatttgtaaaaagtccagttacatgtgcaaatgcaatagcatgtctctttagatctgttgtgagatttagtttcatctcgatcttcaattcaactacatcccgggctctttcgcatcgtcatatctggctctacctctattatccactgt

SEQ ID NO: 98171 - DNA, 2265 bp, Cannabis sativa
ggcacaaaacccaacaatattttgattctagatgattccccaattatgagctgtcaggagattgttctagaattccataaaagcatgggattcctttttctaatacaaccaatcattgtgcaagggaatattttattgttagggaattattccattctttgcactataaatacgacgtcaaattcattgtatactcatcgagaattcaatatacaatatacaatatacaatagaaaatcatttgtctctctaccattatattctgtttttagttttcttttgttcgatcctcctttctgatttggtatcagagcgggtatggtatctccaggcaattccttagtcaacaatgccagatttcaagttgttgatgctccttctcaagctccaacacctgcaccagttgctccattgctacccgtgcccttgttgcaatccttggcaccaatcaccattcataaggacagagacaactacctctattagcgctccaagtcattccagttgtgcgtgctcacgacttagacagtttctctttggcacaagacctggtcctcctcaataccttgatgctcctcacgagataaatcccaacttgcagtagcaggtaaaccctcaatttactgtttgggtttgcatagaccaagctattttaagctggcttttaaactctatttctgaggccatgcttggccatgttctttgttgtcgtatttcttatgaactttggtctttgctggaaaatctttttaccactcaatctcgtgcacgttgtggtgattctattcgtgggtatgaaagatggaggttataaatacattttttcttccttctcaatggttgttttgtggtgttttttttattttggttctcctataaatacatttgacgagctcactggaaaaaaaagttttgaggtgtgtggttcttttatgtttttctaagtggttatatctgcttctttgttttacatttatttttgtgttgttttaatacttttttaattatgattttcgaggattggacttacaaatatagctgctattgcatctagtgttgaggctatgcaaaagattgttgttttttttttattccttttttccttttgttttatttgatttgttttagtttagttttacagttgttttgccatgattagttatttgacatcgattttactgtttttgctcaatctcgtcgaaattaatggttattctatctgtgggtgtggaagatggaggtctctttttttttttttttttacagtataaaggaaaggaaaaaaaaaaaaaaagatgacagtataaatgtaatttctaccatgtgcaataaaattaaatttttttacctaaaatttagtatttttgtaagagcccctaataaatatattatatatttttggcattaaattgttaattagttgaatattttgtctgttgttaagtttgaagttcaattacttgttagattttttctctagtagtttgaaagagttcaaaatatagaagccttctcatttatctcctttgctataacttcgttaattatcttctttatttatttatttattttgaaaatgtaaacaaaaacatttattaattgctaacttaacaaaattcattataggaagattgagaaaaatcaacaaaataagaataattaagtcatttacaataacataatgaaaccttaacatcttcaattaacaaccatattgacaaattaactgaagcatcaaaagaataagctacgtttccataatgcgaaatgacaaatcaaacctatcagtaaaaaaaatcttccaataaaaatcgagtaataaaaatcttattattcaaactagaataaaataaaatagcaataaaagcagcaaagtttatatcaatcttaaagaaagttcaatccacaaaacacaagatcaatagaaatccgagaatcccctacacctaaataccaagtctccctcactacaagcaaaacttactctaccttactataccattattgttctgatacattcaatggattcctcaagttagtatacatataataaagttagcatacatataataagcttgagagatgaacgaaaaagaaacagcaattgatgatgcaatgcaatgcacatgtataccacgtgcgaagattcataccttgtaagaaaacctttgactagtatagtacataagatccagtgtatcacaccctcaatctataccaaaactttcttccaccaaaaaaaacaataccaaaactttcacttga

SEQ ID NO: 98172 - DNA, 1606 bp, Cannabis sativa
tatctttattgtagttataaagaatttcctaaaaaattttaatataaaaatttgtgtctatcttattttatataaataaggtgaaactaataaatttaaactccactttcaataaaagatttgctacaattagaacattattataaaataaaaatcagaattaaaatactcaccttatgccaatttggttgcataccatagacatgttcttaaacttatttgattatttttttaaaaaaaatattttttatcaaaaatcaaaagtaaggaattggataataccaactgcaatattaaaaagttattaaaaatattaataaataaataatctcacctttatcaaacttcttaattattaaaacttaaaagtgcaattcactacccacctatttgttttattacctgataaagtttttattatttgtccctacaatataatacaatatacatattattttttatgtataaatgggatatcacatggtatagcaaaagtaattatttgttttattgttggacaaataatgcactactattattacatcaataattatttttgggtgcctcattaaatggattcatgttttgatatttagaataattattgtctaatttttttttaaaatttctcaatattaactaattacgatgtagaccacaataataaaattttactaaaaagttattccaaacaccgaaacatgcattgtataattttctcttttttttttttaaaaaaaaaaaattaaagttatatatattttttttaacaaccaaacaaatcagagacagttgcgatttcaacggtcagttatttaattaccatcttctcataatttcaatttaattaattaattaattaattattattttcacaaataattttaattaatataattaaagaaattattattatttttaattaaagaaattatatattcgattctgaagctaacttttggttcttcgtcttctagatcctcccatcaatctccgaagcaggtaattaaataaccctaaattattaatctttgattggattgcgattcatttctgattatctatcattctgattcgattcctggtttatatatgcaacattgtgtttatttgaatgaataatgttcttttttgggaaagaatttcgaaattatgatttgggaacaattgaatttgtaatctaattggattggaacttggattggtttcttcttactattaataggttaggtgatcataaataaattaatgagtcaattgcattaaagcttgttcattgttagttgatcaaacattattttgcacagttggggtagtagcatttgaattggtattggttttttccttctcggttcttcttcttgtattgtttgtttatttcatcataatcaatccatatctgttggggtctatttgctttaaatgtttatatatattttttttatctgaattgggtttccctaaatgtctttttcagttcttaactatggaaacttcaaatgaattggcaaggtttttcaataattttatattttgaagaattttcaaatgaaatggctttttccttattgttttctttctctggtattttgaagatgggatgctc

SEQ ID NO: 98173 - DNA, 842 bp, Cannabis sativa
aattatcaaaaaattgagctcaaaccttagggtgctattttgtactttttggaaaatataaagtctaatttatcattttataaaatagagagttgaatcaataatttttacaaaatacatattcaaaatagtattaaattataattaaataattaacaaagaagaggtattagacataataataattaaaaaaaatctccaaagtaactattattaattattgatttatatcacatgtgactatgtaatgatgaaggttttttttttaaatggttatgtaatgtaatgaagtttaaagtttagtaatcaactctctctaaataaatattaaaaaataatcctatgtataatatggttcaaaaatcaacatcaaacaccccaaagaaaaataattaataattaacttattgtatacaagaaaaacatgcaatttgcaattttttttttaatttttaaataataataataatttttaaattaaaaaaattgaccattccaaaatggttgggatattatatgcggaattataaaatccgtccaaggtagatgagataattttaggagtatattatatatttttattattaataaatatatatatattatgattgtgaatttatgactcacttatttccacttgtagtaaggatatgcttcaaacaaatacattataatatatccacacaaaacatatattattctccttattgttttatatatccttctattaatggtagcttgtaattttgttaaaattttatgttctttttcataatgagtttttaataaaaatgatgtttttgttaaatttatatctatgatattagatgatttaatttttt

SEQ ID NO: 98174 - DNA, 644 bp, Cannabis sativa
tctcttctcttcctatggtcaactctacaatgaaaaaaagagtataagtaatgtacttactggtttaattgcagccaggacaggagatagttttattttataaatagaaaaatgctaagttatcagctcattggttgttaaaaagtgggagttagaaagtgattttggttgttatacaaaactcagtagattgtgtgggtcaagttttaaacttttcaagtcattttagattggaactaatattaaacatgagagtcattaatgttgattctaagatgggcattgcattggtgctaaaaatgaatggtaaaatgggttaatggtgcaatggaataacttgctcccaagtttctcaatacatttttgtactcgtaaaaatgttaattacaattacacaactagatcaaatcattcgcattaaattggattagttgaataatttgcagcagctcacataagttcatcagcacccaaccttgggatacttgtggatgaacttatcctccaaaacatgaagctcatcagcatccatatcatcaagactgtcattcatgtcttgaggcttgaaagaaaggagagccgatgctctactaccttccttccctctaaacattgcgtatggccctccaagagttgtattgatt

SEQ ID NO: 98175 - DNA, 608 bp, Cannabis sativa
ctttatgcttaagctgacctgagcccaaatgctaggctcaccaaatggttaagaacgttctcaacggaagtacgaccactataccatatgcactagagtattgactctgtattattgtacttccggaagttactgagtgttgtaccacatgcactccataccccctggtactcgtgttggtaatactataactaccctaaaaccctagactatactaacacccttcaaactacatttttgtcagtgttagtagtgtaaacaaataataacatgctttcattcacatatatatacttcatcctatcttacctcgttttcgtgttcaggtgtgtcggtcagcctgaatggagtagcagctcgatgttttacaggaccctaaatcataacattcataaaattgatgagagacacgttaaaacacttatcgcggacttagaatcaaaactaaagatatccctatcgatgaataacatggcaatacccttttatatcacaaaaacgagaaaaactagggttggcaaaattgccccaactggtagaccggttcctcagccgaaatttcagtttggtgggatttcctagggaccaaccggtcgaccgattgctac

SEQ ID NO: 98176 - DNA, 536 bp, Cannabis sativa
ttgaaggttttggtgtcttagcaacaatggagaataccaatatgggaggtatgtgttttacatttgtgatgctctaaataaagtattgattttggtttttaatgattatgaacattgatgtttaatgtatgtttggatagttcataatctatgtgaatgtttaacaaatacaaatcatttatcattattcaaatttaatttaaattttatattcttatcctcatcaagtctaaaccttatggtaggaggttcaaaaattaccaaattgatttacatgtttaggtagataaataggtaaatttgagaaagaaaaaaaattgatagccttttttatattatatttttgagttacatacttgagagatttgatcctatgaacccatacacaccataatacgttctatgtgacaacgagcaagcctcaaatggttaggcaatataaaaatttgtaagtgtgatgatgcacccaattattatatggttaattaggatttttttttccaaactttgacatgtaccaaatcatgcccctagaa

SEQ ID NO: 98177 - DNA, 727 bp, Cannabis sativa
attgatttttatttatgatcccaaataattaaacatgacgcatactcatcatttaccaaatggaagatcatttccttatagctgatgttagcgcattacattcaataagcacatatgtttccacttacaacccaacggagaatcgaattctacgacacttgcaaagatactatagcttcgcagacaagtatgcggtgggaaatattattgcaatttaatcatcaaggacttcaaaattatagatcatggagggattgaagcaattatgacgttagatcacagagtgtatgcaaaacacaaaatcgaacagaaataggtattttacaaagcttttggttgttacaaactactagtacctgctataaagatggatatagcaggttgtttattaaaattagttgaaggtggttattcctgttgttctttctttataatgagagtcatatattactcttattctacatggagaaccgattacaatgtaaggaaagtatgaaactatattcgtgcttaaaaacagttactaggtagtaacaactcagaacactaattacaacatgaactcctctaacaatggaatggtttaatgttaatacaactcggtattgaaaagtatgcatatttgtttacatgtataaaaatggttttaaagttcaatcccaatccaaataccacatgtaacattatttacaatgcatgattggctacagtatgtgctacttgatta

SEQ ID NO: 98178 - DNA, 638 bp, Cannabis sativa
ctgtaattctaaagcaagaacataggcataagagtacatctctggctctttcattacattaaatgcatccagtttgaatatatatatatatatatatgagtcacctggttagttatcttagaattgtatgaacaattcaataaaaactaaataacaatattaattgcatgactaatgttggaattaattccccatataagtcaacctgtaactattactaaagttaaaatagttagttacaatcctaactaacctaccagttttacaatcccacatcaagactgttagcagttattccctaaccgacttttctcagctacaatacatataaatagaagaacaaaacagaagagacttacagcttcaaaatacttctcagatctccagagaaaagacgatgaaaaccttagacctagagagagagagagtttctctcatgtgaaaatagaaagaaaagagtgaattagagaagagagaagagagaggatctgttcgatcctgagtgaaagaaaataaagagaaagcttgagagagaggttgtacatacctggttttgaagaactgagagctaccagacgattactgtgtcttggagctcagaaacttgatgtaaacatcgatcttgatagtggattgtg

SEQ ID NO: 98179 - DNA, 620 bp, Cannabis sativa
gacatgtcgagaaagtactaggcaccactggtgcctaatagcagtgctctaatagaaaatgagagaggagagaaacagagagaaaataaaaattgaaagaattaaattgtgttaattgataaagtgttgattacaaggagagacacttatacccaaagagtttgtaacagatataacaaacttgcaactgtaaaaacaacacttaactaacacacgaataactaactaactgttagtatttttgacaaaattagatccaaaatattaaatttaggcacagattgatacattatgagtaaaatagtataaattaaattagatgaatacctctatacactatgattattatttctatttacatattattatgagaatttatactattttagaaattatattttaaattatctatttatgtcctaaaaatttaaaattacacaatagattgagtgttacgtataaataattataattaaaattttacattcaaaatatatttaaatatgaccaaagtattttagttataatgaaagttatatcattttagattctatatttttgatcttatattttcaaaagttatcttttagactttattttttgtaaaattaaagttaaaa

SEQ ID NO: 98180 - DNA, 3983 bp, Cannabis sativa
accgcgcaaagcgcggttccgttctctagtataatatattcagaattatattgttgcttccttatgtatctaaataactccgtttattattaccaccaaatcttaaagataactatagagaaggaggtgccctgttttgggtctgttgctgttatagaattttaactatctttatggatttttaactgctttttcaaatcttcggtttccctctttctactaccttcagttttctttggtttttttttcccctaactgctgcttctgcttctggtttttctgcattttgtgatggatcctctcttgcattccatgaattccacactaaacctcactgaagaggaaagttctgttgcacttttgcctgctgatgttgctactgcttcaacaaatgaccccaaacacatcctcattgctcgagttctcaccgagaattatgtccacgagccttctttctttgatcaaatgggaggccactggaagggtagataccctgtaattatttctgtttatggagatggtctgtttaaagtcacttttggatgtgcaggggataaacttcgggtcctaaacaaagagccatggcatttccaaaatcaccttgtgatcttttgctccccatttgttctgcaaaatgtcacagttaaaaatctgtcaagcactccattttgggtccaagtctaccgtctaccgtttttgagcaaatccaaaatacttgctactgctttgggaaacatcattggtgaatttctggacgtccatgaagaatctcttgatgaagggtggggtccttttttgagaattcgggtaagactgcctattgacaagccgctcctccgtgggcgtatgataagtctgccaaggatcaaggatgacttctggattgactttcgatacgaacgtttaccagaattctgttttgagtgtggacgacttggtcacccttttgaaaaatgtgtagccttcatggaaagaatggacaatggtaatgatgatgacctcgagtatggaccgtggatgaaaggagcaaaactaccaactaatggctatgacaaataccgcactgatttttctaaggggaacgcttggccacttttaactcgcttggctcgtacatcactggtttctaccatcccgaacttaggatccatagcgcaaccacagccaaaaatccttttcccaggagaatcatctgctgcaactccattattgccaaggagttctaatcttggctcctttcctttgcatcagaaccccccattacatattggtactactcaaccactaacgccaattacaactacctctcatctgtcatctatcacaaatgcaacatctaatatggctatctctaccaatgacaccccttctataccatcttcattaaacaataccaataccatccatatcaccccttcacaaaccacaaatcttaaccatatatacacccctgatataggttttgcccccaatatctatatcccaattgcaacataccccccaaacacatcaacagagccaatacacacttccaccaacgcacctacacatactgctaccccaatgatgacttctcttttcaccaacacaccatcacttaccactaccacctgccacatttctgaagttgatcaagaaaatgctaatcccaacagaattttcaaaaggcataccgatgctccctccatgaggcaaatgctcaagcgatgccgaaaccaaaatactgctgctgtggctttcccttcctcgtcaaaaggagactgctcaaaccagaacgtttctttgtttcccaaggattctgatggtgactcagacgactctgcggagattgctttgcaatcccgcaaaggattatgaaaatccttagctggaacgcgcggggattggggaacccgaatgcgtttagacatctcagattgcttgtttctcagcaatctccccatgttctctttcttatggagactcgactcaacaataactctttatctcgctttcgtcaatctttgaatttcagtcacggtttggaagtccctcgccttggtttaagtggaggtctcatgttgttatggaaagacgatatcgatgtgaaacttaataatatcggctcttgttttttcgattgctacatgacttctaatgctggccaacaatttcatttttcagctttttatggatctcctactgttcaaaatagatctgattcttggacactactccgtcgacttgcggatgtggcgcctttgcaaccatggttggttattggcgattttaatgagattttgtccaatcaaaataaatcagggggtaccttaagaagtgaatcacaaatgaatgcttttcggtctgctcttgattattgccacctctctgatcctccttttcaaggtgattgctacacctgggcaaaaaaaaggacagcagtcaacactctaaaagaaaggcttgactggggttttgtcaatgatgcatggaatttgacttttaatcagccaaaggtaactcacttggactactttaactctgatcatcgagctatatcagttgtgttatccaatgcttcaatctctcacaatcatcaaagacacagtagatttcgtttcgagaagttatggttatcagaccctgaaagcaaggatataatctctaattcttggctaaatgatcaagttactgaccctatttgtggtgtcctcaacaacttggagtcttgtgctcgatcactacagtcctggcacatcaaaaaatatggccgaatgaagcataatattactgctgctcaaaaacgggttgacactttgaataattctccatctctgacttctgaaatggcagcagctctgcaacacaatgaatccattcttgatgacttgcttgaacaagaggagatttattggcatcaacgctctcgacttgattggatgcatttaggggataaaaatacaaaatattttcactcaaaagcctcagcaagaaagtccaacaacaaaatcacctctctctatacagatgatggtacaagaatcacttccaaacaggacatgagccatgtaattgaatcatatttcactaatttgtttacggcttcctcaaccgacaatgctgctcttgctgaaacacttgctaccattccaacctcggttactttggaaatgaatgagacactgctccaacctttcacccaagctgatgtcgaattagctcttcgctcaatgggccatgacaaaagcccaggtatcgacgggatgtctgctatgttttatcaaaataattgggaaactgttggtaacatggtcactaaggctgtcttaagtgttctaaatgatggtgcggatcccactcctcttaattccacaattattactctcattccaaagattaagaaggctcggcatatgaaagattttaggccaatcagtctctgcaatgtcatctccaaactgatcaccaaagttctagttgctcgcttcaagaatgtccttccacatgtgatctccgaaacgcaaagtgcttttctccctaatcgactcataacagataatattttggttgcttttgagctcatccacggcattaaactcagaacatctggtcgtcaaggagtggcagccatgaagttagatatgagtaaagcatttgaccgagttgaatggtcttttattaaagctgtcatgtttcaaatggggtttgcggatggttggatttcgctaattatgaattgcttgacaaagaatcacttcacctttcttttgaatggagaacttaccggctcagtgaccccatctagaggactccgacaaggttgccctttatcaccttatttattcttaatatgttcggaggggttatcatgtttgctgaaaaatgaggaacggttgggatttctacaaggatattcactcacgagaagagctccacccatttctcatctactctttgcagatgacagcttgcttttttgcaaggctactgatagttcttgccat

SEQ ID NO: 98181 - DNA, 684 bp, Cannabis sativa
cttgatttctacacggctcaggtggccaaagaaaatctcgaggcaaatacttccacagctcctgccaaccaaatcaccaaagtccctaccgctcagaatgttgatcttccagcccctcaggccaaagcgatacataccaaggagcttaggactcctgccgtttgaatatttttctctttttttatatgtctgttctgcccataggccttcttttgagacaaaatgatcggtcaagcagtttttaaaattggaatatgtttttcatttttaagacaacttgaccgggcaacctttaatctcgaatttaccgtggttttttatctttttctaatgaatactgttccttgttatgataattgtttgtgcaactgtgtttgttttgttttttttttcttgagattgttatttacttttaccaatgctttgtacgggtatagttgcccctcaagtgaccgagcagacttttgactcttggtcacttacatttcacaagtatgggttttgtctattcagttctttgggttcgagcagacctttgtacgcatttaatggtatattcatatcttgataatagagttgagataatctgaatttaaatagacatctttattcattcattggttggaatatttttgttaccgtagtaacttacataaaagctattatattgatctaaaccgatct

SEQ ID NO: 98182 - DNA, 963 bp, Cannabis sativa
aaacaagattaagtaagagcttaaaaaatttaagcaattgattaaatgattgagattgagatttttgcgtggttcggacgttaaagaaccctactccacaagtcgatatattgacatttagagcttgaagaaccttagtttttgctatagtattttcccctctaggtttttcttagtgaagcagaaagcttaaagaatatttctcataagtgttttttcttgttctctttacatgaagggttaaaggggtataaataggcttatacttgggtccaagtatacctgtgacctgctagggtttttgtgcaaaaatgagctcactattgggataaatacattaaatacatgacattaaggcccacggaaagatgctatatcttttgggcagaggcgtccatacagttggggacccatatgatttggacaagtgtcacgcacgggtgctacagtagacaagaatatcagagagtcaccgttggacaaaaagaagtgtacatccccttgcggtacatgcattaccatgttctggtagaggagacaacatctaacggggtgggcctaggcattagaaaatagccacgtcaccgtatgacggcctttggatgcaccttaggcttccccgtccggatgcacctccttaactcttcggagggctctgttcgctccatctcctagaaaggttgaaagggtttctgagagcgggaagatcttatctcaaagggcgaggctcctggaagtgtgaagggctggggtctgcctctggtttggactgggccttcgcatgctggaaggctcgggccactgatcacgcagatcgattacatctgtaacatgtcacgtgtcactcaaccggaaacatggataacaattagcattattagaattttttaatatttacttataaatactaaattttttatatcacactctataaataaattaatatataattttaattttaca

SEQ ID NO: 98183 - DNA, 603 bp, Cannabis sativa
tatactactcaaaagaaaccaactataatattctagataattctagctaattgtgttactaaaatattcttgaaacttcttatggatattaattctatctaattctaattctacatggctctataattttaccaaaattataaaaaattctagatacttgtaaatgaggtattgatcttttgacactccccatcaacaccaactcttcatattgagttggtctctcagccttcgaaatctcgctgtgctaagttctttagtgaataagtctgttacttgttctttgctcttcacttggcgcacctctaattcttcctgaagtactttctctctgagaaaatggtaatgcacctccacatgctttgttcgagcatgaaatactagattctctgctagatggatatcatactgattatcacaataaagtggcactgcaaaatttatggattggtgtaaatctttcattagttggatcaaccacgtactctcctgagccaccattgctgttgctctataccctgcttctgtggttgacaaagacactgttggttgccttttgctacaccaagacactactccagatccaagtttgaatacataccc

SEQ ID NO: 98184 - DNA, 1408 bp, Cannabis sativa
  modified_base (488)..(491): a, c, t, g, unknown or other
ctgatcaaataaatcatcgattcttggcagagggtacttgttcttcactgtcaacttgcttaactcccggtaatcaatgcacatttgtaaagttccatctttctttttcacgaagaaaattggtgcaccccaaggtgaattattgggtccagtaaattttaaatccatcatctcctgtaattgaacttttaactcttttagctccgtaggtgccatcctgtagggagctttcgatacaggctctgcccctggtattagatcaatctcaaaattaatttcacgtttcggtggtaatcccagtaactcttctggaaacacatctagaaattctcggaccactgggacatgctccggtcccgctaatggttccctggtaatatccacaacatttgctaagaaaccaatgcacccctcacacaacaaatctcttgccttaaacgctaaaattaagggaatccgggatccatgcatcttacccacaaatacannnngggtcctcgccctcaggctaaaaagttaccatttttctcttgcaatcaatagtggcgttgtattttgcaagccaatccataccgaaaataacatcaaagtcctccaaatttagttctatgagatcaactgataactcccttccttccacaaatactggaagggatctcacccacctgctggagataaccaactccccagtaggcagcaatatcccaaaacctctagaaagcacatcactaggtctattcaatttctcaattattctacttgaaatataagaatgcgtcgcaccagaataaattagaatagtcaataaagtaccagcaacagaaagctgacctgtcacagtggaaggacaagcatcagcctcagcttgagtcagggcaaacactcgggcaggagtgggtgtatcatccttcttttgccctagccgtagaagctgtggacaatttctcttcatgtgacccaccaccccacagtggaaacaggccctgacctgacactcgccctggtggcgccttttacatctaggacattcaggaaaagtctgccagtttttgttcccaccaggacggaaaccttggttaccttggaaccttttgtttgggcctgcagttgataattcactgggtcttttcttgcggtcaccgggattagtaccccttccagaaccagcaccttatgtttgcttccatgaatctcttctggcaatattttctttcgtatttgagcttttgcaccctcagaaactagggccggttcaactatttgggcataaggtcgagcaacccccggttatttagatgcaacaatcacatcatgagcaatatgttaatccaaccctcgaatgaactttgctttcatagtagcttcagtagccacctcatctgaagcaaactttgccagtcgatcaaac

SEQ ID NO: 98185 - DNA, 820 bp, Cannabis sativa
aaaaaaaaaaaaaaaataccatattaaatttatgaattgcataatactttattaaattatgaattgtatacacggactatagattcatattagacatcatataaaggatatccatggaccaaattatagtatgaaacacctatatagtgtgaaagtctcaagcatttttttatttaaaaaaaataattatagattgaaaatcttcccccaaaaaaaaacccactctcagcaaaagagaggttagttccaacacaaaacaaattcaagaataattttttctaataatctcttcttttataaataaagacatacacaacaccaatttacgttgttcagtaccctttgagatacctacaacaagaggaaacaaccttacaagctttagcttcttattgacaaattaagggccaccatacaacttacaatgatggataattcctcgaagagaaacactttgctcataactaaactctctcatacaatttcaaaacacctaccttgaaaaagtggctcttacatccttttataatggtagcaacaagaggaagtagccaattgtttgttgcagctgtcatagcagtcaatgagacctaattagctaattagcttagattacaagaaactgactaggctattaaaattaataaggcaaacaaagagtagctatattctgtctacttatattaaacaaaagcttcacaaaaaatgtagtgttgttgttgaacgataaaaaaaaaaaagaggaataaataaatttattattatttcattattggttttttaaaataataataataaaaaaaatatatcagtcaaatag

SEQ ID NO: 98186 - DNA, 584 bp, Cannabis sativa
tttcttacagctcatcattatattcatattttactagttgccgaaaacctcggtcaacactcgtattcagaaattttaacgagcgaatcaaagaatataacaacatgaataggagttcatgaagtctcatgatttaggttgatctactaattaatcatcattagtgatataaatttagtttttatgacaaacaacaagtttgataatgacagaatagttacatatcagtcctgtcatatataatctctattatatacagcacatttattgagatgtcaaactacatcagcaatctgaatcaaaacctcttgcaccgactgtactagcaatcgttaattaaaatttttgtactttaatatattattgactattttattcatataataaataaatataaagaacaaaaataaaaataataattaaaaaacctaatttcctaaaccatttttaccccctctttctcaatagatctattgcccaaagccaattaaaaatttgtgactgattgctgaaatgaaccacaaaatcaaaatcctctctctctctctctctctctcttgcttttggctgggacaaaccaaggg

SEQ ID NO: 98187 - DNA, 682 bp, Cannabis sativa
aatttgtaatctgtagttccaaattacaatcaatttggaccaaaagcattcgaaaccagaccaaatgaattcgttgtcaatggtttggtcaatctgaacggctaataattttctagtttagtcacaatttttataattcttgctagaggttcaaccaaatcaatccgcctaattctttatatatacttgatatgttttttctattatgaaatattgatatttgggaacaattttaactaatattgaaacaaaagtattatactttaaatgaaatcttccaatgggttaaaaaaaaaaattcttccaattacactcatatctaagttcaccctatttcatttttcaaaatcttcttcttcttttttctttcaaaaaaaaaaaacccaatattattacaaaattaggtctaactgaaataaagtaccccatgttctgttgaaggagaccatcttcctcccttttaatctttctttctttctctctctcaattgaaaatcctccaatctactggaattggaaaatcatttaccttcctcgttcggaattgatgggaatgagaatgtcaaactaaattaaattttagcaaccatgttgagaatcatggagttccatctcaaaaccaattggctatgagtggagtagcccatattcttatatatggctcaattctctactatttatt

SEQ ID NO: 98188 - DNA, 520 bp, Cannabis sativa
gttttgttgtgctgatatatatatggctttgtaaacattgggaaagatttatcgttaatgaattaatagctgagattgggagattggtactgtctctaagagtactcttttctattacaaacccagttgaccattcccccatttcttagttgcaagaaccagacgggaaaatggcggagccacaaaaccattgttaattaagagcatattcattattaatttagattcaaagcaactcaaccagaaaagtcatacaagtcaagccattcatttcaatgttagtatctgaattttaattttctctttgggtccataatgtttgaagattgttaatttagtcatggagcattgttgtggtggtggtgtggtcactacactggcaggtacgggtgttctttttttagcccaaaacccatgaatctaaaatccagttaatccgctggatgttcagtcttatacgttagtgttgcattaacaacttatttataaaactggggatatttacaataatttttatagt

SEQ ID NO: 98189 - DNA, 683 bp, Cannabis sativa
gaggaagggagccatcaatgaaggaaatcttgttcttggcagccaaagccatcgtgatgcctcttttccaggactggtagttgctgctgttgaggacggtggagacaagaatcaatccgggatgattgcctgtactcagaatgaaaggactggagatatcgtcgttgataggatgaatcgattcgaagtgaggagcagcagggggaagatcatcgacgatgggggatggatcttgaggttgaactgcctctggattcgaattaaatggaagtctggaggcacgatttctacgatgagtagtagcagaggttagattagtagcatcgatggagtcggacgtgatctcaactgcagaattatcgaccgtggatggaggaccgccatcttgggagcgagttgaaggtcttgccatgcgcagtgggcaagatttcttttgataccatatgagaaatagaatatagcagagaaaaatgtatctgttttacttgttattcaactgaagcttagaatacaagagtaaggtctatatatagaccaggtaagtcggtgaagactctaacagaaaaggatccagctaactaacttcctaacagaaaattaattaactcttataaaaaagtgcaaaccagtgagattggttctgatatgtcgacaaagatttttcctaaaaagaagcttaaagc

SEQ ID NO: 98190 - DNA, 731 bp, Cannabis sativa
  modified_base (617)..(623): a, c, t, g, unknown or other
  modified_base (700)..(705): a, c, t, g, unknown or other
aattatatattgtattatttttaattaaagcaaaacacatctatcacaaaacttagtatatatacgtgcctcgcacgtaacattctactagtatttatacatatataaacaagggagtgacaaagaaatacctgaaaagacatcagtgacaacgtatcagattatcaggcttcggctttcagtggaggagatcacgatgactgcaattttcggtaaataataaacgatttgatttgaaatagtggcagcacacaactaactttttttttttgtaaattattgagaagatgattatctctttgtttcatttatgatttatgacttgtgtgaatgagtatttgtgcgaatgggcatcttccgaatgattatgttagtctgtataatctttgtaaatagaattggtttacttgtgtatgaaatgagtgctgttaaacttaactttttttttttttgaatactttgttaaatgcacaataaatagttaaatgcaaaacaaaataatattacgtgggcattttatatattaggtaaaatatctattctatataaaatgtggctatataaccgaatttttagtttatgagaaattattgggtgacttttttttaaaaaaaaannnnnnnaaataacaaattattagatattgccatgtagagagggtcaacatagttaaacctaaatataattaatccacctaaannnnnncaattaataataaatttgttcatatt

SEQ ID NO: 98191 - DNA, 565 bp, Cannabis sativa
gcatctaaaagaataaatataaatagaaaaaaaatagtttatttaaatttgacaagttgtcaaaaatacacaataggctattcaaaaatatattaacgactcatcgaaaaataagctacgaaatcagaagattctaggtatatgtcgcaaaaaatgatcaattgaaaaaaaaaaattacttaaattttcaagttctaagtagagttattcatcaagctgttcagcacaaaaaatacaatttaaaatgatcaacaatgcaattgcagtttatattttcccaagaatgatgcagtgtgttgttcccgttgctttgttataattatttttagtttattattgatggtttgataataaatttgtattggtttagctttggaattggtggatatgtggttaatggtttgttgtggtaatgtagtgaagtagtgatgttgatgagtagttgttgattcagtataacaaatgagtttggcttagaagagagggttgtttgagaaagtagtaaagttttattgatagtttggaactttggttttttggtgttggttgttttgttacactagct

SEQ ID NO: 98192 - DNA, 669 bp, Cannabis sativa
attttattagatgtttattctttattagttactgttagtggtggttcttgtagcgatccgcgttcgacgaatggtgttgtccacacactaaccatctcttttactagtttaggagattatatttggtttataaatattattgggtcaattcgttaaaaaaaaaacactttgtttaacaacattaaatccacctaaaaaaaaatcaaataaggagtgtgacataagaacaaatatcccaccataaattatttttactaattaaattttttcaccaaaaaaaaatctcatagaaggaacaagaacacaagacaagatatttgaatagaattccaagaccaatacccatatttatattatgatgattatagcactttccttgcactagacgaaaagctcaactactgaaaatttaacataataccataattttgacctttgttcaaaattccacaatccgtgtggtcaacaatattgtattactaaaacatattaatattaattaataataatatataatacgaaaatcataagatcaaaatggtccataattattcaaatcattaaaaaaaaattaaagtaagtagtcaataattccaaagaggtttgctttagaaaaataaactaataataaatttgtaaaaatgtgtttttatttttaagagaaaaata

SEQ ID NO: 98193 - DNA, 687 bp, Cannabis sativa
gattttgtgttacaagtttattaaaactcttttagcaagaggggtaagattgagatgagcccaagatattagattacttatcacaagaattttttaaattttcattgtccttgtatattagtttgggagtcgttcacagtataccaaattgagtaggggtatcttttccgatattaaaattttattaactagcttccaaggggcatctatcttttatgttagttgttgatacatgaattggttaaacatacccttagaatagacattgaactttttttgaatggaaaaaacccctccaccttctcgtgatgacatctctttgatctaacctaaacaggttccctataaaaaaaacttaaaacttagtattgtcaattatgttatcattttatttggtgttcgaatgattttttttaatcacaatataagtcaatttttaatttagaaaacaacccatcaattaatatatagtacacactacattacattagttactaaataatatgttcaagtagtaaaatttataaattgatttatatgcatatatttaataaacattgccataaaaaaagtgtgtatttattaaaaaaattgttgtgtttatctatctatagtaggtatacaaacatataaaacatcttattatatagttatatgtataggaccccatgattgagcattttaata

SEQ ID NO: 98194 - DNA, 1466 bp, Cannabis sativa
tattggcttaatggataggtaaggatactgaatcaaatgtgatgcgtattgaagccgatttgaagatgttaagattgcaggtatattaacaaattcgattacttatcttgacatttacttaaaggatgttgttgattgttcttcatttttctatcctatgattggtttcagatctccagctatgaatatttatatatatatatgtatatgtgtatgtatatatataaatagataccagcattttcttaaaatggtcattgactcatagtagcctgtcttttatagtgtcgtaggcccctcttgctttgttcttgcatgtgcagtataattactaggtgcccaaatgaacttcaattgtaggttccaattctttaaaatggcagtatttcatgcagcatcttctttaggatttatatagtaacaggaattctaacaaaccttacataatctcctacacaataataatagtagtaggcagtaatgactatattaaaatatttttgtttctttttacatttctatttagctcatgtattgtttttacttgtagtcatctaaagctttatgaataatatttaaaaatattatagaaaatatttaaggggttattttggaaaatactattttaaatatttcaaaattggaataaaatgacttccagaagtggtcattccggattaggattgactcatttaggtggaatagctattccattaaatgattatttctgctgtttatttctgcatcttccacttttgatcattacgaatcttatacaaaatcatcacgacattttgttctttttgcgctttgacagtacattaatgtctataaatacctgatttcaggaagaaataataaagttcctgccggacgatggtacaaaacaaactgttggagaaaggctcctcaatcctgaagaactcattaagctgtgtcttgaaatgagaagcccagagctatccttgtgtgcttttgatgtgtttgcatggacaagctcttctttccgtaaggccaataaaacccttttggaggagtgctggaggaatgcggcagatcaggatgattggagcgaactttatcaggcctcagtcattgaggggtggacggatgaggcaaccatgcagaacttgaagcataccgtgcttttcaaggcttcaagcaggtgttacggacccttagctgaaacttttggggaaggatttgaccaagtcttgccgctgaggctggaaaccttggagtctccagccaagaaagatgcttcagtagaagcaattctgatgcagcacaaggactacccggaggcagggaagctgatgctgactgcaatcatgatggggagtatacaggctgataccaaagaagaaaaggttggtgatggtccttctccaatggagtgacatttcatcgagttgattagtgatcataatggtaacattttgaacttttcgtatgaattacctttt

SEQ ID NO: 98195 - DNA, 585 bp, Cannabis sativa
tggtttatgattactggtttttctcgtaaatctcttattgctgattgtccatggtgcgaggaaagattaatgctcgaagctagaccactcaagggactacttctgaggattcgaatcctttttctgttcttgaacctaattctagatctcacaacgatcctaatcgtgatccgtcttatctttctaacagcgatcatcctagagtcattcttgtccctaaaatccttactggaagtgataattatcactcatggaagcgtaccatgactgttgcattgcttgcaaggaacaagatgcaatttgtgaatcgaaaactcagtcaacctgatgaagatgatgaagactatgatgcccggaatcgatgcaactgccttgttgtctcgtggttacttcactcaatttgacaagaaatctgtaaaagtatcatgtatatggatgttgcagctgacacttgggatgatcttcaagaaaggttcagacagaggaacgctccaaggattttccaagctaaaagatcgatgcaactgctgaatcaaggtgctatggatgttactgttggggtttgtgccctaaataaaaatcatt

SEQ ID NO: 98196 - DNA, 884 bp, Cannabis sativa
tgtgattataaaatattactatttttaaataagtaatgttatttctttatgtaactactattcatttgctaaacgtgaaaataagaatttatatataattaccacttgacaccaaacacaccttatatattaaatacaatgtaaattgtaatgcttccgcttcaagtctctattggacatccttcaacagacttatgactcttataaacaagtatgtcactcttgttgcttcttggaatgacaactggccctgcaaaccaatatgagattttctagcgagctttatcctcacttagacatttcttgagaaaactttctaagagatcacccatcccaatattaccccaattgaaatacacctaactttggaattctcaagtgatggatcaccaaaaataagatgaaccttgttggtataagtagtacccatcaatctatttaagtcatcttcaactatgtagtaccatacctacacaatcttagaatcgtcacacttgacctttcccaaaaaatgtaggatttccacaactcactcggtatttttcttaaaggaccacaaaactactgattgttacataaatgttagactgtgtaattaccactctagtaattacactgctcaataattacacagttactttcaaatacgccttaatttttctttacaaaaatttctaaataaaattgatgaaatatgaactataactataatgacacaattataaatataaaaaaaatataatttctttatactaataaaaacaaaaaagatattcttagtataaaaatttgggatatttttataaatacccaaaaagttaaaaaattacacataggttctagagaattttaaatactttttttttttttacgatttataagtt

SEQ ID NO: 98197 - DNA, 641 bp, Cannabis sativa
agccccttgatccataaacaaatcatgctgccatggcgtctccggagcctgtaccattttcaacaccaataaaaaaaatggaaatttagtaaccacaattacaaaaagaataacagcttcgattatacaacaacaacgatgataatgaaagaaaacaaaacagatctgagaaaaagaaagatgatgtgaccttagaggcagcataaggagcgatacgattggcggcgcgattggggagtcgtcgagcggggccggggccggagcctctgcctctgcccctagggtttccggatccagatttcttattgcccttgatgatatcttcaagggacatgcttaaaggatctgacatgttggcctctgagaaagatgtcacttagacaaaggtgaaggaacagagatagctagggtttcgtatggacgaagaagagaagaaagaggtttgaattgaaagaggtttgagctatttttgagattaagccagaggaagacagtgacttaacgcgtaagggttatattaacattaaaaatagatatttattatatttatttcacaaacagcacaaaggtgtcgtggtgtagttggttatcacgtcagtctaacacactgaaggtctccggttcgagtccgggcgacgcca

SEQ ID NO: 98198 - DNA, 584 bp, Cannabis sativa
agagtctgtactgatgaaacaggaagaaaattacacttttataaacattgggtacttatgccactaaaaaaaaatcattgagtttatgccgcttacaaacctaaaactttaggtatttatgacactatttaccttaatttataatggtcattaatccatgataacttttgaagaaagagttatttaccatgtatttatgatcaagttgttcgtttattgttagttattttttcttatagtgtgctatttcgtgtgttttttttttttttttaataatttggaattgatagtaataagttaataaattttgttttagctatatcagtggctgactcaaaatttaaagtgagaggatataatttttttttaaaaaaagaagggggccaaaagtaaacttaaaacatatgtttataaatatcattttttattacaaatatatattgtaactcattaaaatacatatattttttttagattttttttctaggcgcgactgcccctcgctacaatgtgggtccgcccctatgttcatgaaaagaattcaagacacaaaacttaaatttttgctggagttaaaaataatt

SEQ ID NO: 98199 - DNA, 608 bp, Cannabis sativa
attatattgaaatgagttttatttagggcataaaacccaacgagatctgggctcgcctagcctcagttgagaataaggggctagggatggcccgtcattccccccattccaagggcagacacctcgagcttctactttttcctgatagaagaactattgttcgccatctcagaaaggctggtcttctctgaggcagacatttgtacctgtcaaaagtcggcacgtcagtaaaaaaggtcattgtttaacccctaaaattctcaagaatgacgctgctaaaactagtgtcctagaatcgggtgcaccttaatgattccctcaaaattctaacaacgagtaaatgaagaacttaccgattgacaagaagtggtcgaagacggtggttatggtgcagcgtccatagcgggaggatcggtgctcgacaataacaagtaataaaatgcgactaggaaggattggaactcaagaactctagtttgatgttcaaagtgaagagtgtaaagggcacattccacaagaagtagacgcttcagttcacccccaagaggcatccgacaattggatgagtgagaagttgaaagggtacctctcctcccaatagacgactc

SEQ ID NO: 98200 - DNA, 944 bp, Cannabis sativa
aaagttcagggggcatgatttgatacatgtcaaagttcaagaggcaaaaatcctaattagcctattttatattatttttgaaattacaggatttggtttttcctttaacaaaactaagcatctaatcggtaacttttacaaaacataatttatctttttagatattgatttgcgatatattttggcttgttgagagatgtattggacttggtaatttgtttgatgtttgaatgaaatcatcttaggttaaaaaaaagttaattaccttatatttgaagattgtatttctatatttatgataatattatttcttagatatttttaactttattgttcaattttcaaaagtatatttaaactatgacatattcttattgattaatcataaatgctcttcttccaatgaataaacaatttaattggttgttgaaagtttccttttatttctaaaacttaagctacatttatgttaagagaataaatgaataataatcataatccacagtcaaagtataagtatatatttttgtacaatttggagaaaaagttcaaatattatgctttgtatatttattctcaatgtgtaattatgaatggttgagaagcaaacacaattctctcctgaataactatgaaacttttatgaaaaagaaattacacaacacaaaaactttcaaagataaagcataaatagatgcctattgtatgtatgatactagacatggttattgcttcgatcgacaaattgccatgcataataggctgtgaaaatcatattgggaatttaatgactcagccgtataaacatataagaagcaactataatagagattgatgtattaattcaggttctgaaattacaaaaatagaaaataaacaaacctaagatataaatttgtatataatttaaatcaataataattaaagtaatttagtatatatat

SEQ ID NO: 98201 - DNA, 703 bp, Cannabis sativa
  modified_base (671)..(676): a, c, t, g, unknown or other
tggatttcaaattttgttatatatatttatagaaaaataaatttgagttgaaaattaattttaatttattttggaccaacttaaattgagtaattttaaaatattcattgagaattactactaagatggaaaataattttatgtttattttcagatctatcttagtataattgaaatattaaattaaaatttatatttagagttatttaaattagtaattttaattaaataaatatatattaaaataaatattagatgaaaacacactttaaataataagcttcattataaggatattcgatcttcattattggttctacatagttcttattttagtgagattcatccccaatagatggacgttcattagcaatttaacgtcgtagaatctcgaaaggcaagtattattgtaagtattttattgttactaacatccatccgaatggtggctcataagagtaggacttacaagttatgaaacaatagtagaagctcatgaaataagaatgaccttgattctcaactaaaacgaagcaactttggattctcttttcgatcgaataacaggttactagaatggtgtccattttagttgagctgactgctctattcaatggttgatatctctgactctcgcccaatacgaagcactgtatcagtttgttggaaannnnnnaaattatttaggattgtttgtttttgt

SEQ ID NO: 98202 - DNA, 1513 bp, Cannabis sativa
  modified_base (1280)..(1282): a, c, t, g, unknown or other
gcatagtgaaacttaaagccttctagtaatattaatattacccctgcacccgaacttgctcgttggatgcgccatccacgtataacctccaagtgtcctcgcctcactgatcaagtggaattttttttggagttataccttctatcaagaagtcagcaaaagcttggcctttgatggatgttcgatgatggtatgttatgtcaaactatcccagttcaatcgaccattttatcaatcttctacaaacatttggttttgataaaacttgtctcaagggctgatcggttaacacttttatggggtgagcctagaagtatggtcgtagcttacgagatgcatggactaggcacaacgcgagtttttctagaggggtatatttggattattcccctagtaaccttatacttacgtagtaaataggttgcagatgcttgccctcttcttgtactatagctgcactaatcgcatcttccgagatggctacatagagaaacaacgtatctccagttattggtttccccaaaactggaggcgttgcgagatgcctttttatgttctgaaaggcctcctcgctttcttttgtccactcaaacattttgttgcctcataatatgttgaagaacggcatacacttatcagtggacttcgaaatgaatctattaagtgcagccattcttcctgtcaaggcttgtacttccttaggctttgtccatgatggcttgtctattaatgccttgatcttctcaggattttcctcaatacctctcgtgttaactatgaatctcaaaatttttcctaaggaaactccaaaggaccatttttttgggttcagcttcatgttatacttctttaatatttcaaagcattctgcgaggtctaaggtatgatccttacttcttatcgattttaccaacatatcatcaacgtaaacctccatgtttcgcccgatttggtttgcgaacatttcgtttaccaatcgttgatacgttgccctagcattcttcagtccgaacgacatgacttcataacaatagaatcccatgttggttacgaagcttgtatgttcttgatcagggagatacatttatatctggttatatcaagaatatgtgtccataaatgacataagctcgtgcccagcagttgcatccactaactggtcgatcctgggaagtggaaaacagtcttttgggcacgacttattcagatcggagaagtcaatacaagttctccaagttccgttgggcttcgggacgagaacaggattggctatccgtgannnataaaacacctcgcgtataaagtcgttggctaataacttgtcaacctcctaatttagtgccccttgcctctcggaatccaagggcctccttttctatctctttgttgggtagtttggatcaacatttcagtgatggcagataatattaaggttgatccctatcatatctccatggccccaggcaaactgatcctggttcgcctttagaaagcttattagctgctatttgag

SEQ ID NO: 98203 - DNA, 511 bp, Cannabis sativa
atatatatatatatattattgacttttttagtcgttgccaaatttcgccgagctcctctcattttggcggtctttcaagagagactccttattatcggtaatatatatgtatttttagttcatacatatttatatatataagttggtagttgttgtaaaatttaaaatttaaaatttcaatttcaatatttttattattttttaggtattgggttcttggtgttgattgaagagcgcaaaaatagcacctaactttattggagaaaagtataatcactaaaactttaaaagtttttatttagtggagtttaaaaatcttagatattcattgtgaagtagattctgcgattaattgtactgcgattgggtggataatttttgtattgttaatgttaatttgtttatatttgtactattttttatccattttgtttcttatttattgcatgtctgaaattttcaagagcatccaattacagttgttatactaccgaaatttcgatagaattag

SEQ ID NO: 98204 - DNA, 520 bp, Cannabis sativa
  modified_base (28)..(45): a, c, t, g, unknown or other
taggatgttaatcaaacatacttgttannnnnnnnnnnnnnnnnnaaaataatttccaacagttattaggtataactccacttaaagaacggccagataggggttggccatctaccgcttggcccacatgtgggacctatgactggggattggacgactgaccattatgagtctgggcggtatgcttgataggaatttcttctgtacagcccagtgggatactggacgtaacaactggttgctgattagcaacttgataggctctccgtatcagtacggtagcctgccttgttcggtcatcgatggctgcttgttgagccttcaatgtttcaatctccctatccttccactcaatgaactggcacctctgctcatcatatgcaaggtttattgcggcacggagatcctccttgtaatacccgggattaagaaaagaattagcaaaaccctaactagataattatgagttaattgaggaattatattattatatagttcaacatatgtgaaattatatgaa

SEQ ID NO: 98205 - DNA, 639 bp, Cannabis sativa
cttaataagcaagagcgtaccggctgaagaaaaaagtaaggtagctatctatataattacttctatgataaatcagaataaaattcagttctttcgctttctgttctagattttactaacggatcaaatattaattatgatagaagtaatccaaatagattggtaattaatcttgatttaatttttttaggtcattctttctaatggtatttttaaggattaggtttggtatccgggtgatgttgaaatgcaaagttacacaagtataatatataacacacatttacacaataaaagtcaacaaatgtattccacgcttatattggcttaattatcgtagatttgtatcgttgtggctgtatgttaaaaagttagtacactcagtttgttaaaatttttttttttttttttggttagaagtataaaataaatagaaaatttgacttatttttattatttaaataaatattatataaatttttttaatgacaattactttttgaatatgagtgaaaatgatctttttaagtaatttaagaattatataaattatataaattattttaaggttaaaaataatgcttaaagtctttttcaaaagaactacaagcttcttccaaaaacaatttttaaaataat

SEQ ID NO: 98206 - DNA, 599 bp, Cannabis sativa
  modified_base (27)..(30): a, c, t, g, unknown or other
aaaatagattacattgaaatggagttnnnnttagggcataaaacctaacaaccacaccttattcgttgcatctgggaaccaccaaaaggtaccaggatctaaaactttatttttggtggtatggaatgaaaagagatgtggtcgaatacgcgtcgaggtgtttaacctgccaacaaatcaaagctggacatcagaggccggcagggttattgcaaccattagcccttcctgaatggaagtgggaagacattgcaatggatttcgtagttggtttgcctagaaccacgagaatatatgattcgttatgggtcatagtggaccgattcacaaagtcagctcattttctaccagttaagattacttatacagtggatcaatacgctgaactgtatgtgaaagagatagttcgtctccatggagctcctaaatccattatttttgatagagatccaaagttaacatcgaaattctggataagtcttcaaagagctgtgggtacaaagctgaagttcagcacagcttttcacccttagactgatgggcaatcagagagaactattcaaatattagaagatttactgcgagcttgtgttatggac

SEQ ID NO: 98207 - DNA, 746 bp, Cannabis sativa
ttattgttgaatgtggagaaaaattttggctgttggattattgatgaattattgttggtgtgtcaattaagtttctgctataaaatagtttggggaaagagaaaaatacaggggaggtactgcccaaattttttttacactagaactagtatttttggctagttgattggtatggcaaccaaaagagtaaaaacacgagctaaccgcttcacgcaaggttcgtcatcacatacccctaatcttatagatgatcaaaatcaacaactcacaaggttcgtgaataacctagcagctaaacggtatgaaaagttaattaagagaagtatagttcgggagaggggttttgaatatcaagatacaccttttgagcgggacctagggtatgaactcatcagaggagagattgcccgacgataatggtataaattttgtgatgcagagcatgttgggaaagctaatcagaatatagtctgtgaatttttcgcaaattatccatacaaaggggacgacaacactgtctatgttcggggagtggtatcagtcactgtggaatctatcaacaactcctttagcctccctacactaagtgagaatcaagatgaaagaaggatagcactccgtagagaggtcctcgctgatgatgcaattaccgaagagttaggtcaggagggcactcgattccatgtagaagggaaccataaccaaaagttcctttaccggtggcaactcaactcaaaagccagagc

SEQ ID NO: 98208 - DNA, 850 bp, Cannabis sativa
gtttggtaagggcgactattttctgtatgacgtttcaaacatttggcatattcctctgctcctaagggttagtgggttttttttctttctttctaatttcttcttatgtaccatgtacttcctgtgcaacttcaaatgatggtattattttgttctactcataaattaggatcagaaggctcatgaagccatcttccaagttctgaaccttcaaatgtttgtttcaatgttttagcatcatcttttttgttcattttagcaataattgccttacacacaagaaatatatctgttggcctacggaagaaggtttttgttgattgggttgcaaccactgatttagaggatgcaacagctaaaaaggtgactaattaaaacatgttcacttgtatttttgtttacattattactaatattatgttcatcattcataaccagaattctgatgctctgcatggaagttattaaaagcatttttcttaaatgctgaaatcatctgatctgatctcttcatttcactttttgattatgaatgaataatatcaggggtcaaaaacacacatgggtgggacaatgcgtgttgggtcaagaaaacatattttcaagttatggactgcaaatcagctaaactctaagtgtttctttctataatttcaaagcaatagcaaatgaggtagttgtgtcttcataatgaataattaatggctttatggtccttattattagatataggaataaaatctatattgatgagagagacacctgcacagatatgaggtatgcaccaaattaagaaacagtagtaagtaagtaattaaagttttatggctatattgaattgttttgtttt

SEQ ID NO: 98209 - DNA, 569 bp, Cannabis sativa
gtcacccatatatatatatatctttttctcgatttttttttcaggggcgattgtccctccttgtttctatgtacgatgtcatatacataatgtatgaatttattgttgggtaccctttttatggcagttgtttgagcacattaaatcagtggatcatgaagagaaggatttggggattattaatccaggaatcattaaatttggaagcagaaagtactatagatacattggttcacttacagttcctccatgcacagaaggtgtcatttggactatagttaaaaaggtcttttcactacagaacaaattaaacttattttaaaaaacagcacaaaatccatttctcatcactttcaaatactaacatagtgttatattgtacaggttagaacagtttcaagggagcaagttcatgcactaaggaaagttgtccatgatgtaagccttttttttttttaaattgagaatacatatatagatgtatttagaattttaattaaaacccaattcataaatatatatatatatatatacatggaacacttcttaatgagtaatactcattgatg

SEQ ID NO: 98210 - DNA, 892 bp, Cannabis sativa
tgtacctcaaaattacacggggaagtattgcaacctagaatcatgcattacagagatgatagatttctatggcaaagtttgcccggtaattagcaaaccgtgttgcgagtttatttcaaaagtggttcaaaattgtcccgatcaagatggtaagttaacccaaagaagttatgagtattgcaaaaaccttaagaattaattatcccacaacggcattaccaactaattaagtttagtttccagttttttttttttttttcaatgtgttatttattcagtttagttacttctcatgtctaattaaatttcttagctttttctatttgtctacccttttatcatttttatacaattaatatattagtcgttttttttttacattaacatcttagttttctagtatatacccttaacatgtatgatcagtaattattatatgttaaactttttcttaacaaaagagtgactcatctacgtacttggtttcatatttttaatatgatcatcgcaacggccaaaattgaatgagcaaccaattaagactatatataataattaatgaaaattattcactaccaactttagttaagcatctcaatatattatgagaaatgataaagggtaccggtggtgcctagcatccaactaagtatcggatcacatataatttataatagctttttagaaagtatcgctaattaatcgaaacgcgacatgtaaagaaagtactaagcattattggtgcttaatatgcaatgctcatatattatatacaactatatataaaatgcatgatcatcttgatcaatcaaaacaaatacatatatatatatatatatatacacgaaatatattattagttgtttgttggtatttattaggtttgatgatg

SEQ ID NO: 98211 - DNA, 530 bp, Cannabis sativa
gctgagcgacgccgggataaccgtcagatgcaggctcggaaccgacgcgcctgggatgaagacttggagagggagcgtctagctaacgagaggcagatggaagagtgcttaagggagggtgttccattttaccccccaggcttccccacgggctgccgccgctgtctgaggagggttgttcgggggtctattgtgatccctggttctctgtgcatactctgctggcaccatcccgaccgtgaacgtttctagcttcctaagttctaggttttgttagatacttgtcacttttatgtgtaatttttggctgtactcgactgttgtttagtatgtctttctattcctcctttttttttatgtaacttgtatttacaatccttgaatggacttgtgtttattactcttgctgtcacttcctatgtcttatgcctactttaagtaatgttgggggagttatggctccctcaagactatttattatctatcacttatgcatataattcttcgaatccattccaagagtttttttt

SEQ ID NO: 98212 - DNA, 1111 bp, Cannabis sativa
agaaacttgcggttcttttataatcaatttatcaagagctcctctttgagattgagttaactcctcaatttttttctcttttcttacccagactcgtatattttttaattttaggagacatagtaaaaaaagataacaacaactaatataatatttcaaagaacaatcaagataataataattattaatttaaaagttcaaaaacggatgaaaaaacttgatattcgctgctaattccgtcttcaaagtttaaacttcaaattgaaaaaatttacagtcatcaattgcttaatgctcatttattattaattttctgatgatttatgcaattatatttttagaataagtaaatatactaataaacaataattaactaaataacaattaatctcaattaaaatttttttacaaaaatatgattgattgacggtattaaacaagggtgaattacaacatatacatattacatactttttttctccattggtttcagcattaattatgtaaataggtatatttagtttttttaaaaaaataaaaggtaaaaagacaaagaagaagaaactagctaactactaatactaactacattgtcaaacataaaaattgagataggaatatgattgatggtggctagtagtctaatagatcaaatataacaaaaatacatatatgaaattaaaaataataaacaatatagatacaatgaacaaagagtaaatatcaaatacatactttctattaaccgttgataaatttatctcaagaaattccaatgaatgatattattctccaattcttttaatttttatatataaaaaaattaaaaatatagatgatagcaaaatatatctaatatctttttttctcaattctcataaacaattttaatttttgatatgttaatgaaaagcttaaaattatatatatatatagtcatgtaggtgaatataaaaagtgttaaaaaataaattaaatgatattaataaatttagtactgttagtttactagaaattaagaaatttagtaattaattgactaatagttggtttataaaaaaattaaaaaaatatatgaaaaggtcaaaaattaataagttttttttttttt

SEQ ID NO: 98213 - DNA, 722 bp, Cannabis sativa
tgttaaattgctaacagaatacgagtattggagttttaccgctcaaatttgggttttggggttaggtgaaaccaaaatgaaagtttttggagttttgccgccatttacccttgtaatattttattgttattttaatgaacctccattcttataaattggaagctcctcctctaaactcattttttacgttctgaaaaaactccgtaagatcaaaacatctctttttaaaatttaattttttctgactaattgccttataattttcgtgagaaataaaagctctaaataaacgtaactccattatcattacaacaccaagaataaaatactataaaattctagtctcttaattactttcatttcttacttttgtcctcaatctagccgacgatattagccaattcttagcatcaacacaaatcacccattgaaaagtactcaaatattatcgttcaatttatcttctctcttttcctatttcttttaggattttatattattttataataatatcactatattagtaatatttaaaaatattttgaccataagatcctaatgataatttacacattatactactgttctaaactggtaaaggattaaaactccaaagccaaaatagaatataaattaacttataattaaaaaaaaatgtcataaattatttgttcatcatctccctactcttttggaaatgctatcgttgggtttggcattgg

SEQ ID NO: 98214 - DNA, 796 bp, Cannabis sativa
agtgaaaacatcatggcttatcttcgggtagctgagcacgtacagttgctggaaacttgttgctacctggtttggctgctaaattaatcgtgtgtgaggtagcaagctcgtcgagctccatctctcaagtacacactacaatatctttctggactcatctcaagtttggtcttccatccacaatcattgtcacagctagatagcatagggcctaaattttatttttgtctaaggcctaaattagcatagggctgaccatgttggatcagacatattaagttaactagatagctaggaaagttggccagaatgagcgatgaggacgggcttatagtacttgatgaaactttggatattgtctttgaatctttgcgaatggctgaagatggtgaagttgagaagtggtgttgggtggtggtgctgctatacctttgttgtttgattgatcttagataagagttttaagataagacaaaagtaattaagggtttctttttgggtggaggagagaaatttgtgtttgtttagggagggttgagaaatgtttatatatataggaaagaaaggaagtaaatggttattaaaaatgtcgttggatgggaatctaggaatactataacagagaaaatatactttatattaattagagaagaaaaaaaaaattaaatgaaatcaaattaaaattaataattatataaaaaaaaatataacaagttgtctggttggagcaaggattggatgaattcctgtctgacaaaatgcacgagttaataaagtaaatggaactcatgatccc

SEQ ID NO: 98215 - DNA, 576 bp, Cannabis sativa
ctttgaattttgaattggtagtttggtatttcgttatattcttcagagtattctgttggacaatttttcgaggatgctaggcaagccacgagaactattcttgataatggccgtgttccaatagtaactggtgggactggtttgtacttgagatggtatgtattatgatatcgttttgtttcatatagatcagtcttcgattttttcttgtttctttcctctttttctaaacaattagtttgtttcttcaataagatttgcttgttaattgcttgcctaggttgtatttcatatgctatatttaactgacacttgatagtttttaaatatcttctatgctgaatcggtttagcagacattggttactttgtgaaacaggaaaacgattatgaactttagttggattatatcgatgatgttgctagttttactattagaatgctgctgattgaaataatgttcatgagtaatatacatttttgtttttcgggttttcttttaacttataattcagttgtgttctttaacatactgatatactactggtggaattgatacaattttgattgttgtcga

SEQ ID NO: 98216 - DNA, 836 bp, Cannabis sativa
ttgcaaatccttctagaactgtcagagggggattagctcccagattatagcataccatcgaggaattccaaaagtccacctcctaatgaatgtcatcagctgtgatcttcactttactctgtgttgcatatgctgattcaagatttcgaataacacctcccgatcgaagaacaggtggtactgcatccataccttgactaacgacagaggagcacctctgatttgctgccatgaacattgcgaaatcttctttaatagcatctgcctctgaattgtcttcaaagaagtgttaggggatagcggaggcataaacacatctattagtcttccatcatcttcatctagtcttgtttcctccccaatcgaatgaccttcatcatcagagaattctaggggttcaacccctaaaatttcttccatagtcttagttttcttcacatcagttgaagagttcggacctcgtttcttcttcttcttagcagtagcctggatcttggattgagtttttgcccttgtttcagccatggcgccagctcgagagagctgcaagcacaaaaactcttttgcagccaatttaacatagaattttcaggatgacaagatttctaggctaaaatcccatgattgccatgtgttgattcaactgtcttttcctgttggaattagatcagttttgaggatagatgttcgaaagacacttactgagctatgcttattgttcaagcaactttgctcgcaaactttaaatgtgaaagatattaagaagatgcataaagacatcataactattttatgcaaattggaaataattttccctcctgcattttttgatatta

SEQ ID NO: 98217 - DNA, 874 bp, Cannabis sativa
tttggaaggctcgaaatgagatggtttggaaacaaaaaaaaattacttttgcaacataagttatattgtcaactagggtgtggttcgtaatcaatggcaaatatctcaatcacaaaagatggggtcattatttaatccaaataaggtgaataatagttaggagcattagactaaaccaaatttgcatatgattaagataaatgattatggaaattttggatcagcaacaccaggaaaaattcgccggctgctataagtaactgtactgttggctgcaacagtgtatgatcagatttggaaaaatcaaaattagtgtgtgtttgaagggtgctcgatcgaggtcagccaattcaatagttgctgagataaaaaaaaagtgttgttttttagattggtcaatgttgttaaaagaaagatgaacacaaatgatcagtattatttacttaaaatgtttagtttattaagaggtcagccaattctctttgttgtgattaatgaaaaaatttattttcttaatttataaaaaaaaatatttataacatttattgtaaaaaatatcttattaaatattgtaatttaaaaaaataatttattttaaatatataattaatttgagtttattaaaaatagaatttttacatgtgttacaaaccttttatagcatgtcattacaaaatttaagttacacttttaatgcaaccatagaatagtcatcctaaatatttaagtaaattaattaaaaatttatatgtatatatatatattttatcaatattggcgacaatattataccatttgtgacataaattgattttttttatagtaaaatcttccaaattaattatcattatgtttttgtctctactattctgat

SEQ ID NO: 98218 - DNA, 821 bp, Cannabis sativa
atgagtaattactcgtttgaaatcaaagataggtttcttacttatcgattgctttattgggcaacgatagtgatatacgtagttcgtgggcaatgagtggtaatgatgccttatgaagcatcaaagtcggtttgtcatataagacaaataattatttatgtgatattggttatgaaatgaataattccttatactgtgtgatgcgttcataagttgtgcattgttatgatattatattttatgtgatgtttgaattttacttattttttttactgagtccttgtgactcacgggtgctctatggtgcaggtaagagtaaaggaaagctggaccagccatgagtcagaggtctctcggcaatgtacatatcagttgtcgtggtttggctctcagtggatatgatttatcttttggttgtattttgaaagtgtaacattattttttaacagttgttttgcaactagttgtgaaagtttataaaccaagggattcccgaaactcgagtattttgtaagaaaagttttagttatgcaattaagttattttattaaagttttaattaaatcacatttttttaaaactgttagtttaatattataaactaattaataaaaatacacacacggtgtccctgcgggataaggtgttacaacatggtatcagagcgaccaaggtttaaaaatcttgaaaagtggcttgatatgtacattggctgcgaagactcgttcaactcatggttcagtaagtgtcaattgttagttgattactagattatttgttaattgcttgagttatttgcttactcaaaatgtatgagttat

SEQ ID NO: 98219 - DNA, 536 bp, Cannabis sativa
aaatgataatattattggtatttaaatttatttattaattcaaaaattctattcaaattaatataatagaaggtaatgatttaattctacccttttctaaagtatcaacattaccctcctcaagggtagttataatactaagggaataacattccaaggctaaagactcaaaacaaacaaggtaatgtttcacattaccattcccttgttatcattaactcattccaaacacccccataaaataaagtgagtatataatgtattttccttaaataaatgaggataagttgggaatgtcttttttttgtatcaattaatcaaaaataccatcatattatatttcattaaaatgtactaacttttatgagtgagttgtctaatatacactcaccatcacacaaacacaaaacaatattgcacaatgtggcacaaaaaacacaacaagaaaataataataaaaaaaaatcatattgcttaatgatgtaaagatatcgtacataaatcacaaaaccattaaaatcgcacaaaatcataag

SEQ ID NO: 98220 - DNA, 808 bp, Cannabis sativa
  modified_base (772)..(775): a, c, t, g, unknown or other
tgttaaggctctctctttctcgctgagcgcgtctcggctagcatgaaatccttcagccattttggtggtcttcgttctctcttctcacgcgctgtgatcttctgttgagtctccaattttgttccaacttcctcttggtttgcttcacggtctgtggataagtggcttccctccgcttcagcaacccacctacgggcttgggcttggatgggcttagggtccaatgtgatatgggccactttgctatcatcatatcactcgaaactttgttctttaccatttcgtatattgataaattttatcaatcattctcaatcagaacttgaacccaaaagaaactagatccatgcatggaaaataagcccaacacccaaatcaactgcaccttttcaacgaattgcaaattgaagccgaaaatgaagtcgcccacaatccaaatctgatattccaactatttgcaaattgaagccaaaaattttcgattggtgaatcgaagccaataataaagtcactcaatcaattcaaacatccgttggtgagctcacaatcgaggagcgaaacctattatcctttgcttacaagattatgatcggagctcgcactgcgtcgcggcgaatcgattttctggctttgtttttcattcttcagaactccggcgccgttctctctctgaactttggtgcccattcgtttcagcccacatttcgtccaccttgaactccgacgccgctctatctttctctggcgtggccaaatgtaaagcccgcttagnnnntttggaaattagcagttgtttatgattaattat

SEQ ID NO: 98221 - DNA, 544 bp, Cannabis sativa
tttttttattttttcaaatttaacttagtacccttatttatcgcatgatcttttaatatattaccaaattaaaaatagaatatttatcattttaatatcttttcctcctaaaaatactcttacttttcaaaaaaaaaaacaaattctctctaactctctcaccctaggagtgtcaatgggtcgggtcggatctgatccgactatgatccgatctgatccagatcatgtaaggatctgccccgccccgccccactagatcacatactcggatcacatcagatccgacctgacttattcggatcggatcagatccgacccgacttattcagatcggatctgacccgacccgactattttttttttaagaattttaatattaacttataattttaaatcaatgggtctggttcccgggtccgggtctgggttcgggtccgggtccgagtcagggtccgggtcccgggtcccgggtccgggttccgagttctgggtccgagtccggggttctaggtctgggtccgggttcgggtttcgggtccgggtt

SEQ ID NO: 98222 - DNA, 1923 bp, Cannabis sativa
acggattccaatccgtgttttgcatatatgggcacaaaatcggctgcctatatatatatgtatatatatgtgtatatataaatgtatatattacatatatctaatatatagacatagtattatacttataattttatttagttaatatttttttttttttttgctaaatagatttttggtattcctttgttctcttctttacccaaaatttttaactttgagaatctctctaaagtttcaaattcctgctgattgatgacgattttgaaggcttcatcatctgagagaaatctcaaaaataattacattgaaggttagtgtctttcttttctgtaattattatttctttagaatattcgcatgcattttggttttagggatagaaactgtatgaaactaataggacctatagagagaataaaaaatttaggaagaatacgatattttctctggaaaataattgcttgaaacttaaatacttgcaagttttcataataaactcttgaatattcacatctctatgataatgcccttttacatactcgcatttttgaacccatttaaccccgagtttgaaaatcggtagtgattgaccgtatctcagagttttaatgtttcactttttcttcagaactcttaggtcatacataaccactttgcttaagttcggggttttagttcatatgcattttggttgatatgaaaactacctcagttctcaaagtttgtagatgtttccctctaacttaattttcatgcaaccgcatgacccttaggatactgggaaacccccaaccacttcttgagacaagtgcttaggttttactgcaatttgatttgaaatcttattatttaggtgagaacactttctttcaaatcgcactcgcaccacgctgaaaagatcttctatctttcaaatgagcgacctatcgaacaactagccgtacgattccaaagagggggcatttgccgatgaatcctaaaaaagtgatagtttcatacccaccttgctgtcggataatgagattcccgtaggaaggactcagaaggctcgctatccaccggtaagatagattgcatgctacacgaattagtgcaaggaagtgaatccacagtgtctgctcaaggcagttttgcttatctacgaatttccccaaatgtggaggtcaaagaaatgggcgaggaatttgaactacccgatgcggggtcaaagatgatgtgggtgatgaagggagtaaaacaaattcagtggacaatatcctgttagacgagcctttttcctgagaagacctagtctcgcgggttaaaaaaaaccctaggcgcatcatatcactctctacttctctctctctctttcgtgccacccaaaaccaacaagggaaggagaatttcttgttgcaattaaagatttttcagtcaaaaataggagattcaatccaaggtataatgcttagcctttttccttattgttttctttagcttaagataggctaattgtatgatttttagtgatctgaggttctgtagtgtgaagctagtttaggtttgaattctggggttaggataggtttattttagttgattttgtgctgagatagctagttgtgctaaggattactcaacttgaagttagagaggttaagttggctgtctaatggtgtttttaatttctcagttatttgatgtgttttgttgattgaatttgatttatattagtgtacacaggtgttctggaaggtttcatttaattcggggttgaatggtggtgtgggggtcgattttgggtttcccttcacaaatccggttagcctattttgtgggacctgagaaaccggtaaaccggttttgccctcaggaaacctagtaaaccggctaaccgattgggaaactggttttccggtcggggtttttctaggaacccta

SEQ ID NO: 98223 - DNA, 580 bp, Cannabis sativa
ttattatgaaattattgtatctgctcgtgatggagccaagcacagtagccttactcttcaaagaaataggattaatagctcgaaaattctacctagacttcctcaagaagaacagagccacacaatacttatggttgatgcagcaatattgaataattcaagttcagtaggcttaggggctattatcttttcagaagattaaatggtgattgtgttttctagttttattgtgttttctacttatatcttttcattgtggtgttttttggttttattgtgttttctgttttacaagccaagaccttggcacttttggttggacttaattgggctctttcatgcgaaatcccaatgaaagaggtttttctgattcgttgtctctggtcacagctgtaaacaaaggaagggtcttctttaatgagctgggtgtgctacttgaggatgttatagttttattgtctaaacttcgggggcatttttgtcccatgtggctcgggatgcaaattctgctgcacatggtttggcaaaacatgttcttcggttagacgatgtgctatatcctggttcgaggaggtgtcgc

SEQ ID NO: 98224 - DNA, 514 bp, Cannabis sativa
  modified_base (469)..(479): a, c, t, g, unknown or other
ataggatattttgctaatttttaaattttattattttttatttaaattaaattataaaatctgaaaaaagatattaaattatcattttattttacacttatgtaaagaatgggtccgtacttgtctcgagagagatataattactcatcccatgtaatcgatatgcgcgatcagtattacattctctctatcctactctacttttaatcatgccaagcataattatgcaactagacccttgttccgatcgtatcttctcgtaagtttgagtcatgcaaggttagctctaagaaaagcattatattgacacgtcattttttctattgagaattgagtccacatattcactacttagtacttatatttcaagataaaagaattcgtcctataacaattcgaatagcaataatacgagtgaaacaaataactgttggaatttagtttacctggatcttagatctactcacannnnnnnnnnntaacatcctaaatatgaacttctacaacgataaac

SEQ ID NO: 98225 - DNA, 523 bp, Cannabis sativa
taatgttgctgaaaatatttccctccctaaagaaagggaagaaccaagttgatgagcacctgaaggtttctttctagtttctttatagttttgtcctaacattgtcctaaattttcttattactaatttttttaggaggtacaaatcttatttattctatatatataaaaatctctgaggattataagttttttttttatacaaaagcacttattattttttattttttaaatgcttgattattgtaccaccgagtgtgtggtgtagttggttggaatgctttgcataaggtttctcattcggttgttcttcagagttcgagtccccatggtaacacttatcttgggccttgaaaattgcgctattttagtcataagaaactttagaagattcaacaaaataaacaatataataagaaaaaaattggaacttcacattaatgtgtcaaatataatgttaataatgctttatatttctgttaatattttggatatgacatacaattgttgtgcaactaatgagt

SEQ ID NO: 98226 - DNA, 1156 bp, Cannabis sativa
  modified_base (1081)..(1086): a, c, t, g, unknown or other
ataataataatgatgatgatgaagcatggacaacttaattggtgtgttgtatgaatgaggaccattaaaaggctgtcattgcccatttcataattgttaagttgaatatttttgctaatataatttaattttaattttttttaaagatctaatattgctagctcttcgtaccttggaagattttttttttatttcatttcagtatgtatttgtatttataaaagtaataacaggaaattcaatttaaaataaaaataatggctttcattcttattattacgaggaaaattaaaaattgaaggatgtatattttgatcatttgtatttatatttagagtaatttgtggcataaatacttaagtttaactcctagttgtaaatgaatacttaagtttaattttttgcagtaatattacttaagatatatttttagagctcagtaggtatctaaccgttaaatattctcattgatatatttaaattatttttttttttgaaaaataaaattttaatgatttcgatcaattaggaattgacacgtagcaatttatttaacatttaattgtcaggtacttataaaagttaaaagttatgtattaaaaatttaatttaagtatttatttataactgctagttaaacttaaatatttatggcgcaaattagtcttatatttataaaataatacgacgaaatttaaaataaaataatggatatttatcactccgttttgattggcaccatttttagacaaatcaaaacacaaaaccacgtaaaattagaacaaatatttaaaagattgctacaacaaataaacttaaatattaagtttatcaaaaaaaaaaaaaaaaaacttaatgataagtatgtatataatataattagaacaaatattttcctagagtgtaatttctcattcaatttatttttctagcacaacataacacataaccactggctattatagttttggtaggagcataggaattctgcatgttaggtattcgttatatatgcagatacagtgcataagatgcaccctacaattttttttaggaaaaatagcggcataagtacccaaannnnnntatttatatgacttaagtatccaatctttttttttagtggcaaaagtgcacaatgttcacttctgttagt

SEQ ID NO: 98227 - DNA, 1253 bp, Cannabis sativa
aatttttttaatatattaaatatataaattttatatttacaacataaataaaaagtttttaaacaaccgcgcgaggcgcggtatcgttacctagtatatgtataattgccaaacagaatatacaaatatatattaattttcaataaaatcgatgattaattaagaaacccaggtgtttgtgacaacattcttgtcgtaccatacagcttggtttctaaaaacgctttttataataaaaaccaaacaaaactacatatattatatatgaacattgttattgaatactaataaaatttaagataatttagaagtagaattttataattaattaataatattccttaaatatttttatttaagtttatgagatttagtacttaattaggtagagcaataaaaaaaaaacattaaaaaaaaaaaaaaaaactaaacactatactgactttgtgccttttatcattttttattatatatataatacaatacaggtcaacatcaatgaatagagtttgcattcaaatttctgttttgtatagtaaaagaaacaatggcaatacagtaaagtgatccccactaattaattcccaacttaacacaattttccaggcaatacgtcctcaatatgtgtcttattatgttattaaattgcatatgcatgttttttctattctttttcctccaccaataaacatgatcccatatctttatgtttacctaaataagaaattaatagacacatttgttttacattatcccatatattttgtttaatatatatagattaattctttccttaacatattaattttattattattttatgttaatttttttttttttgatcctaatatgttaggacttttgttcctcttaagctttttattgatatattacatgcttagtttaagttcttgtatgatggaaccttttttggtttaatttcaagctttgcttttattataatttttgacctaaaagtttcaaaatttttatatattttgtttctttccttaaattagtcaccttagatatattgtagaaattaagtcacaatcaaaatccctcaaattccattcgaaatcacgcattttgggtcggaaaaccaccttagatccgactaggtctaaccgggttgcgcctggcccgttttatagcaactagtagggctgaacattttgaacgggtttgacccgaacccgagcaacccgcccgaacccgaattagtgaacccgcaaaattttttttaaaaaaaa

SEQ ID NO: 98228 - DNA, 898 bp, Cannabis sativa
aacttatataaaactaatatttacgtggctcaccacgtaactctcatctagttaatttaaaaaatgtcaaagatataattaatacttaacattattatagtgtattatactattattaatataattattagatctcatataacttaatttaataattactatgaaatatcattaattattttattaaaattatctctagtcacacaagaattggttgcacgatatgtattcctattgtatttttagcacgtaaaataattttattttgtttataataaagtatactttaattatttaatatattctgtatattttttttaaaacaatctaaataatttatagtattaaaaatatgattcaaatatttattgtactcatatttttttaatacaagcgtgaaataaattattgaactaaaattttagaaatataaattattaaaattttcttcaaaattaatttacaagatattttaaataactgcaatgtacattgttaatcaaaaaaaaaatatacatatataaacacaataaaaatgcatcaatgcacctatttttacatcatatataagctcttaaatataaatatatataagagaactatgtagtcataaaaatacaaccattcaaatagtaaattacactcatgtatatataacattttcatagtataacacatttaaactttaatttgtcataatcgattattgaaaatttatcaaaaaattacaaaccatttttagatttctaacttgaaaaaataacattagatatttattatagggagtagtgatgggataacaattcttaagcagcgagatttaaggtaaggaaattaagtatttttgtatgtgttgaactgcataatttaaattatttgtgtattagaataagattag

SEQ ID NO: 98229 - DNA, 1052 bp, Cannabis sativa
  modified_base (448)..(454): a, c, t, g, unknown or other
  modified_base (1012)..(1025): a, c, t, g, unknown or other
ctcaattttccaccaaatgccaccaaaccttccagagtacctaaacaatgcatggacaatattttccaaccagtatttcacagaaaaactcaatgaatcaaattatgtcattagatatcaaagctttgaactcaaagtttaaacttgcacaaaacctaatccaaacaccaaaaccagctgctaggaactaatttcaactcaattgaacctaaaaaatcaaaccctaaacaaacctaaccctaacagcccccatttcacaaaatcacataatcaaaccaactaaaaatttgagaaaaacataattagagagcaactagggtttaccttgattgattcctcctccaaccctggctaaaaacacaaaatccagcaatgaatccccttatccttgggtagtcattacaattattcccccgttaaaattaaaagtgcatttcaaataatctcnnnnnnntgatatccagatcaagtgtaatatgtagtattctctctgtaacaggatctgacaaggtgtattcaatacaaactttctctactattacatatccttagtcacaaaatccttgatattgttaaattcctctctatatgtctactcctctagggataatagattgtttactttttggcaactacatttgtgttagtcaggaagtaacaccagttgtgaataaattattggtacagtgccaaaaactatatagaactttccataggctgaataagtatctttcctgcaactttaacatatagtctcactggtagagttggagatttcagatcattttttacatttctccaaaatcactgctccacccccagagtaatcaccatctcattggtagactttctagcactaacgcaagtctataaacttaatttggtgtaatctaagagtattaaataccacccttatcgactaacacatagctcctcttcttgatcttgagatttacttgattatcttctaatgtattttcctagattatttgatacctactcattactcccnnnnnnnnnnnnnngtctggtctaatgcatagcaaagcata

SEQ ID NO: 98230 - DNA, 827 bp, Cannabis sativa
  modified_base (26)..(52): a, c, t, g, unknown or other
aagttcttatttaggatgttaataannnnnnnnnnnnnnnnnnnnnnnnnnntggtaaaataattcccaacactgcattcctccaggcagtttagtgacggaagatcagccgattttttgtctatgtatgtgttgatgaatcttgcaatgaacaaattagcattgttattaagatttctttcccaccctccatcttccaaaccaacctgttggatgtaatttcgtctccgttggatcacagtggtagccatgaagaatttagtgcagctatctccctattacaaccacttgacttgtgatttttgtctccaaaatatctcttcccttgcgagggcttcgttcaaattatctctagcttttgttaggtcctccccatttacattgtcccgaccttcaagttgttggagtgatgatttcgcctcatttacttggtgtccgatttgtttaaaatggactttgttccacttcactaaaatgttcctttgtctttttgagcttccggtaaaagttaatcattggatgttgatgaagcttttccttccaagcattcttgacaacccagtggcatttaggatctcttccccacattagttcatacttgaattgtgatttactacaattgactccccccttcgtgtcgagaagaatcggtctatggtctgaagtagctgcactgagtacatgagtaatagcactcgggtacaacaatctccaatctatcgacgccaaagctctatcaagacgagctcttttcaatccggtgcatttgacaacccagtggcatttaggatctctatggcggaatgttctttttcccattgtccatt

SEQ ID NO: 98231 - DNA, 960 bp, Cannabis sativa
agttacagcagtaggtgtaggaaaattgaactctttgagcagtgactcaagctaagaaatctctgctgcaacatgtgctaatgctcgatattttgactccgtgctagaccttgcaacaacgacttgctttttggaggaccatgataccagagtgttgccaaagtatacacaataacctgtgattgaccttctatcatagggcagcaagcccaatcagcatcggagaaaccagtgatgtggagtggttcatcacagctgatgtgaagtcctttgttcatagtacccttcaaatatctcataattctcttagcaccattccagcgtgttgtcgtgggagccttcaggaactggctaagtttgttgactgcgtatgaaatgtcaagtcttgtgtggcacaagtattgcaagcccccaatcaaacttctgtaggctgtcgggttggacagtggttcaccatcagtcaaagacatgggttttcctgtagtggcaggagttggacaaggtttcaagtttgtgaacttcattctcttcaataaatcctctacgtattttgtctgagtcaagtacaacccagtttcatctctgaaaatttctattcccaaaaagtagtgaagaggactaaggtccttgagagtgaacttcttgttcaattctgcaataaagtttttcattttgctgttgttatttccagtgaccactatgtcatctacatagatgagaacaaatataatgtcagtgccgcatttgtagaaaaacagagatgtgtcacacttggagttggtgaatttccagctgtgaagtgtagcttttagcttgtcaaaccaagctcttgaagcttgctttaaaccatacaaggacttgttgagtttacacacatagtgttctttccatttttcttcaaacccttcgggttgtagcatgtagacatcttcttcaagagtgccattcaagaaggcattg

SEQ ID NO: 98232 - DNA, 612 bp, Cannabis sativa
ttttaattttttttaacaaaaatacggaatttctgttgctttctaaaaaaaacaaagaataaatgacaaacaaagtagtaaaaaaaacaaaccaagatccatcaaaatgtaaaaagaatccaattttaagtgtaatatgcaactttatcttctttaaaaggaaaaagaacaaaaaaaaatgctcaaaatgctcaaatcatgctcattaaatgatatattttagagaaacatttaaagaatgttatgttgcttttccagaggtagagaaatactatgcctataaaatagaattttagaaatatttttcaaagaaatgttaagggtatcttaagagcattttcaatggaaggtaatatttatagttatcaaaatacatatatcattttaaaatatatttttattttctctttaatccacataaaatttgtcacatttttttaaaaaatactctaatagttgataacactaaaaattatccatcatggtcctaaatcacattaaattaatgagtttttaagtaaaaaataacattttctaataaaaaaatagtatgtggtcattgtttatattgagctaacactttacctgaaattgaaattggtcttgaaaatt

SEQ ID NO: 98233 - DNA, 752 bp, Cannabis sativa
aacattccagtttttttgatagaacttgttattaaaaccatctatacctggagctttatcgggacccatttggaaaagagctttttccacctcagagggggaaaaagcttcttcaagcagatgacaatgtgacggctcaatccgaggaaaagggtcagaaagcccagcctcaatatccaaatcctggggatgttgagaagtaaacaggtttgagtaatacgattggataagagagaggatggactcagaatcttgaagaacagttccatcctcagaagtgagggagtcaatcctgttacttcgcttcctgttagaagcaaacttatgaaaaaaaacgagtgttcttatcacccaggttgagccattgtattcgagatcgttgcctccaataagtttcctcttttaacaagagagaatcaaggttcgcttggagagccttttgttgagaataggagtctgaagaagtgtcttcagccttcctagcctgttcaagggcttgttaagcttgcttaattcttttctgaaaaccaaaaaaggctttgtgtttccaatttgaaagaaaggtagaacaagtggattgctttagcaaaagatttgtggaagggtcatcactaaggatgtttgaagaccaagcttctaaaaggacatctttccaatgtggctcagaaagccaaatatttttgaaaagaaaccgtttgtcctttttcctggcaaattggaaatgagggtttggattgatggagagttggatg

SEQ ID NO: 98234 - DNA, 718 bp, Cannabis sativa
aaataaatacaccaaatccactcatatcgaatacttaagagtagatttcaaacagacccagtcttttggtaggaaccaaacaacgaaaacgattacaagaagaaagacccaggctttctaacaaaagagatcataatacactcatatatacccaaatatttttaaaataaaatcatacctgtgtagcagaaaatttttctctttaaaaaccaatttgttatctcgatttttcattctcatatttgaaattgaagtgaaaggaagaggatatcttaagagagagggagattgaaaccttacctcagagagtcaaagtgagagagaagaagaaattggaaaggaagacgagagaggaacccatctaaggcatctttagcagaaaacctgtagaaagcatctaaggcatctttagcagaattcaaaacattttttggctccgattcaaaacattaaaacgcacaacataccttatttagatgagaggaagggaaccgacgaagtgggcaagccggaggacccaattggagcggccacagtagagaagtttaggggtttttctgtgaaagaactgtgtaatgtttaactttagtagtgaaaacccaggaattgttaagaaggaacagccgccccaggatttcgccacatatagaaaggggacggagaagaagaagctaagactaaacacaaaaaattgagatgcaaaccctaaaatcagacg

SEQ ID NO: 98235 - DNA, 729 bp, Cannabis sativa
  modified_base (673)..(673): a, c, t, g, unknown or other
aatatgttatttttgtaattttttctcggcgacaacgaaaaatgcgatggatggctagtttgataacatgggtaagtttagaaccttatttgttagtgggaaatatttgagagaatataaaatacaaggattagaccgggttatggaatttgaccattttacccctagttttggatatccctaagttgtaggcttaagggtatttttgtaatttgctaagtgggtgatttggtggctgcctaggctgtggacacctgtccattttactcagctagtgattaattggggttatctcttttcatttgaagaaattagagaaataagggaaaaagtcaaaaattcaaagaaacaacctctttctctcttcctctctttcggctgaagcaaaccagggggatttgttcctgaacttggtatattccatcaaggttggaagaggattcaagcaaaggtaggaccctagaacccttgagcatgtttttgaagctttttctttaggttgaatgtgtgattttgtgaattgggggctgtaagggttgggtgttgatgcaattccaattttaggcttaatttgagttggttttaggtcctagcagctggtgttgatgtttgatttaggttctatgcaagtttgagcatagaaaccttaactttgatctctaatggcatgttnttgattcagtgagtttttctttggtttattgcctggaatatgttgtgtatacccta

SEQ ID NO: 98236 - DNA, 526 bp, Cannabis sativa
gagttttgtttcatgaattttatgtataaatttatttcatttcatttcattcaatcatcaccagctaaacaattaattctacctttcctatttcatcactcctattgtggttacaagttactggttactctttaccttggtgactggttgttgtgttggtggtcatcacaagttaaaaatcagttttgttagttattccaagtcagctttggagctggtgtattatattatacaatataaagacttcattcattttagtgaacgagtttttggtgagatacgaaaagggtaaagcaatgttgttttgagagaactttcttatgtaattgagagaaattggagaagactgcatttgagtgttcatatatatttgttaatattggaaattactaaaaagtactagtttagtattttttttttttatgttatattataattagtgtaattaaatatactcatataactaataaaataatatcgataactgttatattttgatataatatttttgattgattaaataaat

SEQ ID NO: 98237 - DNA, 587 bp, Cannabis sativa
catacctcgtctacaccttaccccattgaacaagtcttatcctatgctaaactaagtcctcaatttcgagcagttgttctagcagcctactctcacattgaaccccgttcttactcagaagcttctcaattcacacattggctcaaggctatggatagtgaaaccgaagcacttgagaaaaataatacttggactgtagccaaattgcctcctggctacaaagccattggatgcaaatgggtctacaaagtcaaatacaataaaaaaggtgaagttattcgattcaaagctcgcttggtagccaaaggattcaatcaaaaacaaggcatcgattatgaccaaacatatgcccctgtggcaaaatttaacaccctcaagatcttccttgcactagctgccatgtacaattgggatgttcaccaaatcgacatcaacaattcttttttacatggtgatctccatgaagaggtctacatgaagatccctctgagttataaggccccaccaaactctatttgcaaactcaacaagagtatctatggtcttaaacaagcatctagacaatggtacgaaaaactaagtaccac

SEQ ID NO: 98238 - DNA, 612 bp, Cannabis sativa
agagagccttgatctctgcacaggcctcattcccctcatcaccagaggatcccatttcctaaagccgagatctatttcccagcctcagggaatttctcaacactagagagaggctgacgtaaagatctctcggcacaggttagggtcttgagttggatggtttctctgatagaaaccacacaaacttccttcccagatccacctaaaaccatgccgatcttcctctagaattctttaccagcctgaggaggatctttaagatcgctcacaagatctataccccctgtgatcacttgtgaggatcggccatggcaagtcatggggttcccttggtttggattggttggaagctcctcagccctggaatccatcgtttccggctctgtttgaggctctaaatctgtaggaacgaatggaaatcggttggtgcatgtgggtataataagtttggaaagataaacttctgaactcagaagaacatttttgcaggaaaaaagtaatccattctaaaagtagatttcactaaaaagccagaagggttgtgaaaaatgacaagcttgagccgcccttttatacacgaagttcagtgacaagaaagccaaagattgagaa

SEQ ID NO: 98239 - DNA, 502 bp, Cannabis sativa
  modified_base (431)..(436): a, c, t, g, unknown or other
ttgaattaccataaaaaatattaaaattatcttcatattttttttaaaaaaaataaaacaaatgaaactacagtgaccgccagagttatcaccggtgtcaaaaaaggagccggaaaagtcgtcggagtagctgtcggcgtcagaaaagtcaccggagttggtgccgatgccggaaaagtcatcgaattcggcattttcgccaaaaaaatcactggaaaattcaccaagaaactagtttcataataaagaaactggtttcttggtaattttttcggcaacaatgccaattctgacgactttttcgaagtttgctgttggaactggaaaagtagccagagtagctgccgctgtcagaaaattcgtcggagttgttgccggtgccgaaaaaatcatcagaaaaatcactagaaaattaccaagaaactggtttnnnnnncaagaaattggtttcttggtaattttttcggcgtctatgccaattccgacaacttttctgaagttt

SEQ ID NO: 98240 - DNA, 1181 bp, Cannabis sativa
cttagtggcaacctttttgttcttcttggccaccacttccttcctccttcccccctttaggcatgaagtgccacccctaatttcattttcaaaagtaattggaatatcaatccactcacccccttcttttgattgtccttgcttcgattccgattgcactccagagccttctatatgaactctcttccccgactgctgtaccactctgtctcccaaattcagaaaatcccagctgtccgcccttctcttaattcccgatcttccctcaccctcaatttcactcattatctggctgtcttcttttctaaccatcagtcccacaccctcaacagacagaggagagttagaaacatgtaccttcttcctcggagaattttgattattgatcctgggtaatctctcgtccccctgatcttcgcctcgagcctactctgaaaccgagatcgaattacccaaagcttgatccctattactcttccccgaaccaacacaatcttgtgattttttgaaggatctactacgggtcaaatcgtctccataagcaccctcttgggtcttcctttccctaaaccccaaaggtccctcctcaattttcaaccacgcagcataggccgctgaactcttcccctcaccatttgtgatcttcacaggattcatcgcacacgtccggtagtcatgtcccacacgcccgcagttgaagtacataaaaggcaaccgttcgtacttgaatggtagccaaacacggcccccagaacagggaaaaagaaaccctggacaaatgggttgatcaatcaaaatccaaaccttgaaccagaaaaaaacaattcaaagcaatcttagtcacgtcttcttgctgaacttcaatgatctaccccgccattccagctaaacgcatcatattattcctggttattgatttcatagggaggcttaacactctccgaaagaggaaagcgggtcaattcatcttcccactttgtcggaatcttggaatatctctgaagaagcaagactccattattcagcagccaaggtgacttgttcactattcttttcaaatcattttcgttcttgaaagagaaaaccataaatgtggcctcagttgtgactcgtttgattttcattccccaatctacttccgctgatccccaaactcgtcccaggatagttcgaatgagaga

SEQ ID NO: 98241 - DNA, 544 bp, Cannabis sativa
tttaaggctagatattatccacagtgtccgttcctttaagctacacttggtgacaagttgagttttgtgtggagaagtatctttgagtcacaacaacttcttcgagctagtattcgtagatccattggtgggggtaatgaagctttcattttgaatgagccttggttgcctgataatgagcacccgtatgtgatctctaatcatcctggattaattaacaaggttgtctccagtttgtttcaatttaataatcgtgcttgggatgctgaaatactacaagatctgtttgacactagagaccgtgagcttatttttaacatccaacagagttctactactacacatgaagggggtattggaaaaaagaaacctcaggtgtctattctgtgaggagtgcataccgttttcttcaagagttaaaaagatcatggtctttagacaataatgcaggcttttggtgcaaactgcgaaatttgaaaattctcccaaaagctcaaaactttgtgtggcgtgccatttttaattgccttcctacacgaactca

SEQ ID NO: 98242 - DNA, 743 bp, Cannabis sativa
ccatctccgttggaccctctacggctggaatcaaatgggtcggtcaattttattttaaacccagaagatagattgaagccccttttattgaacagtaggaaaagggcgaattctccatgtgatctaataagatgttctattatagagaaggatctatcaagaaaggaaaatactagacaaattatcaatgaacttctgaactgccatcccagaaccgtcaaggccgaaaatcgcaatgaattcagatcagcagtcattttttcttggaaagattttgagttacaagctaaaaaagctaagaattcggtcttacaaatgtctgaagtggaagagatcgatgctccaagggtgtctaagaagatgatgaaggtatattatagaaagaaaaaaccattgagaatggatactggagatagtgacagtgagggaattgaaaaccagtttttccttgaggaggaggtcggcaatgacttaattgatgaagaatcccaagttatgagctcggatagcgaaaattcggaagaagaaataactgatgcggaagaagacaaggttgaaacagaggaagacattatttgtgacttaaatggactttggaaagaagaatttcaagtgcaccctcagatctgtgaaccaagccacgactatagagaagcaaagattgatcaaaaagaatggaattctctgactgtgtctcttgctgagatgggaataaagataattccaaatttggattcagaaat

SEQ ID NO: 98243 - DNA, 1357 bp, Cannabis sativa
taagaaacttctagcggctgagactaaagttgccgagctgaccaaggaactgcaggagacgccatcaaccgagcagcttgaggctgatattgcttctttatcacgggacattaccagtcttcaagacgaaagagagggtctctggactcttcttcgcaggttggaggatgataagaaggctatggaggaggaactcaaggctaaggttaagaaccagaagtctgaggtggcgaggctcggggagaaggtgaatgccttagagacagctggtctcgagatattttatgacttttagaaggccaatcccaaggcaaactttgattatctgggcgcttccaaagacatgtttcgcgactactgtgctgctcaggcggcctacggggaacccgaggcaaccacttccacctttcctaccgatcagaatgttgaggctccttccgcccagaatgataatccttcggctccttcaaatccaactgactcgtacaaagaacttgggactcctgctgtttaagtactttccttttactatctttttttatgtctgttcggccaataggcctccttttaagacaaggtgaccgaccaagcggtctttaaacttggaatattatttttcattttttgaacaactggtcgaccgggcaacctttaatccgggttttgaatgcttttgttatttgttacgaaaattatgaacagtacgcaagtgcacgtaatcaagtagtaaaatcacacaggtgaggtcgaaccacagggaattggattgaataccgctagactagatttatgattctatttggcaaacaaatagttttcaagattataaacagaatgaaaatttaagaaacttaagtagacaattaaagattaatcaagatgagaaaatagggaagagaatcctgttgttttgtttacccaattattaatgcctaattgctatccttttcttgatgtgaatgacatattatacaatttaacctaactcttttcagattttttaggttctaaatcacatgttctctaattaatctcttaatcagaataacatgtaatcaaccttaagcaataatctaagtgtcacataggttatgcaaatactctcgtttcacataaaacctagattatccaattttggcattctcaattctcacttttcaaattttgaattgagatcatagaacatgtagaaggtgatcaagattacacatgaaattaaacacaaatatagacaatttcacaaatcaagattcaaggaatggcaattgacattaactaggcaaaactttaaacaacattcatcatcctccctaattgggaatttagttcatagaaataaaataaacatccatgatta

SEQ ID NO: 98244 - DNA, 586 bp, Cannabis sativa
tgtaaccgtaaaacatgtttccaacgcggtctggtagggcactttaagagagattgcccacaactgcagaaggtggaaccagagcaagaggcaaaacccactccatatttgggtatttaccactaaccaaaccaatgctgaagatagtttttcaatagtgtcaaattagtttctagtcaactattctatttactctatgttaattgattttggagctacacattaatgtatagtagtcagggtaattgataaattgggtaggccttgagatagatatgaaataggatttggaaccctgttgccttgtagaggattagttatcttcaaaaggtggtttaggtctatgccgattagagttaaggatagaaagttgaacactgatctcgtattttgggtatagcagatttgagatattactcataatagaattaccgtctaagtaagtcgctaaaattgattgcaagcggaaatggtaacttttcaacctgaaggaaaaggatcgttcgtattgtggtatcgggtcgaggttatcaaacttcagttatcatgatgttaaaagcttgagatctatcgctggatagatgca

SEQ ID NO: 98245 - DNA, 670 bp, Cannabis sativa
tctctctcaagcacacccaaaaaactttctctctctatgtatatcttgcttttctctctctcaaaacccatgtaaaaacaataaatgaaaagagtgaactttgtaagtttatgaaacagtgaagagtcggaagaagagttttatgtaaagttcttgattgatggtctttatctttaacacaaatctcaaaaaaaattctattgacactaacccacaagaagagatagagagaaacaaaatacatatataaagtcttgagagagaggatcatgtgtgtaggttgtgctcaatatcaaatttaagtaaaaaaaaaaactatcaatcaactaaacacatataaagagaacacatataaatttttaaagatgggatacatgactgagttggaatttaagtaaaaaaataaataaaaaatctgacatgaaagtgacataaatgtcatcaatcaacttttgcatactttttttttttattatataaacacatattaattattaagttaaattaaatagacttgctcaaaattaaaaaaaaaaatagtatacacagtaaaaatgtaataattacagtgtaacaataaaaaagaaataaaatggaaaaaatcagtagatggtgtaaattttcctaaaaacaaaggtaaatattattttggaccatatgttttgcaaaa

SEQ ID NO: 98246 - DNA, 1129 bp, Cannabis sativa
ttcccttggtcgaacggaagctccattggtcttgaagtcaccttttagctagccagcttatgcccagatcctggccggccatacaagctcaatttggctggcctataggcttctcttggccagccagacatgttggtacaacttctcgatggctcgcttcactctatttggttgttgcttgataattttgccataccttgtatggagaccctgtcttgccattggcaaggctgtatttcacatgtactctgtcttgcctcacgtggacatgccaagtcaggttgacaaaatttgggataaccccaagtccctgttcgaacatctggtcatatagagactttctagcttcgtcttgttttatagtaatctctctcaagcagcctcgtctagacaagtgttgactttttgcatggcatgcttttagatatttaatgttctctctctctctctctctctctctctcttatatacgtttcatcttctcttctttgatacctcttctttgtacctgccattagtaagtttcatgctttttaagcttttggaaactttttgattttcatgttagtttgtaatctctttggtatattgatcctcatgacaattttggaatgattaatgtgtgactttttgatggaaaagattagattttggcctttgttgtgattcttgactctttgagtcataaagaatactaagcacatattcgagtttcgaaataaaaaacacattggaattcaaaccttaccttggatggcctgggaggtcttgcttgagacctggtcagccctagggcttaatcatgggagttggccagctctagggttttaccctataaagctagccagttcatgcctgggtttggtgaccttgactaattcttgactaagtcatgggactttggctgtcccttttatggcttgagaaccttggccggtatgggccttggttttaagtgggtagccttctgtcctcttttgacttcagcaagaatctggctctgtaggcatatcaactttagtctcatacgtggttcccttggaaactttgtatgaaacttaatggtgagtctattataattgaatgttcaacttaagactcaacatgcactactacaaattaggctttt

SEQ ID NO: 98247 - DNA, 622 bp, Cannabis sativa
aagccatgaaaactccgtcgtcaaaatgcttcttgtagtgttcgcatgtaattggggccaggagggcatctcttttcaccttagccacctccactactctttgaattcacgaagccccttcacgtcaacaattaggttggctatcgtttgcaaattagcttggtgcagctcttctagagactttagcttggcggaaaattcctgcacggactccttagcatctcggagctctcgcctcgccgtgcccacagccgcgtccctggctttcaacgcatcatccttagccttcagctcctcggcctttgcctttagagcctcttgatgactctgttccaaaagagcctccctctgctgggcctcctcccagatagcttttctcagtgccgccaagtcccgaagactcttcatggcctcatccatgcccccaaactcggacatgatgtacccatggtcaatcaaagtctttcagaggcgactagtctctgcagcaatctggaaaaacaagaaaaatgtataagcacgtgaggacaagcgccaaaagactaagccctaaaacactactagatagaaacttaccgcggtcatggctgcacttatatcctggatctggtagaccgagttt

SEQ ID NO: 98248 - DNA, 835 bp, Cannabis sativa
cacataacttctacagcataattaatatatataacttaattaataaatattaataattaactaaataattccatggctgatcagctataaaaagatgatgaaaaccaccagagagagagaaagagaatatataagtcttgatattgataggatgaaaggtaatattaatattattattagtgtgattaagaagaataaacatgttacaataataaggtatttggtgttaatgatggtattattattattattatttgtgagtaatagtactactactgaatcatcatcatcatcatctcaaatgttcatggtttctgattatggcaatggaaggaagctattgtaggcaaaagcagctacgtactacttcaaacaatatattcatctattcatgtattttatatataataaatatatatatatgtataattatggaattatttttatgtaacaaataaataaatatattcatttgagacatattttgagtatttaatatagtaacttctaatatatttttcataatattcttattttttgggtagatctataaaaactaattattgattataatacaaatgataccaaacaacttaagtctgtaattttgtaaatgaaaaagtacaaaccctaaaaataaaagatttctttgtgttaaaatatatttttttttaatttttactctattaagtaaaatattctaaatttaattgactacaagctaattaccaagcttttcatgccgttgacacaatgttcaacataagcttggattgggtaaataaataaataatattttatattaatatataaaatattaagttatatatatata

SEQ ID NO: 98249 - DNA, 743 bp, Cannabis sativa
tttttttttttttttacagtaattgttaattttttttagtaattcttttacttttaataagtttataatatacaaataacattataaaaaaaaatctcattataatattaagtcaatatcaatattctacctaaatttgttctcaaatatcaacatttcatcaaaaaaaaaaatatattaagtatatataaaataattgcacggattggtttgttttgaacctttactgagaattttaaacgtgattgaactatagaattataaacagtccggattgaccaaactatttacactagattcatttgatctgctctaaaatagtttggtccggattagttgggatttggaattagggattgcgaattatatgaacacccctaactagagcatcttgtttatatgttgatcataattttttagagtataatttcctttttgatgttgttaatattgttgaggtcaaattggtcttgttgaaatgaaatttacagttaaaaaaaatatatttagataatttaagttttcttaaaaaataaaaaacaaatgctttcattaatacgtatgtaatcacttatgactcgtttggtacgccgtataaggatcgtattgtattaaataataaataacactatattttgataaagcagtgtattgtattaattattacaaccaaaaattttaatacaatgtatgttatattatttaatacataagaaatggtctgtattagcttgtattataat

SEQ ID NO: 98250 - DNA, 773 bp, Cannabis sativa
acaattaccgcttattgtatcatttaaattgttgatggtatatttgttaattacttaagaattaagtatatcattaaaaattcccctaatagtaattagtgaaagggggatagctccacatagtgttctctctaacatcattttgagtttctacttgtcctcatattgaagattcttggatgcactaacatggctcacatggatggatcatcaatgggaagtatgtatatttatctttgttttgtgatgctctaaataaaatatagatcttggttgatgattatgagtaatgaagattagcatttaatgtgttttcaattagctcataatcatgaaattttaacaatacaaacgatatattttagaccaatatgaatataccataaacttaaactaatatactattaaatgactttttttccacgatatacaatagcatataaaaactatattctgcaatcataagcataaatactatagtgaaaattaatataccaccagtatagtacaaaaaagtatatataccaaaaacttaatttaatatttcacgagtttttttctttttctttccttcatgatataccaatgaatatagaaacaatatattccctagtaaaatgtaactatacctcaaatttaaattaatattccgtttttttcctctttcgttcactacataccatagtacattaaaataagggctatttacaaaaatatgggaaaataaagataagttttgatatatatggcataaaaacttaattacactaaat

SEQ ID NO: 98251 - DNA, 504 bp, Cannabis sativa
agattattagttgggcaccaatgattatttctgatgtagagtttcacaattcattaaagaaagatttgttgactccaactcaatacttaagttcaaacaccaaaagtaaacaaaaatgaaactatataaacatgaattgtagccaaaaaatttaattatgtctgtgaatcataaccaaatacaaatttttacatgtagaaaagtattttaacaccaaagtatcaggaaaataacatcaaaacaacaataaaaaataatatacagataacaacaaattaatgagagtacaacatataaagaccgtgttttttgtaaataaaatcataaaaattataaaaatatttaaaattttgtacaaccatatttttgtaatttttttttattatttctatgtatttttgaaataacccctttagaaaaataccaacccatttaaattggttcagaattgggctgtactatttaatgggctttatgttgaactactacagattatgaaccaag

SEQ ID NO: 98252 - DNA, 674 bp, Cannabis sativa
agggcggacaaatacttaatgccctttggagtaaattgggtcggacagaggcggaagaagtctgccacattcctaaagtacgggtgtaaagacaacaatgcccttgctgggcatgagtacccgaccaggcgcacattcccctttcagggtttgtggcccgattattatgggcgggaatgtaacagtccaatttgcctaggtagtcatcctggtcaagatcccgcaaatgtgcctcagtaaccttggatggagggctcacccacctggcaccaaaagtaccttcccttctatgaggaactgcagcagtaagttcctcacttgtgtagtatacgccgtcaaccaggacgtcgccgtcggcatcaactggctccccaacctcattgtatcctccataatttggaggtgaaacctcctcctcttcctccgacttagagggactgctaggacagacatcgtcctgctcctcaatctcgtggaccttagtgtccccttcttgatcgtcctcctcctggacggttggatcttattcgccgatgggtaaggtggcatgccgggccacttgagggtctgatgggttgaccctacgcattgtctttttggtacgagccatcatcctatggctaaaccaaagactgaaggaagaatgcctgtcactcgaagaagttggactagaa

SEQ ID NO: 98253 - DNA, 1978 bp, Cannabis sativa
tcattaggcaccatcaattatttaaaaaaaaaatcataaagttagtgaaatgaaaaatttgttctaattttttcaagtgacgaaagtaaatattctttttgattgataggaacaaaattgatgctctaaggtaatttattatatatctgttatctacaatattatgtgcttgcttatcattaattaataaacatcttctctccctttcaaattccataaaaatctattgtacgtgagaggtaggtgtaagttggggagattttgaatttttattagctattctatcattaatgaatgaaaaggtttggcttgaaaaatatatactagtgctataaagaaaaatagaaatgttaaaaaagcactagtgatatgacatattactataagtaaaatttaatattgcacattttaatttaatgaataatataataaaaataaagaaattacattgtatactcattttactttatttgttttaatttttatatttatttttatattctttaatatataccacttttatagataatgtttgatgtatattatgtgctaaatttaaataaaaaatgagagtatattagacaaattattcacacaaatgttcatatatatatatttctcaacttatctagaaagaaagtataaatcataaatgcccaataacaataacaatgttatggtataaattgtgaaatattcttaacttttgatatttgcaaaagagcccttgaatgagttagaaggaagcaagggaggccaatcgtattagaactacacacccacagaaattggaatcctaataattaatctcaaacatgaagacacgtacctttgtcatttaccatacaaaaattgaaaaaagtgttttctctttgaattctcaacatgagtgacgtgtcatctaattccccacccattttcacacccccacattctaaaatctatttatttatttatttatatggggctgcctatatatatacgaaaataaaataaaataaatacaattaagaatagaaaaataaaggaaaaaccatcaaatattttctctctctttgcatgaaagaaaaactgaagcaccattcatcaaaatggctcaccatcaccaccttcagtctgatcatgagctaatcaacggcgaagatcgaagcttcgaacggagtcaaagtccaaagaaagaggaaaaaagcgtagtagcggaggagcaaaggtcttcttcttcttcttcttcatcttcatcttcgtcttcttcgtcgtcgagtaataatttgaaagagaagaagaaaacaggtttagtatgttgtgaagagaggggaaaacaagaggaggagaaggaggtgagtaggttgagatcagaattatcttcgtcggaggagaaggatgataatggaagagagaggcttaagaggcatcgaattgagatggggggtagggtttggatccctgatatttgggggcaagaggatctgttgaaggattggattgattgtaatgcttttgatgcttgtttgggccctaatgggcttatgtctgctagggcttctttggttgaagaaggaagaagaaccacttctcaacgactcagaatagacaacaggtgtagttagttaattaattaattattattagaacaaacaaaactatttttcttttttcttttttaaaatattggtaattttctagatttatgataatttattgttattatttctcttgttcttcttcttgttgtaatacaatgatatttcatttcattcaaaaaaaaaaatggtcttgttgttgttgttgttgttgttgtgatatctagatattgttatgtttagtggagtagttgtggtcgttattaataccagtactctgaagctagattcttcttgttttttaattagcattattttgagtatgtcttgtgattttttgagtttttattgagcataagtttcattctctgaatatatgagtaatccaaacagttttt

SEQ ID NO: 98254 - DNA, 526 bp, Cannabis sativa
taccatatttttttttctaaataaagatctaaatatatataaatataattttttattactcactaaatttcaaaactagccctgattcaatataaagtatcaaatgcaagttagcactcatttcaaaggagagacttagtatgaattcatttatcaaggaataggaatgaatttctaattttcacacaatatctcctcgagtcgacaaaccattttgagttctagaacctattaatgagaatgcctacaagatcttcactaccttcaatgtaactgatctgaagaacattaagaaagtgcaaatgatgaacctaaacatttccaaccttgggagaattatgcaggggcatgattagttagtataatagtttgggtaaattttgtgaaataaaaaattagtcaaaatgtaaatgagtaatatatgaaaattaaacaagaacaattaagattattgattttagtgtagttaacaatatgtgaaaaaaaaaagaaaaaaaaaagatcagtcttgtcttttgacatgttt

SEQ ID NO: 98255 - DNA, 507 bp, Cannabis sativa
ttcatgacttagtagtacgaattttagtagtacgaattcattatggtacgaattcattatgactagtgttcattatgactagtggcaaaaaatattccgagatgggtccgggccacatttcaaaaacgggttccactatcaaaaatattagatttacactattttgattaaaatgattgttagttcatgaaaactactttatctctcaacatgtcccatagaatagtgatgcacaacagtcttggcttgatccttgtgagatttcatgattttttgagatgtgtagggtgagattttaatagaacactaacgagtgtaagagtaacgaaaaaacttgttaaaatttaccctaaaagaagaatattttaaatttttaaattaaggggccattttaacaaaatttaacgctaatcaaattttcattttcacgtcttagtagtaagaattcattgtgactagtggagaaaaatatttcgagatggggcctggccatatttcacaaagggg

SEQ ID NO: 98256 - DNA, 628 bp, Cannabis sativa
taaattttgtatcataacaaatattgtaccaataatttagcatgtgttaaatttatatcattttttaacacactattaaaccataaattttactaaatagattatatattataactttacatcacttttatttgtatctttattgtccaaattataagtgcatatcattattaattatagataaatatggtcttagcaagttgttgtttgttttgcattaattcgagaataactcattattattattatttgaaatggatataactcattaaattttatatgttcgaatttcaaatggcttattgtcaacggtcaacctcattctcagtaataatttattctccaactaatctaataaataagacgtacatattcaattaattttacagcctattgtcttttagaaagatccatatatttattaattgattatttcattaatgataatagatatctccactctctctcaactgttctccaccaaaatgctgccccatgacacgcaaatttgccgcctgattacgtgcgtacgtacataatatttatgtttaattattatatatattatatacatgcataactattaatttacgtccaaaccaaaatatgcgacgattttctatatgta

SEQ ID NO: 98257 - DNA, 691 bp, Cannabis sativa
  modified_base (106)..(110): a, c, t, g, unknown or other
ataaagtaattattattatcattagtaacataataaataaaaaaacagttagatatttatttgtacttaatttaaaattagtttctataaattatatatttccttnnnnntattttattttctaaaaatatttagaggtataacataaatatgcctaacacgcttataaaaatttctcccctgaccggcctttgcatcttctttcctcaacaagcatgttcgcgactcaagtgtcatcttcgttttcatcaagcttccagagtagtgatgaatcttctggtctttttccccccaaaacttttttccacccgtctccgtgtcgtggtggctccacattaatagcgattgacagccaaccgtccctccattatcagctgagatcagaatcgtcatctttgttgacgatttgggggcaggcgtgccaatccattaatgcgtctcttgcaagtttgatccccttactgaacaaatctcatgatgatccctatttgatcttgattgttgctgtcttttctacttctcatagggtttattcttaattgctatgtctacctacctagtcagtggttggatttggataatcccccgcctgatctggtattaaatttttgccttttgttcttcctgatctactcgagtacaactcgaggtatggcagtttcctctgctatcatcttaattgttgtacttc

SEQ ID NO: 98258 - DNA, 810 bp, Cannabis sativa
ggtttgggaaaaattcaaaccgcaaccgcaccgcgaagaatttcaaatcgcgttttttttttttgtgctgcgggcggtttgagcggtttgatgtacacccctactatatacatgtgtctttgtcagttattcactctcttatccactctctgtatcactctctcattcttccctttttattttactttctttgtccttcattcttcacattatcatctttttcttttattccttttgttttctgcatttttcttctttgttttttctttgtttttgagtaatggatattactcgttcgagttcattgtctccttcgcctaagaaacctaaaaaagcccattaaaccatctaaacacaaatcagttgtttagaaaaattcgaatccccctaatcaaaaatcaaaagttgttgttgatgttggtgagccatcatctaagcttcctgctactatctctggtgatgctatgaaagctaagatgaaaagaagtgatatgatgatgatttagttacggtgtgtcctcgaaatgtatttttgattttttttttttttttgttgatatgatgttttgtatatctttgtttattttttcatttaaatgtgttgtttttactttttagttatcttttatatatttgattattttttggtgtttatgatttttagtttattttttatttttctttgtaatttgatgttgtatatttcaatttttattttaaaaatatatttgtatattctctattttatttttttttccttatttgcatattttttgctatttagggttttttttattaagtttatatttt

SEQ ID NO: 98259 - DNA, 531 bp, Cannabis sativa
ttttactgaattttacacaaaaatttctatagcaactaaccgagtaatctaaatagcaacccacatagaaatcattagagaaacttaaatcataaatttaaaaaaaatgattaaaaatagtataggaggtaattctttatttttattttttttatatttttatgaaaatctacatatcaatttacatggtaactaacagaacaatttaaatctttataacaattactaaagcaaagcaaactgtaaaaatgaaaagaaaagttagaaaattgtatatgggtgatttttttttattactttgtttgctatgaaaaatatgtactacactctccaaaaggacactttttttaataataaagttttatacatatttgaagaatgatggaaaattatttataagctagttatgttggattaaaatgttgttgtattgttatttgaagtttgaacaaagtgattgttttagtaattgtgagtcatgggtactataaagtgttaaaagagtgtaattattcttgaaaagttgaaaat

SEQ ID NO: 98260 - DNA, 741 bp, Cannabis sativa
agaaggaggaaaaagaaaaaaaaaaggataaaattttggtataataactctaggtaaaatctcccccttctggtttcctaaatggtcctatttatagagcctaattagtcccataactagccaaacgtatactgtttagtgggaaagaaaatgactcctaaaatgggcaaagaacgtgagtcatttttattgttcgtgtgctgagaaaatggatgacgtcgtgtgtgtacgtggataatctgttatgagggtgaatttgactctgccaaggaattaatcatcttggattgcacggaaattggagtcccgcgattgatgcttcaacaatgagttattcacttaaatttggattgggccgattgaagcttgcatgggaagtgatacttttcttggtgggccttgacaaaagaatcacattaattgtgtacaataagttcacgccagccacatatatttctatatggattggagaatagaaatgcttggtctttgttgtagttggagttgatgtaatatgaaaatggtcttcaaatttacatcacttggaacttaacattgtgggctttgcattttaattttccttttatcactttatccaaatctgaaaaataacacaacaattaaaacaaattaaatatctgcaactaaaataaatttatcattaaaactataaaatattcaatttgtattaatcatatgtgcataattaaagacatgaaatgtataaatttgagccttaat

SEQ ID NO: 98261 - DNA, 575 bp, Cannabis sativa
ggttagttttgttctttagccaaccgcacattttgtgatattttatcaaagataatttttaatttagttgtaatgattttccaattgcttttggcattccaagaaagtatatacctaatcatcttatgctttgtgtgttgataatatttattttcccctcctttaatgggattcttagtgtgaaataacttcaataattaaagcaggaatacaagttcagctctgaattagaatgagcattttaggttattttaaggaaaatcaacaatctaacttcaatatgaaaaatgagcggacaccaatacattgcgtcaataaaaaaggaacttgaaaacaaggcaaaaaaaacaatcttagaaaagaaaaaaaagctcggaagtaaaagcaaatgacacagataagctcattgaaaaagatcagagtttaattcattacagaaaaatgatagaaaattatccatctaaactagtttttcatttattttgaatgcacgaactgttaatttatgtacaaccttattagttgaacaatgaacacgaattagaagataaagatgcttcaaaaaagttaaatag

SEQ ID NO: 98262 - DNA, 544 bp, Cannabis sativa
tgggaattatgttgtgaatatggaattttttgacaccacacgaaattaacacacgagtataatataaaaaaaacatgtgctagacattagacacgacatgaaaaagtaaaggcgacttagacatatgacacaacatgaaaaaatatagatttatgcacgacatagtaaacctgaaagaatgacatgtaagcacaaacaaattaacttaaaagcatgatacattaaaatgtaataatgtaataataataaatatttatttatcaattaaaataatagtaatattcaaattataataattataattattttttatatgattgtgaataattattattgaaaaaaaacataaaagtaattaaaactataagtagcattggttatctgtgactcgatatgcgtttttctttaagtagatccaaggacatactgagaactcacgcatgtgggtcgcaatgttcacttccacaggtaacattgctttcgagccaaacgccaataaaaatagaatatgtcccgttattatttattctgtcgttctatgtgc

SEQ ID NO: 98263 - DNA, 692 bp, Cannabis sativa
tcgtgattttatttgatccatatggaagcgcctaggtagttgagtgagatgtgttggcttgttaaagcgccagtgggcgtaagtcacacaaagacatcgttagagatggaaagttgtggaatgaaggcatcgaagaagccagcagggctaagaagatcgagcgcaagtataagatggcactagagtttgagtggaggctagagggctgtgccagcgagacttattagtcatgttttcttatgaaggtcaagtagggtgctagagtttgcatgatggccagggttgaatcattggaacttaatacatcgtaggagtcggaagggcgtgatgccagtgtgaatcagttggaaggttgaatggataatgcacgcatatggaaatcgacagaggtgctatatgatatagttgacttgagagtcacatcctgcgggatgaactttagatggcatgatgtgtatgaagagttgggtgattaggcattcgtgtgtgagcatgttgtcgaggacgagaacagatgaaatgggggagagaccttcacggttcactcattagactagggatttattacaagcatcgagatgagtactgtggagattgattgtcgttcaggatgtaaagtcaagaagactcgggacacaggcagtgccagttatctagggtgaaagtctgcaggactcaggtactaagataac

SEQ ID NO: 98264 - DNA, 719 bp, Cannabis sativa
ttaacctatttttaaataaataaaattgggtccttagaatttgcacagctacatatatcaatttctatttattttttctttcttagtattatccctcattaaaagttaaaaaccctaatatttctcatacccagccgctcttctcaaaaatagtctcttcaggttcaaaaaaattatctcagcagtaatagatcgcaccagagcaagccccaaacggaaactatgaatctcgctgcttgcctcaaaaatcggagtctcctcccttcgcgttggtttctcttccgacggaggtgggctacactggtcatggacccaaatggagaccacgagcttcatcgatggctcccttctctctttctccatactgcgaagccctcccacgttctctccgtcgttctctcagcccactccgatgcatctcaatcttattggtctcggtctcttccattgtctctatctccatcggcttcatctagcaaggagtatctcgacgatgaagccatcgtctgctgcccaaacaaagatcaacgatatcgtccgccgcccactgtgaaaaatgtgttctttttacatttgattcttttacttttttatattatcattattttaggggttttaattatgtaagtgatttgtatatgtttttggtatatttgagtatgtaatttttttttttaacttaaaattttataatctgtttagtatatatttttttttgt

SEQ ID NO: 98265 - DNA, 553 bp, Cannabis sativa
accccttctgccacattgaagacccaagattgtccctcgaccaatatcacgcttgatgagagaagtcaacccctcagcacacacaagaattagaaaaggggagagtgggtcctcttatcgcaagccccgagaaggcgatatatggccaataatttctccgttaatgtgaatagcataagacaccgaagtaatacaatgcataagtaacccaacccaaccagggtgaaacccaagtttaatcaacataccgcgcatgaaagaccagtcgaccctgtcataagccttagccatatcagccttgtatgttaaaaatccattccttcctctcttgtgccttttaatagcatagagacactcaaaaccaatcattacattatcggttatcaagcgccccgatatgaacgcactttgctcctctgaaataacatcccccagaacctccggcaatcaattagtagtcttcttagcaataattttatacaacacattacaaaggctgattggccaaaattcactagtgagggtaggcgatttgaccttaggaatcaaagta

SEQ ID NO: 98266 - DNA, 986 bp, Cannabis sativa
tctcactactaatagtgggatacagtaaactacgataatttttattattattatttatttattaataatttaataaccattttatataaaaaataattaaataatttaatgtttctaaattggaatttaagattaattatcatttaactaagagaacccaattggaatttttgaaaaaatataaacgagttaagagtcatgcgcgttttaagaccaaaaaaaagggcttcgctactgtcctgattataggaaaccaattccaaaatggtctaccgattttcagcaggaatgcataggttttcgtgcatagcaattataaatagatagtttttcattccatgcctataaatactactttttacacaaaattgtgggtggctgagcttctattcatatcatcatatcattctaagtgttttaagttaaaattttatcattttaacataaacacaccaaccacacactttgagccaaacttgttcttattttctataatgtgctaacaattctctctgagatttcaaattgtatttcatcttattagagagaatttactttgtatttcaaaattatatttccattatgttgaggtgagattgacatcggtatttaaataactcagttgtaggtgaggttgacaccggctttgtaaacaacttgaatagaatgagatgccactataaatatccgagagtgaaattggcattcaaaaatacggagaggttgatagtcatttgaaaaactattggttgaggtgaagttggcacaaatggaaaaacaagtcggttggtgatattggctcttcaacaatatgatgaggttaataatccttggaagaaaactattgtgaaagttttaagggttagccaagctggttaaattggctcattaattaaacttaaaactaggcctatagctttgaagaccaaggacgtaggtgactttgttccaccaaaccttgtaaaaattgagagtttgcaaattct

SEQ ID NO: 98267 - DNA, 1252 bp, Cannabis sativa
aatttaccaaaataaccctggggtttacaaatttccattattgtttaccatatagttataggcttagttttttatataaatatttatacagacaactctctctctctctctctctcaagctctgttttttatacaatagaaaagaacagaggagagggcagagagagagagatagaaagatggtgggtgaaagatactgttaccgggatgtgttgccgttctcggctatggtaacaatggaatgcattaacgttggactaaacactctgttcaaagctgcaactttacgaggaatgagttaccatgtttttgtcgtttatgcttatgctgtagctgctcttgttcttcttcctgctcctttcatttccacaaggtaataactaatttaactaactaactaactaatttcataattaattgtttacttaatactaattcaatcttcatcatttaattaatttgtttacagatcaagagtactacccccactcactttccccataatgatgaaaattcttcttcttggcttaattgggtacaccacagtttttttcttttcctatttttctaatcaattaaaattaacccatcaaattgtttttcaattattatgattattattgattatgggtaattttaatttaatggaataggtcttcatctcagataatgggatttacaggcatcaattacagttctcccactcttgcttcagccattagtaatcttgtgccagctttcactttcattcttgccatcattttcaggtaccttttttttttcttttatttcttccaaccattttagtgtattattattctttacttcctcaagtggaccaaacactatatatcctttatgctctgttttttaactttctcttcttatattatttacacattgaaagtaagtttaatatataagaaaataggtattatattatatttacttaaacaaatagtcatcgctttgaatttaacgtaggagagcatgtgtcacttcattaaaacagaagcattttcttgctacggtaaattgacagataagtttaatcagaatttcataggcctattgctttgtacacctaatccactttgcatgtaaaatgttaaaatgtaaaaaaaataaaatcataaaaaaatctatgagtgagctaagcaaattggcccactatttatttatttatttatttatattttagtggatgggtttttcatataataattattaattactatccccatttaaggtc

SEQ ID NO: 98268 - DNA, 679 bp, Cannabis sativa
ataagctcgtgcccagtagttgcatccactaactggtcgatcctgggaagtggaaaacaatattttgggcacgccttattaggatcagagaaatcaatacaagttctccaagtttcgttaggctttggaatgagaactggattggctatccacgagggataaaacacctcgcgtataaagtcgttgactaacaacttgtcaacttctagttttagtgcccgttgcctctcggaatccaagggtctccttttctgtctcttcggtgggtagtttggatcaacatttaaatgatggcagataatattagggtcgatccctatcatatctccatggctttaggaaaattgatcctcgttcgccttcaaaaaacttattagctgctatttgagctgcttgtcatggttctctcgatgtatacacacctagtgggatttcgtaggttgagaataacctcttccaattcctcaattggtttcaataggtttctctcatcttgaactcaagggtcaagatcttcatctttcttctcattctcttctgccaagatcgccataaactgatgtccgactttcctatgttgctgatcaatgcgatagcaattgtgagccagcatttggtcgccatgcaccactcccactccttcctgtgtttggaatttcaaggataggtgcttgatcga

SEQ ID NO: 98269 - DNA, 698 bp, Cannabis sativa
tcagaaccttcataactattctaactcacagaacccctatacgaaatcaattattattaaacttaaaatgaaattaaaccttaccttaagcttcactgctctgagaatttgctattcagttactatcggagcttagattgctaggtttcagattgaaaatcgaagaaaatgaatataggagaagaaagttttctcgaaggagaagaaacgagagtttcgttcgttctttactgttttaaacatataacttattaacttatataatatatataaatgatgatgattagacatttaaaaaaatattataatattataatataatataatataatataaaaataaaataatattaataaaaagtttattattaataattatcttattatttcttagctactaagagatttctacttctaaggagctacatcaaatctcacatactcttaactattttaataccgacattattaacatatcacaatattcacactaattctatcaattaagcctattatgacatttttgatccccgatcgagtctccaaggtcgccaaaattgaaaatagttttaatacaccaataactcatattacatttgcatatgccatataaatctccataatttatgaattatgcttatttatccacttatagcaaatttaaaatttctgttcaagtagattagtaggatcataatc

SEQ ID NO: 98270 - DNA, 694 bp, Cannabis sativa
gtttctatacaagtatatattagtgatatgcacacttgtagtcattaaatccaaatttgacagccaaattggatcttttggtgtctcttttgctggcttcacaattgtcctttcgtcaatgttaatcaccatatccattattattatgaactattatagattttatgatatgtgtagttcatttaatgttatattttgtatacctctatcaaaatatgtaataactcgactgaattgatcaatgttcgctcaaactggtttcttcatcaagaaactgatttcttcattaagaaaccagttttttgttaatttttctggttgactacgccaattttgatgattttttcaaagtttgctgtcggtgccagaaaaagtcgccgaagtagctgccagtgtcagaaaagtcgtcagaattggcattatcaccggaaaaatctccaagaaagtggttttttcatcaagaaactgccagttttttcaatgatttttccggcgacaatgccaatttcaatgaattttttgacgtcggtagcaacttcgacgacttttccggcaccgaccgctactccgatgatttttccggcaccagcagaaaccccgatgatttttccggcatcagtgacaaataaaactatctaaataaataaaaacattaaatatgaaatttgaaaacctaatttacatatatatgaca

SEQ ID NO: 98271 - DNA, 524 bp, Cannabis sativa
taccagtcgggcataatctatacacctgcggtcacaatattccaaatattgacaatactcataaatatttccatacatctcaaactttacactctttactagcagctagcataattcagacaaacatacaggtaggcaatcaactgataatctaataattaaaacttactgaaccatgagtcgaacgaatcttcgcagccaatgtacatatcaaaccagtcttcaggatttaaaaaccttggcgctctgataacatattgcaatgcactgtccaacaggaacgccatgtgtgtgcttctataaaatttaaatttactaataagtttaataatatcaaaatgtgaggttaattaaaacttttcaatttgaataaacacaaaactttcattaaagataattactaatctttaaggggatcccttgttatcaaaatatttacaaccagtttaacaatgcttttacaacgtaagtttatatttcaaaatacgatcaaaatggagcaccatgttcattgggtcgtaaca

SEQ ID NO: 98272 - DNA, 755 bp, Cannabis sativa
tgagaataaaaaataatttttaaaatttttaaaacatttgtaaaaaaatttatttttattttattttattttttgaaaaatactttaatactttgagatctgaataagactagaccccaaataatgtgaaaaaatgatgcgagaaaaagtgtgagaaaatgatgagagagaaagcaatgtgagtaaatgataagcaagaaagcaatgaaagagaaggaggagaaataaaataatgtgagaaaatgataagagaaaaagtgaagaaagagaaagtgatgagagagaaaataatataaaaatgatataatgatgtaagataaggtggagaaaaatattgactaaaagtaaattatttttaaaaacagaaaataacattttattatcattaaaattcttgttctttgtaattttgttttttgaaaactcttttcaaaaaacaaggccagacatgcctaactgttttcaaaaaataattttttatttttaaaaataaaaaatatttttttaattatgatgccaaacttatacttagtatttgggaaatttgatttttcatgcttgctaataatttaaattagttctcattttcatttcaatctcaaaaattaatgggtaagtactttatttgaatgtcattgttatgagccagtttgatgatttatattattatttagaagttcaatttgtggttttttgtgtttttgttgttgttttattttttgtgaatgctcgacaggatacgatagggtacgatg

SEQ ID NO: 98273 - DNA, 694 bp, Cannabis sativa
acttactagtagcgttttaaaacttcctagttcaacataagtaaatcgtttttggacaagtatatgtctcttaaaaggggtttaagttatttcatgttttcctgaatgtatcacatttccttagttgaatagaattgtagagaagttggtggaagtttgggaaaattgattgatctgtttatttcaattcaatacaaaaggtttacagtgctgtaatttattttattttttgttcctcagacgaccagcttatgtgcattgccgaacaagtccagtcaaagagattattaacaaccatgaattggagattgtaactttagcaaatttatcaaccttgacggtgagtgatatgctttgcaatgatgtgtgtttttgcatatactgtatacaacttcctttcccttttccagttatgctggaaggtaccttgattgcttgtgtttctttcaagcatcaaacttacattattctttctggattgctttgccccttctatactagtaaagttgtaaaatttatccatgtataattcttcggggttcaagtatcatattgaaattctctggtcgctgctgccatattatgagcatttataaatgatatcttcagttgaagattacatggttgatatttcttgttgtttatgaagcaaagtacgcactatattaagccaaccagcaaatagttgtactag

SEQ ID NO: 98274 - DNA, 993 bp, Cannabis sativa
  modified_base (308)..(314): a, c, t, g, unknown or other
agaaaccctctaggtcgtggtcaaccaaccaagaagaaatcaagtaaataaatgaaaatcttcccaaataggaaagtcaaaatttgtttaaactgacagccagtattcaaacaggtacattgaacttggacaatttttcagcaaagtttcaataaggttaacacatttatatatatacatatgtaacccaatgggagattgtaagaaatttattggggttacaattatatatataaaatgtgtgttgggtcatcaaataaataaatcaaatttatgtggtctattttagaataaagtttatgacttannnnnnngattgtcatgattttaatatgtggatactataaagataatttctaatttgatgaggggcaaaattagaaatagtaaataaagattaattattgttttatcaattattaataacaggtactggtccccaatttgtatcgtatcttttcactcttgtatccccatcaccaagagataaggtttcagagaaaggttttgatgcaaattggaagatcataccatttaaaggtcgattctatagacacaagtacgcttccgctaatctatattgtattgtttgattctcttgaattaattagggctaaattcaaaatttacagtattctaatatttgctacatcttatggtgaaaaagagaaccaatgacctctcacaaacactttaaaaaacattgtagagttagaatcaacaatttcattattgagattagcataaaactctttaacaatcctatccacataaccagaaaaattaaccaatgaacttgcccattttctctcttgaagaatgttaacaacaccatatggacgatgatcactcaaaatataatttcttatcaacaagaaattttatttcaacgagcattaccattgtagcaaaatagaggagaatgagttttaaagtgtacacctttcatccttggagaagaaataggttcaaacagtgttcgaagaaaactca

SEQ ID NO: 98275 - DNA, 617 bp, Cannabis sativa
tgcttgaggtggggcttggtaatcccaccaattctcatctttgatgtatacacagtgaatccatctgatccataagttatcttgcttattcgcaattgcccacacatactttgtcattgctgcaatgttccattctgcaattctcttcaaaccaatatcgcatgcgctgcttttagttgacatacatgatcccatgcaattggtccagaaccctgtgtcacatgatggcctttccataaataagcttggcagatagcttcaatatctctaattgtcctctttggtaataccatgatctgactccaataagaatgaattgacatgagtacagagttcacaagaatagcccttcatgctaaggacagattccgtgagctctagattttgattcaggctatcattttatcagctaaaaccatgcattcttttcctgatattcgcttagcacagacaggaatactaaatatttgaaaggtacctctttcttgctaaaccctgagcagtcaacaatacgttgaatatcatgatcatccataccacaacaatagaaagcttatttgtttgggttcagatgcaaaccggatgagcttgaaaagagctttaacccttgtagcata

SEQ ID NO: 98276 - DNA, 601 bp, Cannabis sativa
tctccgatattatagatatttcaattatacaacataagttttgagcatgagttcatttagtcacattataagccgcaaaattataaaatcttgaaataaaagagtaattaacactcaaaaataaattagaaagtctattacattgatatgtgtaagtaccaatacccaagtggagtaggctcctttcagagttttgataaccgtctcagagtcgctctcaatcaaaacaaaagaactgttgtctacatagttaacagacaagttgtcgctttgccaataagggaatccaagaagtcaagtatgttggtggccacccacaaaaccattcccaagtggtctctagctaacgccatcacacatatcgtctcactccccaccttaacatcacaaataattttgatccaatcttctaggggtagggaccaaaggagggaaacaacaactcgaggggaggggaacaaacaagagtcataatcttcattgcagtgagtgatagaatcaatatattgtttaatgctactaagattgttattgtgtactttgccattacgggctcaccatattgtatccatcattaatgaagcatgttgtacccaaaagt

SEQ ID NO: 98277 - DNA, 690 bp, Cannabis sativa
aaaaaaaaagacaacttcctctccttattcttcaaaaaaaaaatctttctctccttaaaaacaccaaaaacatatataagaaagtgagaaaattttcattaaagaggaggtatggcagtgacaagaatctcagatttggaaactgtgatgagaatgaagaaccacccagatggaaaaaggttcaaaccaaaagctactaacagtaataatcatgggttctttctcccaaggaaaaggttggtaaaaacaatgatgtttaaatacatagttaagaaagtctctgttatatgtagctgaagaagaagaagaagaagaagaaaatctcataaaggctttctttttatttgtgggttcctggttttgatgtgtttcaagtttgtacttatggcatttattgtcaagtttttggttgcaataatttcagtatatgtgtgtatttatgttttgtaattttcttttatggattgacacagagatctcattcatctgtttttttttttttttttagtaacggcctaaaccagtgtggttctgtttagtacatcaaaatttattacaaaggaataattcctctgtttttattaaaagaacaaataagtaaagataccccacaaagggtcacaggtaaagctagattttcataaaaacagaggaaagtggaaaactcatatgaatttcgtttatagaaag

SEQ ID NO: 98278 - DNA, 543 bp, Cannabis sativa
gagggaaagtaggatggatggagagtaagagggatggagaaaattgttaattttttttttctttttggtattgtttggtattaaaaatggagaaaaaattgattagttaaattataaaattgtcattttttaaaataaaattttattatttttttaaaggtagttattatattttgcaaaatgtattttgtctttttctataatctttccaaatttggagagattaaattttgaaagtttggagtgagaatgtctctttctatctcttctctatcttcttctctctttcttgtcaaacaactgatttaatctctccttctaataaaacaaaataagcataggttaatttttttttcagtacacagatgggtaaccgaattatttttaaattataaaatttatataaataatattaaatgataaatgacctattttaaaggtaaaattataatgtagatgtaacatttatgataatataaaaaaatagtattggtacaattgtaattaggttaattagtagtttttcctcccgaactttgacat

SEQ ID NO: 98279 - DNA, 724 bp, Cannabis sativa
ccaagtagttgtagacgtaataacaatgctgaggtgatcctgaatgaccataccattacctcatataagaccatttacaaagatttaaacataatgctaatttgcgtaaaaaaaataaacaaactttttaacatttgctgcaacattatttgacattgtattctaatattattacaaaccagaaaacataaaacgagagaaaaaagagaagagaaagaacagagtatatttctcattaatgaatcagagaagggagtgagccttatatagctcaagctcaagaggagtacagtacaaagttagttgaaagaacaactaaccaataaaactaacataacagaatacaactgaaaataaccactaaagcagtggcagtaaaagaaaaataacaagcctattttaatactccccctcaagatggagaactaatacttatcaatcccatcttgtctttgaaaccattaaattgagtaggaaaaagttccttggtaaatatatcagcaagcttatctttagtaccaacataactggttttaattactccttcttgcactttttcccacaccaaatgataatcaatctctatatattttgttctctcatgaaaaaccagattcccagcaatgtattgagctgatttattgtcacagtagagccaggcaggacctttgtgttcgattcgtaactccttaagcacagatagcagccaaacaagctcacatga

SEQ ID NO: 98280 - DNA, 716 bp, Cannabis sativa
taaatcagaaatggttgccaaaacattaaatatagatgttattttctatcttaatgataaataatatatctatagaaataatcaaaataaaatataattcaatccttttatttataaaaattgtagctcatgtaatatgtatgaaacgagagaatggtaatacctaattatctaagagagaggaaaaagataataataatacgtaattatctattttgaaggtcttttaaattttttagttttcacttttttttttcattataaaaaaaaaaataaaagaaatatgtgtcttagaaaataattgcctttaaaaaaggaaacaaatgtggttttttttttttttttttttttctgagaatacatatatataatattcaatatatatatagtataaagtaagtggtattgggcttatttatagtatccatttttttattattttttgaaaaaaaaatttatttgactttaagtgggagccaccatatagtatataataataaaaataaattatataaatgaaaaaatataggatatagaaactttgggggtgccatggcctctatagaggtccatatacatccgcccctgctcttacacacaacttcaacccacgatccatgcttcctgggattgaaatatccgtctgatgcaaccttcggtcaaccacccaacaaccttcgtctgattgtgtgtgtaagtgatagtgtaagaagtat

SEQ ID NO: 98281 - DNA, 566 bp, Cannabis sativa
tagggctgaaattaaacattgatgctgcagtcaatgcacaggataaaatattgggggtaggagcgattattcgaaatcaccaaggacatgtagttgctgctttatcaaaatcagttatcaaaacaggtgcaaggatgttttcgataagatgaaatggaggctaaagcactttttcatagtattaactgggctctacaattatagcttcctattacgcatatcgaaactgatactatgagagtttctacaggtctaaattctacatctatggatttatctagttttagtgacttaataatagatgttcgttgtcttttatcttttttctctagggttgttgtttctcatgttaagagaaatgcaaaccatgttgcgcatggtttagtaaaatatactttgaaggtggatgaagatgtttgttggatgggtgatatttccaatctcattttctctgttgttgtaagcgattataatttataatagggaaaaaaacaaaaaaaaatacaaaaaaggaacaaaaattacaaaaatactatgggccggcccattaaacatttatacagtcc

SEQ ID NO: 98282 - DNA, 787 bp, Cannabis sativa
agcaaaaaagatgcatggtattaaattaccccagttttagcactttactttgtttctggtcagaaaagtaggtgactacattcataaatgccatgaattcgatacacgcacatattaatatatagagcactaatatatacaatgcaataagagaaaagttataagtaatgttgagagaaaaagaagtttagctctaatttgtcttttttcactactagcgctgtatatgaagatgaagttactacttactagtcatttaattatttttgtcattcctgatttcgaaaaggaattatttaataaaatggagagatatatttattatttacttaataaaaagtatgatcatttaaatcaacgagttatgaggtgttgattaggttgattcaatgctcatatccatgtgagtgcatttagtgctgtctgttctttctgattcccccaacacatctctctcacttaataaattaatttccagtatttcttagtttctcaagtatcaagggataggggccatataagagaatgaaatgaacagggacatgtagaacttttggggtaggactggggcatgcatgatctactatacaaagttgactacagacttttatttatttatttatttttttttcaaaagagatttttattaattattctagttatgcacaataacatgtataacaaacaaaaactataaagaggtgaaaaagacaaatgaagtatgtcgagataattcccatttatatatatataattcaaactgaggccgaaaacaaagaataatata

SEQ ID NO: 98283 - DNA, 903 bp, Cannabis sativa
  modified_base (62)..(62): a, c, t, g, unknown or other
taaaatagatgtattgatgtacccctatctgttttagcatctgaaataattttttagtcaanttttttctcatagtcatgtatgttataactaattaagacatcttgcaaaattttaagaaatttgaaaaaatttaacacgccaaaaataggatgcaaaaagcgtattgtacgcgtgattattgtattttatacgcgtatgaaatagattgtttgaacactactttctatattgtaaattatttcgaatttctcaatgttttgtaagatatatttttaataatatattttctagatgtcgaaagaagtaagagtgcatcaatacactcattttaaataggtgcactgtaaaatcaccctataataattataatacaccctataaaaattagtgctaaagatttttttttttaaaaaaaaaaagtgctaaagctttcaataattaacttttttagtctaatttttctcatggttattgtagattttttttttcagtaaagatggttgttgtaattatttagaacatcctgtaaaattttgagaaatttaaaaaaatttaaaacatcaaaaaataaaatttaaacagtctattacacatgagtataaaataaaagagtcttacttgcaatagattgtttgaaccctattttcgggcgtgttaaatttttcgagattcttaaaaatttcataggatgttttaaataactacaacatacataatcatgaagaaaaaaaaatagattaaaaaattccctcaaatattaaaatagataaggttatagggttgcactttagaagtatacttaatttaattttctaagaaacttgatcacacattcaaacatggtttttcttgatagagattgcaatcacacactttattcactttactcaagccgataag

SEQ ID NO: 98284 - DNA, 533 bp, Cannabis sativa
gggtctcacatcattgattaaaaaattcaaaagacaaagggatttacatggttgtaaagtcgctaatggcacacctattatttcacatgttatttgcggatgaaaattatctatactgtcgtggaaatgatcgatagactggtagtgtgatgcgtctgctaaacgtatttgagatggcttcaggacaaaaagtcaactatgctaagtcatatatctttttcagctccaatactcctgtggctactcgaaattaggctctgtggtgtgatgggcatgatggagtctgatgataactctagttatttggggctcccaagtactatggggagaaacaaggatgctattttggggtttttaaaagaaaaattgcagcagaaaattcagcgatgggagggggcgtttcttgtcaaaagcaggcaaagagatcctcttaaaaatggtggcccaagtcattccaagttatgcaatgtcggtatttctactgccttcaaaaacctgctggcatcttaagcaaatgatggccaaatactggt

SEQ ID NO: 98285 - DNA, 690 bp, Cannabis sativa
tgacttcacaagtcaacacaccttgtgttcattgtcccttagaacaaaaccttctagttgttccatgtaaacctcctcttcaagatttttataaaagaatgtcattttgacacccatttgatgaacatgtaggttatgtatgatgacaaagaaaatgacaatctaatagaagtgattcttgctacagaagcataagcttcaaagtaatcgattccttccttttgtctatatcctttggccaccaatctagccttataggtttgaatggttccatcgacattgtattttattctaaatacccatttacatcctataggtgttgatccaattggtagatcaactactttccaagtttggctagatataattgaatccatttcctcattgtttaccgagaattttagaaactaattaagtagagcttaagaaaaatataaaatagtaaataatagacaaatagttttttacgtggtttgggtgttaataatccctagtccacgagtctgttgtattagccttgtcagcaagtgtttaaatattataagtgtttatagtatgagcttagtattcctctcattcctcttgaagaagaagaagcttataggaattttagaagaggttctctaagtagaaattattcaccttttgctcatgaaaaataagggtatttataggcatacatgtgggtaa

SEQ ID NO: 98286 - DNA, 870 bp, Cannabis sativa
attcttctatctacacaaaacacaaaacacattcactcacacctatatttatgggaaattcaccaaactaaccatatgaaaatattaaattagcaaaataaccacattatatttacacaaccaatttacaaagcataataaccacattgaatttacacaacaagaaatataaaatttgcaaaataaatacaaatttacacaaccataatgatccatttatggtcacaaagtgtaatttttaagagtgttttgtaaaaataaattttaagaaaaattttattagcaaaatgaccatgtaattgattgcacaagcaaccataaattacactgtgcgaccataaaagaaccatagatttacactctgtgaccattatggtcgcataaagtacgtttattttgcaaatcttactatttcaaattattagtttggcaaattactctaattttcggtcgtttatgcaatcaaaatgcggttatggggactagagaagcattgagttggataaagaagaaggctagggctggcgtgtccatagaaactgatagtcttacagttgtgcaatcacttcggagcctgattgtaatgttgttttatttttgaagtgttatttctgattgttagacactttttaaacgagttacaaaatgtttctgtcattcttattaggcggtctgcaaagagtattgctcatttcctgactagagtctcctattctgttgctgatcgtattttaaggaattccgagtttcttgatgtaatctcgaatgattgctgttaataaagtctatcacttattttcaaaaaaaaaaaaatgcggttgttttgctaataatttttttttaataaagtttatatttttacaacacaaa

SEQ ID NO: 98287 - DNA, 1299 bp, Cannabis sativa
gttttcctctatttcacaatgtacaatatattcaatttggcattagagcaatttctgccgatctctgtgagcatggcgacaacagatcttggctctcatcgtagcactaaaactccagacaatctgaaacttccaccactgtcaaaatcaaaaccaagaacagaggaattgaagactctctcgtctatttcaaccataatctctcgattaaactcaacgatcacaacctcttgctctaaaaacaagtgcttgctgcgattcgaggtaatcgtcttcaacgctacattcttgatgctccccctcttcaattcattttagatgatgatcgtgctagtactccaatacttaatctaacctttcttgaataggaggttcaagatcagctgctagtatattggcttttatccttgatgagtgatagtcctctaactcaaatggttggatgtaacaatacaagagatatctagagtacattggaagaacatttcattattcaagtctacaaaaatcttggagttttgccccaaacttcaaatctcaggtaaggctctttgtttatcaatgaatatctcctcaaggtcaaataatatgtttatgttgaccttcttgcttcagttggtgaagtcctcaacactaggaatcatgtagttgcagtctttaaaaaattgtcaagtgagtatgaaacttttgttatttcctctaacacttgagttgaatcttgttttaatgttaaaattgaggccttcatctcagccataccaagtatgctagagattttttgtgtaaagctaagattaaagtttcttctacaccaatgacaattgggttgaggctttcggcctttggcagtgatccatttgagaattttcaattgtacaagtctattgtaatttataggtgctctgcagtatctcaccatcacacgatttggaatttcgttcaatgttaataagttgtgcccgctcatgaagtgtcattaccaatcccattgggttgaagtcaaagagatccttagatatgttagtggtactttaagctttggtttacgtacacttcaaagaccccaactttattcattaaggccttttgtgatgctaattaattagtcgatccggctgattgaagatccacttttggccatgccatctttcttggaaaaaaattggtagcttggtcatgtaagaaacaacacactatttctcgttccagcaccgaagttgagttttgaagcttaaccaatatttggctcaactatctagcttggatttactctttgttttctagaaatgtcaaagttcg

SEQ ID NO: 98288 - DNA, 815 bp, Cannabis sativa
catagtgtagaagattatgtagatactatcaactgaaggagaatccaggttcaaatcttgattatactctacaacagaaaggatcaagggttagagatttgaacgaaatgagtcatattatttcgctgccatcaatgtaaagctttctacgacttttatatgtttattttattgttttagagaattcatatttaggatgttagattatagatttataatcaaacatacatgttagtaaatctagatccttgtagcataacctccaacattatttttgaagtctgaaacttggatggggcatgtctctcttgtatcttaagaaaattgctaagcagattgcccataagaagtttataggaaccaaaactgatgcgagacgacacagagaatgtcaacctaggcgcccaacattgatactgaacccaggttgagccctgggatgtccacgtgacatcatcagctttatcgttcttcattttaaaatcatggcgaccttttgttgaaggataacactcagaaacaacttcactggatctcgatgcttacctgggtgcccctagtgtgtaggtgacactgctctatcccgggatgtggggtcctaagtgttgtttcctttgtgccacgtgttcaaaatagtgtccacatcatcaagtcaactttttgggtaaacataatattattataagatggcgccaatcactatgtaagaatattgataggcccctattacaaatgataggcccactatgcttgtttttgaattaataattcaaaaatataaatatttattgaaatttgaatttaaaagttggtta

SEQ ID NO: 98289 - DNA, 503 bp, Cannabis sativa
tttgttagtagtaacttacatcatagctatttgatcaaatttgatcttttagcttaacaagatataaaacaatttgcagaaataagaaattgtactttaaatgatagtcatccgacctgagtacttctcaattttttccaaacctttgggcatggtctgcccagcaggtcattcacttaaaagtaaatattcttttagtatttagtatggtcatctgacctggtacttttattggtagtattttcttaaatgtgtcacattccaataccgtggtactagaacaacttgcattttctcatcatacataactagtttgtatgctcctgattcgagaactttgaccaccttatatggtccttcccaattaggtccgagtacacctgccgtactgtctttggtatttacatatactcttcttaggaccatatctcccacaaataatttacgagccttcacttgtttgttgaaatacccaactactttttgttgatgggctatcaact

SEQ ID NO: 98290 - DNA, 694 bp, Cannabis sativa
agaacaagtacaaatataagaaaactaaaattgcagcccaatcattttgctttttttaaaagaaagcccaattatttgttggcccattcctctaatagacaactttagggtagccactggtatcatcttcaatctttgcagcaaccgactccaccctttgcccatgttgagtgtgtgacctccatgtattgtattctctctcaattggagcttcatctgcactcacagtaatattgaaggccaagtcaatgccctttgctccgatggttctctgcgatccgacgtgacaaagcttctcgtcgtccgccagtgaccgttcatcttcgtcaaagttcgttcgtcgtcttcgatccaagatccattgacctccccgatcaaagatcatcctccgatctttcagcggcgttggtgaatcaccattaacaccaaacacaatctcacgtagctccattttacgatccgcaaacactccgctatcatcaccttcttctatgtgtacgcaagatgatcagattgcccaatcaagagttagcgagattcttgaatccccaatctccattcgagcagcagagagcttttcctctacctccgcccaattgcgattcaactttggttgtgctttgctgccatctcggatgagatccatatcgacagcgatgtctaaagcttcctcaggatcatccaaatccatctc

SEQ ID NO: 98291 - DNA, 773 bp, Cannabis sativa
  modified_base (654)..(660): a, c, t, g, unknown or other
aaactcctaggtaaggataaggtaagtaaacttgatttctgtgagtgttgtgttcttggaaaacatcgtagactgaaattttgcactggcacacacaccacaaagaaaatcttagagtatgttcactctgatctgtaaggaccagagaaaacaagtactcatggaggttgtgtctattttctatctattgttgatgatttttcaagaaaattctggatatttcttttaaaacataaaaatgaggctttttttaaatttatacagtggaaaacacttgttgaaaatttgacaaatgaaaaattaaaaactctaaggactgacaatggattagaattttgtaatgaggagtttaaccattattgtaaagaaaatggtatacagaggcacagaacagtaagtataacaccccaacaaaatggagttgcagagagaatgaacataaccattctcaacaaagtgagatgcttgctgttacaatcagggttatcccaaggattttggggggaagcagctttaacaactgtttatttgatcaacagaagtccatccagtgcaaatgcattcaaaactcctgaagaaaaatggtcttgtaaacctacttacttatctaatcttagagtatttgggtgtgcagcatatgcacaccaaagtgtnnnnnnnttagaacctagagctatgaaatgtttttttttagtgtatcctgagggagttaaaggttatagggtttgggtttgggaacaaagaggtcggccattctcgacattcccaatgtc

SEQ ID NO: 98292 - DNA, 748 bp, Cannabis sativa
taatttacttaattcttaaacaaaaaccactaaaacttaaaataaaactaatatttacgtagctcgccacgtaactgtcatctaatatatatatatataaatacatattgttttgatggccggataagttaaattaattagtactatattgataactactcaagtataaaatatataaacacataaatcgaatgaaagaacatgaaaaagacctaatgtaaaatttgagttccacaaacaaatgattttttctaaggatagatcatatattcgtgcttaaatattgatcaagataattgtttgtatgaatagtacgtgggataaaataattcttgaacaatgttgtgttgattattaaaaaaattacatagtacatcaaaaattaaaaaaaaattataaaaatacgttaacacgaaaaaaatttcatttttgaattttgaatttttttatttacgaaaatatattttcaataaaaataataaactatttttttgttattttatattttatttattgttgtattataattgttataaggttttttttgtcgttcttggttgttttatagtttacttatagtcgatttgtagttgtcgtgaagttgatttcgcgttaatttttagtttttttaatacaataataaaaattttagaccataaaattgtaaataaaacataaaaaaattatatttctccttaattattacgagaagataataatgaatttttctaggttatttaatttatat

SEQ ID NO: 98293 - DNA, 1669 bp, Cannabis sativa
tcaagtaaaattaatatagtttcttgaggaaaaaataataataaaaagtagggattttttaatttttatacttcgaaataattttttgtttttttacatttttactgagttctacgtacataaaaatttctattgcaactaccgctacaacctaaattgcaacgaaaaatcgtatagaaatccatattgcaattagcgctgcaacaccactttagaaacccaaaccgtaaatttgaaagaaaagaaaaagattaaaaaaatagtatataattttcctaaaaaaatattattagtactataatagcttaaatcaagagttcaaaaaaatcatatataatgctttcatactttcttggattttggattttaaaggacaaatgttattttagattttgtattttataaaaggtattaattgtactatctgttttattaaatgataaatttgactctgtattttttaataaaatataatatcttagttttttgtccaaataaaattttataataactcaatataaaggtattatgataaaactgattatattttctgtatttatttgtattatgaattaagttggttatattattgaaaattgagcttagagtcttatatatttgttctattctcgaaaatatagcatttattttatcatttaaaaatacagagagtctaatcggtaatttttgtaaaatacaagatctaaactagtattaaccctttaataaatgaaaaaattttgtgattgaaatatactgaagaaataatttgagaaatatatttcttaaaattttatttaaaaaactttttttttttgtttttctaaggaaattcattttaatttttttttttaaaaaaaaagtaccaaccttttttttttttgaatatatataataattctaagtatattcctgttctagttttgtttttttctaaagaatttcttaatttttgtttaaattaatctaagttaaataaataaataaatagacaaattcattccctcttttcattctaaaattcgaaatccaaatagagaataattaaatgttgcaaattaatcgatcatattagtatgtataagcaatacaaaaaaaaaaaatcaaagtcacctttctttttagtcataccataatttatttttaactaaatttaacttttagtcacaataaaaaattacttaaaatatagtaataagatataagttatcactaatttagctttagtcacagtatatttagtcacaacaaagaattataatttttgtgactaatatttttagtcacggaccttttaatcgcaacaactttttatttctaatcacaaattttattataactaaaagtaaaaaaatttgtagtgaaaatatatatacatgtaacatgcataatatatataatatattgtccgttttctatctaaacttctcaccgatttatttttaagcactttctcaaaaaaaaattatatatgtaccaattgtaaaactttgattgcaccttactaaaattatagttgttgtttagtcaataatgtacataaaaacctattccttacattattataatcaactactataatcaccaaattaaaattaatttatttcttagaataaaattaattaaattaaataaaataaaaatagtttcttaggatttgtttttaatt

SEQ ID NO: 98294 - DNA, 578 bp, Cannabis sativa
tggctgaagaatattcattctcttaattctctcgaaattcctccagtctcaaatctataattttactcatgtttttgtgtgactaaatttaatttactcgtgttttctttttcagaaaataataataataataaataattttttttaacacaaaaaaaagctcattagaacctcaaaagtaaaatagaaaaatctaagagaataacattaatcagaagaacaacactaattagatattagatgtagataatggattcaattcaataacaataagaacaattgattgttaaatattaaatatctaattataattagactgtataaaagtttttccttcttttattattattatttaatttatttattactttgacgtatatataattaatttttaaatttaaaaaaatctcaatcattttcttatagaaatttttacatcaaaaatacaaaatgttaactttattataatgtgacttattgggcttttaacaaccagatgtacggatctattccgatcgactctttaccggagaacattttgtgtaatgaccgagaggtctagtatctttttatatata

SEQ ID NO: 98295 - DNA, 522 bp, Cannabis sativa
aataattggattcgatcggatgggtccaaatccattggatgtgatccaatgaacacccctaacgactaggcacgaaaaaatacgggcttgggaattacacgacacaatgttacaaattggcacggcatgaaaaatatgttcttaagtacgacacgacacgagaagcatgaaagacacactacataagcatgaatcgactagctcaaaaaacacgacacatgacaagctagaaaaacatggcacggcatattaaaaaacctttaactttattattaatattaataataataatatatgaatttatcaattataaacaagttaaaatgataataaaatttaaatataatatttaatattataactctataattacaattattaaaatataaaaaattaagattatatattaatttatttataaggtgtgttataaaaatttaaatatttataagtaaatatttaaattgatgttaataattttttggggctttctcatttttacaattcaaaacagtttttttt

SEQ ID NO: 98296 - DNA, 520 bp, Cannabis sativa
  modified_base (467)..(470): a, c, t, g, unknown or other
ttttgttattttttaattgttattataaaaaatatcatataataaaagaaaataaaaaagtgtaatataaagtatgaaatggaaacttaaaaagcaaaaatttaaagaaaaaaaatcataatagttttataaataaaatattcaattgtgtccatagagagaatagtatattttacatacataatttttttttttttaattagctatcatatgttataatttccaagcaaatatatataatatttttacaaagtaatttgaagtttaaatagctttagatataatttatgcaaattaacttgtatacaacaattcttttgtcattgattaaagtaatggctctaaaagttgacagcaatatcaaaccttgtatattgcagaaatttataaaattataaatgaatggctttgataaactatcgagcaaaaataatgtatgcataattaacaatagaagtagaatgcannnnaagtacgaaaccatggtgttattactaagttcaattattgtgataccaaa

SEQ ID NO: 98297 - DNA, 562 bp, Cannabis sativa
ggtgggaatcaaacttgatatggaaaaagcattcgaccgtgtggaatggaattttctctcagcaatccttagccatctaaacttccctagcagaatcatcactctcattcatcagtgcctctcttctgtttccatcaagttcagtattaatgggaacatttctaaggaaattcttcccactcgtggcttgagacaaggagatcctctttctccctatctctttttgttatgctctgaaggtcttgctgctgctcttaacatccaaaagcaattgggaaattttgatggcatttcaattgccagaactgcccctgctgtttcccatcttctctttgctgatgataccctcatctttgctaaggccacatactcttcttgtaatgcacttcaagcagcccttcaactctataaccaagccactggccaatgtgtcaattttggtaaatcttctatccttttctccccaaacactccctctcaaatctcgagtcatttctatcaaacccttgggatttctaatgggcctttcatgtcaaaatatcttggagtcccccagtgtttt

SEQ ID NO: 98298 - DNA, 602 bp, Cannabis sativa
ttgtattgtatagtattgtgttaggttgtattgcattgtatagtattatttaatacagtactttgtttgacattatatcatattaataggctgtgtaaaattatactatttaatacaataaactcaacatcaaccccgaccccgaaccctatagcacgggagcccgaactaggccacgacctcagacgtgacatgacctagacccaaagccgtccttgaatcctaaaccttgactcggacccggacgttaaccctgacctcgaatccataccccgccatcaaaccccgacctcacacatttcaaaatattacaatactaattaatacgaatcatttgctatttcatcaaaaaaaaaaaaaaaattaatacggatcatttccctatattaaataataggattcaattaaattaaaacttataatcttaataattaatacaatacaaaatattatctaaatatattgttcattcttatatattattattttttattattttatgtttgtataaattaatattatatatttaaaatgaataaatatatattttaaaatatgataatttaatgatgtagagaaaaaaattaagaaattggtgtata

SEQ ID NO: 98299 - DNA, 910 bp, Cannabis sativa
ccgcacaatgaaatagtctcaggcgtagccaccgatcttgatgggcgtacaccacgtacaacgcagacaagtacttcaacccttttgggcttagctacatcgagcagataccataataattggacatcctctgaaaaagaaggatggagagataggttggcactctagtcggcatgtggcttggatcatgcacagaggtcaggtcttgggtagtgtgtcaattttcctttgtgcgggagaaaaattacggcctggtcgaaagggccagtagtgcagagattgttcaatctcttcgacataagtatggacaaagtagaccccataagggtcgagcgttggtaggttatttctcggcgtaatccacaccagcctttaacaccatctagaaggcactgtaggttcattattagagttgtaacccccatcaatgttcagaggtctgacctcctctgttacttcttccactttagcttcaaattcttcctccatctatacttcaacttcctcctcgtaagcttcttgtagttcttgatcattttgggcttgagcctgccataagccgcccaatgtgagggtctgaagcagggactgctactgctggggtggtatatttagtttgagtcaatttgtgccttagaggtggagtaggcttcggagtatgctttgcaacataaatggctaagtttgcatgggagatttgtcgtctaagaagagtaggatgtctagcaggcaaagtgtcctggatgtctggtcagactatgtatgtccacgaggctagaaggaactacctccaacctcaatttaactcctagatatgacggtcgtaactatcactactcacatggtcggtatagggatggtgttggaaggtagactccaaagagtcacttgaaaatccttccttggaaga

SEQ ID NO: 98300 - DNA, 1279 bp, Cannabis sativa
  modified_base (471)..(471): a, c, t, g, unknown or other
  modified_base (498)..(498): a, c, t, g, unknown or other
  modified_base (525)..(525): a, c, t, g, unknown or other
gtatgttatatttatattactctaggatatttttatagtactttttataaaatgaaggatattttaagtattaaaaagtaaaaaaggacatttgctttattattttaaaaaagggacattaaccatcaataaagttagaaataggactatttacttacatttctcattaaaaaaatttgagtttttatgcttaatttttctatttaattataaaaatatctcatttttctattatatgggctgaggttgttccatcggctggaaagaaaataataaataaattcggcagaaaaatgataaaaaatgttgagtttaacttaaatatttttcatataaacttatttttgatataatgtaaacaaatttattttttgataatttctttaattaagtagctaatttaagtatagaaattttttcttttattattcgtcatcggataaaattctaatggcttaatatttttaaaantctaatggcttaatatttttaaaattntaatggcttaatatttttaaaattaanatttatagttaaatttatttagtgcccattaatagataatacccattgagaagttttccatatatatatatttatcttttcttttcttttttttttttagttttatttttacatctctatatatatagcaagagaaggattctagtgttatgtgaatcaaaactctcaccaccccatcatcgtctctaatgtgaacttttttttccacatcttgtgaagatttatcctcactatcctatcccaaataatgtttggtttgtccttgataaatttcagcgattaggttcaggttgtgaaggatgaaatttttgtgtgtgtgtgtgtgtgggtctattaactttgatgggtgttaggaaaaactaggcttttggctcaatgaggggtgactattgacaattaaaatttttcgggttagcttgaaaggctcaatcgtccgaaaatggtctaaatcatttctaagttgtaaagctagctaggatttcgccttaagaattacactaaccaatcctagaagctaaaactctctcaaggtgttagctattctagaaccacaaggtatggtgggataacacaagtacacctatttaaaagaattcctcttaaactagcatttagacaaaatagcatttaaacttggcattttcaacataccaaaattagggcacatcacaaatgaaagaaaatggatatttctcatcatcgagcggtacgctaaaccaagctaaagcaaaatgacatatacttctcagttaca

SEQ ID NO: 98301 - DNA, 873 bp, Cannabis sativa
ttagtttctctactttattcttctgttacaattcttacagttggaaaacttagatcccttagtacatcgtgccattgctgccacttctgctgttccagatctccgaggtaaatgctttttttgcctaagtttgttgcggatgattgactatgtgtctgagtttcaatatagaattcacttgtcaggtgataacaagctcataataaaagaactataacttgctttagatcttggtcatggacttgtctatgtaaacttttattttaggctccttaagtctgaactatcttgagctctttttacttaaaactgccatttcagcttttttctttgtttttagatcgttatgacaagattccgacttctatcgaatcaaagctcttgccatttcagagagatggtgttaggtatgtactagttatctgagatctttcctcttcaatccaaaccattgtacatgtgacatcaagagaaactcaatatgtttttaaaatatttatttgttagtttctttttaatatgaacatggaagcctaagttctttcttctaattccttatcttgctcttttcaggtttatattgcagcatggaggccgagttctccttgcagatgaaatgggattaggaaagactttacaggtaagttattcttcatgaagactctttccgtacctgcaatttatcatcccttgtttgaagaaatatcttactgattgtagcctaaatgatttccttttattgatttgttaataacatgaaacacaatctgtgaattttaacagcaatcagacgagtaagaagagttgaaagcctaatagattgcattatttaagcagcactcttgctcgtgtattttttgtaggctattgctg

SEQ ID NO: 98302 - DNA, 670 bp, Cannabis sativa
aggttcttgttttcttacttaaaacatttaaaatattttgtaagaacatgtttcataaattgtttttatcttttaaaatgagaataaaaattttgaaaacaaaaataagttactttcaaattttatttaaatagtatttttttcaattaaaatctacttatattctcttttattaatatacctcaactccagacgtgaatttgaatctcgtctcatgacctcagatacaatcttctatgggagtccaaactgacatatatgatgttcttgatgataacaaagtcaaggattttctttgaagttatagctgccaatggttcagcttctgtccacttagtgaaatagtcagctgcaacaacagcatattgtactactccttttccattaggaagcttttcaatcaagtctatcccttatatagcaaagggtcagggagactgcatttgtgtcagctcatttggtggagctctcgagatctttaagaatctttggcacttgtcacatttctcaacatagtccattaaatccttgatcatggtaggccaaaagtacccttgtctaagtatcttcttggataggctttgcccccttagcgtgatttccatagaaacattcatgcacttcaatcaatagcctttcatcttcttccttggtgacacatcttagaagt

SEQ ID NO: 98303 - DNA, 637 bp, Cannabis sativa
cctattagccaaaatctttgaaacaatcttgtaaatagaattacaaagactaatagggcaaaagtcatcaaagcagttagcatgagactttttagggataaggacaataaagcttctatttatgagcttacaaaatctccttgatacaaataattccttcacaaaattcaccacttggcccccaacaatgtcccaaaagtctttgaagaatttaataggaaagccatcaggccccggagacttgagggggggcatagaccacacaactttcctaatttcctcctccgtaggacaagcacacaatctcgcattttcagaatccgaaatgcttctaggaatcaaattcccaaaatccacatccaatctcgggtttgaggaagtaaagatactttgaaaattgtcacgaaagtactccgcaatattatctctaccatccacccaaatccaatcatccaaggagatattccaaatgaaatttctttttcgccgaacttcaacagaggtatgaaagaatttggaatttctgtccccctcctttagccaagcttctctagacttttgtttccaaatggattcaagactaagttccgcgtcctctaattccaacattatagttccctcgagctccaaattttcg

SEQ ID NO: 98304 - DNA, 703 bp, Cannabis sativa
tattggggtccacaattaaataaattcataaattataataatacaataaaaattagtgctaattgcctttactaatccaaattactaaagcggtcattacagctcaaacttgattttctaaaaaaacttttacacataagttgaattatcatatttgctaatgtttggaaagataatgcatgcttgactttttaatttaaagtctcaactactctagaacttgtttgataatcgtttgaggcgaaatcgattaattacacatgattttgagatgtgatataggtaattttttattggattgactgaacttttcaagcctaccctatttattaattccctagttttacccaagttgagcctaaatgttgcaacttttttttttctttttaaccctatacaataacctttgagcctaaatttttttattcatcctttttcacaccatagtatattgatgttttatgtatttgtaaaagtatgagagttttgttgagggaaaaatattcatggttatatgatgatgaagaaaataaatactattcccttaaaataaatatttgtaagttgtaagtatttcattaaaaaaaaactaaaaaaaaaatgatgacaaatacgtcgaaaaataaataaatacttgcaacaatttaagtgtgggggaatagtaaattttatgaaaaagaataagatacaagattgaactgtt

SEQ ID NO: 98305 - DNA, 897 bp, Cannabis sativa
  modified_base (655)..(655): a, c, t, g, unknown or other
aaggtatcaatgtgattggaaaaagtggatttttaaaaataaaagtgataaattcagtacaattgtgaggaacaaggctcgattggtggcacaaggatacacagacgtataaggtattgattttgatgaaacttttgctcctgtatcaagattagaatctattcgtttactcttgtgtattgcttgtattgttgatatttaactattccaaatggatgtaaaatctgccttcttgaatggtattttgagtgaggaagtttatgttgagcaaccaaaaggatttgaagatcctcagtttccagaccatgtgtacaaacttgaaaaagcgctgtatgttttgaaaaaagctcctcatgcttgatatgaaaggtaactcaatttttaatttctcatgattatcaaagaggtagtgtggataaaactcttttcataaaaatctgattttttcattgctcgaatttatgttgatgatatagtttttggatctacatctaaccatgaagtgcaggtgtttgtcgatcaaatgaaaaatgagtttgaaatgagcatggttggcgagcttactttctttttgggtcttcaagtcagacagatggaaggaggtacatttgtatcacaaagtaagtatggcaagaaccttgtcaaaaagtttggncttgagtcggctaaacaggtaagtactcctatgagcatcactttgaaatttataaaagatgagaatggagtgaaggttgacaatactctttatcatagtatgattggtagtctattgtatttaactgctagtcatcctgatattagatatagcgtgggagtttgtgctcgatatcaaagtaatcctatgaaatctcatgtatctgctgtaaaaaggattattcgatatgttaatagtactct

SEQ ID NO: 98306 - DNA, 1424 bp, Cannabis sativa
tagggttatcaggatatacatattggccaagaaatcaagatagggagagagcaagatgatcctctaggaccatggcttttaaaattcttgcacctgctgctactatggcactgtaccaatgcaacgagagagagaaagatagagagaaagagagatattgggatagacagggacagaggaaatgatagtgttttagggttttaaaattagggtttctatttataccttttttttattttctttaaaagaaagtgccttaagtgtcaatttataaccaagacaaaaggttcttttatggtcggttattaactaacacttatacttaatctgtatgtatattatttttcacgtttttggtctcgattattattttagtgtcggtcacaaactgacacttaaagtcgttataggtgtaagttgtgaacagacaccttagagtttgggttgtctttagtatcgatttttcaaaacaaccgtccctcaaaccgacacaaaaattttattatgtagtagtgaattctttagggtaaattctatatatacatcgaatcttgcctaaaattatagtgtctctctatcctcacgcatccataatttatccataacaaaaattacataaaaatcataacaagaatgtttaagagaaacttaaatcgaataatttatcctaattctactaaaatttcagtggcataacgactataattgaaaggtttcgaaaaattttaaagctactaataaaaactaaaaacaatttaaaataagataacccaatcacaacaatacttggcaatacaaaatcttataaaataaaaaaaaaaatactacaaaattaaaaattaatttaaaaactagttgctagttatataatttgtaactaactagtaaatggttagtactaaattactaacaagtgactcaatctcaatgtgtcttaaatttcaagcaagatacaatttttgaaaagataacaactaatctcgaactctaattttttttttttttatgtttttattgattgagatgcctaaccctatgattttaaaaaatcttagcaattaagacaaaagtttctttcatattactaactagtaacaaattataactagttactaatataatttgtaactaactagtttcttacaactagttactatttataattagtaactaatattactctaaatcactcactagtaactaattatagtatactaatttattaactagtaagtcctaattttactaaaattttaccaccataacaattataattgaacattctcaaaaaattaaagctattaataacaacaaaacacaatctattacaatataaaacaatgacaacaacatttagcaatacaaaatatttctacccatcccactgcggtatatgtacttttagagcatacttcactatggat

SEQ ID NO: 98307 - DNA, 642 bp, Cannabis sativa
tccaatcctaaaaatataaataatgaacaacacctcattagttattctaggagaatgatgcatggtaatatcaaaaaaatcattgattgataatatatttctctataatatatttattaatgagtattttatttaaagacaaatttattgataaggatgggtcttaattaatcttctacataccacaccccacgtatataataataataatataacatatttttgaagccttattaattctttgttatatttttgttgaatgtgatatagataagtaataatattttttggtcacaatcacattgtacagtaagtgggttgtcttcttcatgtgtcaccataatggggaagaggaggcattcatgcgtccatgattaggggacagtttcatgctcaagaggaccctttgcctatatcctcataacccaacttagtggccactatatataaatatccttgatcattctataataaaaaaatcaccaagttgcaacattagaaaaattaatgcttctcttttctcaggatttttttaaaagaaaaaaatcttaaaaataaaacttattaatgtttatattggtatatcatgtattttttatgtcctttaaaaaaagaaaagaagaagatatttttatgtgtatt

SEQ ID NO: 98308 - DNA, 711 bp, Cannabis sativa
attctttgacgtgtggacagtgccatcttcatcaattaaaaacttgatcttattgttggaaaatcttgcagaagctttcgcatgaaaaaacttcgtattttgatctccagattgcaaccaatcaatccttgcacgctgtttctagtattgttcttctgaagcaagcaaatcatccaaaattgcttctgcctgctgtacttgctggtagtgtgaagtcgagtgtattgatgtgttagagagagttgtgacagtagcttgtgctgaggttatttgctgcttaaaatttccatacttagccctgtgccacgatcgtaggtctgatgcacactgagataagtttccatttaaaacctcaattggattggctgtagaggaattccagcaattagagataatgtgagaacattcagcatctttaatccacatcttttcaaaacgaaatctcgaacggtattggaactctgaaatggtagattgcaagttaatagtactcagaattgcgcgatgatctgatccgtagtagccaaggtgagccacatgtggtgtggcaaaatgatcattccaaaccatattaataaatacccagtctagacgttcctgtagggcttgaggatctcgtctgttcttgcaccaggtgaagtctggaccagcaaaaggaatttcaaggagagcgcaaaggtctaaagtagtacggaatgccatcatatgatt

SEQ ID NO: 98309 - DNA, 860 bp, Cannabis sativa
  modified_base (147)..(150): a, c, t, g, unknown or other
  modified_base (494)..(496): a, c, t, g, unknown or other
agggtgtaattgctttttcatggtgttagctacttagcaactaaggttgagtaggtcaaagcaatgcttgaacttactaacaggtaacaccttagtgccaatatcagtagggttctcttctgacttcactttctccagctcgattannnnttcttctatcttctcccttatccaaaacaactgaatatcaacgtgtttttgtcttctcgtgataaattggattcttagacaaatgaattgaagattggctgtcagaatatacccttgcctttccaactagaagtttcaactccttcagaattccttgtagccatattgcttctttgaatgcctctgtggtcgccatgaattccgcctttgtagttgaaagtgctactatggattggagctgtggtttccaactcatacaatctctattagtttgaaacacataagatgtagtagacctcctagtatccttgcttgatgcataatcagcatccacatatcctttnnntgttactttctctaaaactctcttgtaagtcaattcaatatctgatgcccctctaaaatatctcagcagctatttgagtgccctccaatggtttatcccaggatttgacatgaacctactcaatatgcttaaagcatgagtaatataaggtcttgtgctaaccatgacatacataagacaccccaaagctattgcatatgaaatttcttctatcttttctttctcttctactgtcatagggctttcttccttggttaatacaaactgtcctccaagaggtactaaagcgctcttaaaattttgcatcttgaactttgtaaggatcttctcaatgtatttctttgctttaaatgtatgactccat

SEQ ID NO: 98310 - DNA, 568 bp, Cannabis sativa
tttttcaggatatttttttttttttttctgtttacttttttacgaactttatttttctaacatattattgtttttaggttgttatagaaaagaagtttacacaatgcgaaaatatagtataatattgcaataatatgaaaacaatgttgctttttctttaaaaaatactagttcacaaaagaaaaaaaatcgtaaaaacgtataaaaaaaaagtacaatttaggtagtttgtgtagtcttgtcttcagcactactatcagttcataacgtatttcatgtttctatgctacgaaaatacgtctcgaatcctactcatgtgttgagttatgaaaacctagaattctaaccagatttatcatatgaagagcaactagtgcagatcattgatagaaaggataaaatccttctaaacaataccataactttggtcaaggtactctgaaaaaacagtaaggcggaggaagccacctaagagttgaaatctgatatgagggctcaatatccagagttgttcaggttaaattttaaggacgaaatccttttaacgggaggataattgtaatgaccg

SEQ ID NO: 98311 - DNA, 2694 bp, Cannabis sativa
taaaagattatcactaaaagtagctaattttttttttttttttagtttaccaatttacaaatgataccaaattaaattttgcaatgatattgtttcaaaaaaaaaaaaattgtaatgataatatcaacatgcaatgccatttgtttggttaagaatcatgactctacaaagaagacagttttggaagatgaatttctcttcccttttccactgccacgtggcattcaattattcttttaatgatttttctccttttgggagacaaagggtgtatttaatagtttcatattttttatttaattaattaggtgtgattttataccattaaagcatgagtattcttagtagcacacagcaatacaatacaacccttttattggaatattgtcatcaatgctctttaacattttcttaagaaagaatctaaaaaccactcatttagaaaaggtgttatattgaccaaattatacctattatgcttatttttatgattttttttttaaaaaaatcaatatatgatattcttaatcccatataatattttgagatattttttggttatatttgttaagaaatagaataaccatatatttaaataaatgggatttttttttcatacaagtttccttctgtttaacttttttcctataacttttcttaaattttctatatataaatatttttgaattttccattaatattgaactcatacagccttgatttaaaaaggaaaaaaaaagctaaaaattgttaaaaaaaaaatgctaaggtgttgttttttgatatacttttgaaagttactttttgagtcaaaaaatagtttttgggctgttgagatatgaattttaaattaaactttttattaattacttttttaaaaaaatcattataatttataaattagcactcttaattagaaacaaaagaaggtaaaactcatgtgaattaagaaaaaaacatgtaataattatttttgaaatagaaaacaacagtaagatattctttaatttcttatttaactcagtttttataaattatttttaaaaaatatagccaaacacccattattgtttttaaaagattttttttattatttttaagagatgaaaatagtttttcttttttatttatttatttttattttaacaagagatgaaacaatttttaagttataaaatgaaacacctgccccctatattcttacatatattcttttctgttaaaataaaatattagtgctactaaatcctaaaaaaaacagataaaatcttctttttttttacaaaaaaaaaaaagaaataaataaaggataaaaattaaagattggctgccttattatacgtaaaaaccaattactgtaataatataaatatgctaaaagaaaactatcttataatgtcgtttgtagggcaagttcaatgttagaataattttgttaaaacttaaaaaataataaaataattatgatccattaattaaaaataaattatattttgtagtatggacattttgttttaatagttatgtactagacttaaaactttacataataataatttttctggaggatgtttatttattttattcattttattttttaaatgatttgtgtttgtgaaaaaaaaaacatgcctgattaatatattttcaatcaataataatgctttcaaatattttgtcttttattgtttgaagtgttgaattataatatctggaccagcaagatttattctatgtattaactactttaattaactaattcaaattgcttcaatcttttatttttttcttataaaaattgacttcttattttatttatttttaaaaaataattcaaattgaaaataaatcttaatttgtaaattcaaggaataaattaacagagctataaccatgtagttgagatcaaattaaatcatataacaaagatagtcatgaaatgagcataacccttcattatatatttatatttaagtttatatttatatttatgcaacttataagaaattttttattaggaaaagaaagtgaataaaacataagttaattaaggatgtttattatatattaatcaaacatattgatgtttgttaatccttataatatataaacatccttaattgatttattttttgttcactttttttttttttttgagatttctaattatataggttgcataaatttaaatatgtgtgtttttcgtaaataaataatatgtacacttgataatttaataatttttttagaaaataatttaataagagtttctctactatcacattgtatttcgattcttccctagttttctatcctctaagtttcttcgaagatagattttcgggttagtttatctaattaatttgtcaataattataagaaaatagttaacattaaaaacacattattgtaagtatattttgcatatgaattaagaagaataaatgaagtttaggagcacaatgataaaagaaaacttatacaaaaggaatgacaaatttattgattcttattaaaatttaaagtacattgtgaagattttttatgtaaaaattccgtataagctcctttttttgtttctctctctaactcgtattattaattgtattataatttaaattaatttaaattttattatcagttgatcgttagtataaatttattgaaatgctatggatatgttaaaagtgagct

SEQ ID NO: 98312 - DNA, 586 bp, Cannabis sativa
cggaccatgcagcccgtgtgcatgctgaagcagggtagtttgcatggtgtccaattttcatgcatcttttgataaaaaatttgccaaaatttattagatttttatgtagatttcaaattttcaatttgaaaaattgaaatattagaataatttttttttaatttattttaaataatataagttgtttttattgatatttggaggtttagaaatttgaaaattaatttgtccagataaattattattataattagattttaaaatttgttaagttatttatatttataaattatttaattataaaattagatattttaatattgaaaatattttaaattaaatgataatattatccttttaatttgaagtattatattaaaatgatcttaaataacaaattaaataataataaatttaaaattaaccgagatattttttagatattctaacaataatatttttgaattcaaaaataggttattgtgtaaaatattcaatttttttttataaattataagttagaaaaatgatattttatattattttacttatcataaatttttaaatagtattttaaatatttaaa

SEQ ID NO: 98313 - DNA, 706 bp, Cannabis sativa
ctaggagaggtattaggcagtaattaaattagaaatcatcttcttcaattctccatcttcttcctcctttcccccaaattaaattgagagaattatatttacaacaagtagtatttattcgttactaactacaaatattattcagtgtaaatctcaatggctcaaaccatgttactaagctctacctgtgtcgctaactgtcaaccttacttcaaatccgagttcagagactcaaagttaacatattctctcaaactctcacttacaatcaactcacctcttcttccaaatctcccgtaatttctagtgtttttgctctcttcaaatcgaagaccaaagcatattgaagtagtatattaactcaaagtctaatagaatccttactactgtatattgaagtgggaccaaatcaaaaggttacattaagggaatcaaacattaacatttcaagaaaatcaaagtgcccactaacttcataaaaaaattaaataacattcactattaattctcctaaataataatttgctgatcatttagaaatcaaaccaaattacgcagtagtcctaatgagatcaatggatgtaataagaaccttattcaattgtatatgaattgcctcaacgactacaacaacattataaatgaaggtaaaacccataagctatgaaaagatcaaagctataaaaaaaacccaaaaaaataagac

SEQ ID NO: 98314 - DNA, 525 bp, Cannabis sativa
ctcacacacatggcagtaaggagaggagacagagtcattaccactttgctgagatgatatcttgttaagagatgattgtttataacaatgatttgccaagtgatgaacggatattttggaatacaaagcctattccacacaaccaaatcttgaagatcaatacttcaatagtatttctaagctttttcaaatgccaattgaaattctgcttagcattgaagctctagcagtttcgtccctttaagtaaatggtattgacccactttacccaaaggtaatccgaactagaggtgatagcccaaatatatttgcctataagagccatattacacttctttccctctttaaagtcaaggccgctaaaggttttgggaaggcaaacatgatcccagaaagttaagtgcaacttatttttatttcccttgacacttaagaaaattcttacaaaatttttcaatagttgcagtaatataacactgagtgaataagttgagcataactagcaaaagaaagatttttgctagc

SEQ ID NO: 98315 - DNA, 534 bp, Cannabis sativa
cttatactttcccctaactctctttttttgacctccacttgaacatgcatcagccattctacaaatacaagctacgaataattaattaatcatactattaacaaaagaggcatggatttcatttagtcaacagaggcacgaaaataccaggtcgtgtacgatcgttggatgccatgcacaaacagatgcaccctaatattatcgggagtctcgaagttcacattcaaacatctcatgcaagggtattgtcgctcaccatatttctacacaatataaaaagaggaaatttaaataaaagttgaaaaagtgtcctactccaccttgtcactccatttctaaaagggtaaagaatctatcccattcaggtttgtaatatacatatagtgcaatctattctcttaataatttcttctttttctcaaaactttgacaacacctccccacagttctcataagtaagaaaactattaacaagtatgccaacttacaagaacatgcaaggagatgatataccgaaatctttaacaaagaaac

SEQ ID NO: 98316 - DNA, 1980 bp, Cannabis sativa
agagagagagagagagagataggattttgaaaaataaaaggagtatttttaagtttaatgtaaagtgaacttatcttgaaaattttgaaatacataagtttaagaaattaatttcctctttatatatgcataaataatcaaaatttcttacaaattatttaataatttgatgtatcattaatattataaagaaatggtataaaagtttcacactaatttagagaaattgtccaatattaaagatgcacttaccaaataataatataccaaatttcacaagaaagatagacaattagacatacatatatttttcaggtcaccaaatgatcaaacctcaaaatgcggcgcctaaccaagccaacttctagttttaactttaaagccatgtcactatatttttcacttactacataccccaaaaatccatatgcctttttttattataaatatagattttgcaaacaaaacaaatatcaatgtactttgcgaaaaagaaaaagaaaaaaaagaagaaatatgaaatatgaatgtgttggcattttatgtatgaatgtgtgtccgtacagcaatgatagtattagtgatacctagtgtataacattgtatcacataattcacatccacatttactgtttttacattattaagtttcatatcaatattattattattttacgtaattggtcaaaacaaccggctagagctaattcattggcatttctctctatatggccatatatcttttgaagaaggcagtcagtccccatcgttttgacgagtctcaattcatatgtagaccccttattcagcgtctaattcctcaactttccctgtctagcaacttgaaaaatatcccaataaactttaaaaacaaagacttgtttatagataatatatatgaatcgttttgtacattaaaattttacattaccctctattaattatgactctagtaaatttctaagacattcaataattaaaacgaacacccccttagtgtttgtgattgttagactcctttcaattgctgtaatcacttagcttcacagttcaccccaaattccttttaaggattctcttgaatttctttcaagctctatactaatagaagaaaaactatataaaaagaaaaacgctagatatatatatttcttcgactaatttctctactttctattttaaaatacatcatcaaaattatatatatttttttatttcaatacatcaaattcttcaaaatatacattaccaaaatttatttttttaaaaaaatttaaatatattttattcatttcaaatatatcatactaatatatatacacaattcacatattttaaaatttggtggtaaggagcatgaataataactttgaaataaaatttaaaatgaaaaatgagttcagatcagcttctaatatagtgcgtttttattcttcaattatttttaaaaaattttattttaaaacatttgatataagtactttgaggagaggtatagttataagaggctttaaataatgaatcattcaaattaatgattttaaaaataaagttatcattattaataataattcaaaaacattaattatacatcataattaaaaatttaatttgtattttttggtcaaattaaataattacacatactatttgactttattataagaatcaaagatattattaataaaacttaacatcagaaatatatctgttttagatattttgaaaaactttaggtactttgatattttgtttttcaagatattttgacatatttaattattagttctttaaaattatgcacagcttgataaggttttctttttcaaaaaaaaaaaaaaatgatccttcaaactctgcatactaaattttgtgttaaaagtagctttcttttttttcaactccaataataataatatttaaagggaaatttaattttctatacttacatatacttaatattttttttctaaacacata

SEQ ID NO: 98317 - DNA, 1490 bp, Cannabis sativa
gccggagttgaattgttacgattcctccgacgaccaacgctattgcttccgacgtttcccatcaattgtttaaccctaagagagagacaaattcagaaattgttaagataacatcgaagattcgtgaaaattagttcttcgctttcgtcaaattggtcggtatggtttgaaaatatatatagtttattataaaagcaattgtaactcaaaacttttctcctgaattttctcgggaaacaaacagatcaaatttgataaattaattgactaattctttttttttaataaaaataaaataatataaaaaataaaatatgaaatgaaataaagaataatacatacctttaagggaataatttaatacaaaaaaaaatgaaaaataaaaattctgctatcttcaatggattcttctattctagtagagtttatctcaatagagaataataatattttttttgattgaaaaatgaaaatgagaattaattgttatttatttttaattttttagaaaaaaataaagaaaaaggatatattattatatatatataggtgttggtgatatcgagacaggacagctgtcagatgccacctaacccaactcacccactacaatcaccttctttgggcccatctactgccacgtggcattttcatccacgtggcattttcatccatgtgttttcgaggcatttttattaggcattttcatccatgcctcgccttcctcctcacctcggtgacaccctcaacttcaatattattattcaattttttttttttttttataattattattcttagtttttaatccaaaaaaattaaatttaaaaatataaaaaaaatacgttatttatattttaagttaaaaaatattatagtctaatttaattttaaaaaatttaatataaaataaatgtaattgagtaatcatggaataatagaataaaataataataaaaaaataataatattatataaattttaaacttcaatttcaatatccaaatacaattttaagttaaacattaaaatgtttaaactttaaatacatgactaataaatataatttatgtaatatattattacacttttattaaaaaaaaatatactaatcggtttaattcggtttattcacgttaattgagctgtttatattgtgaacacccctacaaagaaagaaagggagagttgatagagaaagagattaggttttcaagaaaagaaaaaaaaaataataaatttttcctaattttttaattaattttaaacatttaaatatataaaataatgtcgactaataaaattatgccacgtgtataatgtgacaaaacgattatgtagtttaaaaagttttgctctcaaaatttcaataagaagattaattgtgtcaaactccgtagtttaagaagtttgaccgtaaatttttttttttttttttaattcatgtgaaattttccttttgatcatgtaagggaaatttacatggtata

SEQ ID NO: 98318 - DNA, 1175 bp, Cannabis sativa
acagacacatcatttgaatcatcatcaatagcattatcagcaagtatgtcatcctctgcatctaagattttttattcttcatcttcatcgtcatcgatagaactatcgacatcaggaactgttagtagactttgagggacatccattgatgttggtggatgattagttcattgcacatttaacacccccaaatctacaaatagtgaagaatttgatgaatttgtttcacgtaccatatcgatgtcaatatcacttatgtcatcggtgtcattagtaattttgtcccaaagttggcgatgattaacatcttggacaactctccaattatgacctctaataaaatcatttataaagaaaacttgattggccagaatgtacggctcatctttgtaccattgactacttatactagtggtgttattttcagtgattactttttttcttcttagatatctttgttgaaccgtttctacttaaataatacaaccgaataagcaccactagaagacaaatgaaaattttctaaaagttcatcgtaatagtcaaaaccttgtgtccccttaacagacacaccactattttgagttaagggtttttttatctctttcgagtgtaacaaatcgaatcccattcactatacacgctggataagagtaaaccacaatatcagacccagatgctaaagctagaagttcatcaccatgctctaaagactcgagacgatttagttcatatatctgcatatagtaaaatattgtaatataaatttgagaataaaccaaaatattctaatagatatcttcaaagtccaaatgtgcaaggcaatataccttcttatgaaaccaattgggaaattctttctcatgtaaaagattatggccgttagaaacttcatccctatgtcgaatctcattaaagtgttccctaataaaacaaacaaattcttacaaatccatgtgttaattcaatatactaagtactaacgcagtacacattgattaacttactccatatacagatcgatttgagaataattatgcaatatgaaccactcagctttctttcgatcttcatcatccaatggaattatcgtttgttttccaagtggacgacattggtattcaaacatagttaggtgaagagggacaacaggtgtatccgcattacgatcaaga

SEQ ID NO: 98319 - DNA, 701 bp, Cannabis sativa
ctctctctctcttttctttttttccattttctttcttttcttcattttatattgggattagcatttttttttaaaaaaaataaaaataacatgtattaataataaaagtaatataattattaaaaatatatatatatattttatctttcaatatattaaatataatattaacttagtaaacaatggtattatttttttgttctatttttttaaaataattttttaatatcattttttaaaattattttcatatgaaaataatcgaatataaaaatattttaaataaatatatatcacattaattttataaaatagatataattatttcaaaaatacattaaaacaacaaaaattaaaaatacagttattcagaattttaacattttatttattgaaaatattgtctttaaatgttttcatgttattttttgttgtattgttgttaatttatagttattttttgttatttatatattatttttatgttactttcatgttttttttattattattttcatgttattttatagaatagcataaaaatattaaaatatatatatgaacgtaaaagtgatttttttttaaccaaaaatagtactttgtataaattaaaaaataaaatatattaccaagataaaatatcaaagcaaattttttaaagaagtatatgtttaattttttgtcgttacatatatttttga

SEQ ID NO: 98320 - DNA, 607 bp, Cannabis sativa
aaattatatgacaaaaacattaactaattagataagaataaacagtgaacattcatatatatatggaaagaaaaagcacctttgacatattcagcaacttgcttgacggtatctctctcgggatcaccagagatgaacataggtacaatttgaagccccactttttgttctacaaggaaatattgattataataacattatatagtaaaatgttataactatgtctaacatgcttatagagaaacaatatattttctcaaaagaaaaataggaggttcctaaaggcaaagggaggtgagaaaggagaagtcaagccttagatattcatctaaatcctaaagcatcataacatatgaatgaattgaacacagatacatagcattacaaatcgagaaacacatgatattcaactgtaaattcataaacttacttattttatcaatcacagcagctaactttattaactcatttaggcagatatcaggacagtgagaaaatccaaagtacaataacatccataaaccaaaaaatccttttcagtcactcacttctctcaatggttgataagattaaatgggcctctaatggcagcttttccaatagctag

SEQ ID NO: 98321 - DNA, 1026 bp, Cannabis sativa
cgagaaagtagggtgataaaaattgtggatggagaaagttatgattgagttgctggacagggaagtgtgatgggatacaaaatcagatacaataatgatagaaaataatttgagaaaataatgagaaatgaatataaaaaggcaaaaagataaagactttgatattaagaaaataagagtgtttttttggcatttttttttaaaaaaattgtattttcgaagaactaaaaataatttttgttgtttttaaaatacatgatgcatttagttaatgctttctaaaaattgtttttaggtttttttggtttttttttccaacaaaaaacaatatctaggagtattctttagataatttatatctaggaattatagctattctttagataaataaaatttatatctaggagttaaaagattttctatagagttagcattagaaaaatactctaacatcttattaaattatgttgcttgtattagagtataaattaccaaacatatcacaatccgaaggtttaaataatctcaaacctatgatactaggattgggaagtcttgttaagtctattgaatagacttattattaaaatttcccttcgtaatacaaaattttttgttacttcatatgaatggttttgcttcttagttccttattctgactatccaatacatgtttaaactaatgatggatttttaccacaagtgtcttccaagtcataacagggtgagttccttgaaattctctcactacgacaaggtatcgtgactttctatctaagaatataagtggtattgtcgtcatcggttgtattaatataacagaggcaatgggaccatcttatatagaataagatgataaaacactttggaataaacaaatagtatctcatctacttttctactttataatcagatttagtcatatttttaaaaagtagtatttgtagaaacaaacacttttttatgttaatgaccataggatgatccacccctaatcacttagaatagctatcaaatatgcaaacc

SEQ ID NO: 98322 - DNA, 545 bp, Cannabis sativa
  modified_base (309)..(310): a, c, t, g, unknown or other
agaaagttatattgagattttataaacgtataacattgactctcataattttttttttttttaattatgtgtgctcaatttgcaaccattataaatctctacaaattaatacttctttttatataaaaaagagtaaatattatattttagattttgtgttttaaaaaatagggtttttattttatatttgataaaaaagagagtgtaacttttgtaaaattctctaaaatagtattaccttataaaaaagtaaactctataacatggctgatattttttaaaagcaaattattttattattattattannattattattattattatataataacaacaacctgattttttctaaaaatctatctaaacaaaaaagaaagaaagaaaagcaatatttatataataatgtctttatatgcataacaaactataaaaataatcaccataaaagtaattattttgtgaggtccatataaataaattaataattaaacaaaaaaaacttaaatgtctacaaataattttttaaaatcagttaactattg

SEQ ID NO: 98323 - DNA, 1030 bp, Cannabis sativa
  modified_base (44)..(47): a, c, t, g, unknown or other
ccgctcttccgatcttgttacatattattagtttattacacatnnnnaatctatatattatattattataaataatataacagggatcacaagttattctagagagaaataacattatcttactagaacaccaaaactttgcatatatcaagtaaatttttttgtcctataaatttctattccaagtcctatggcgatgattgaggcttatgagaagtgggatacaacaaaccttttgagtttttggagaaaatttgaatcttggacagcttgagattataacaattggtcttatatttagagacaaaataaaaaatcatatttggaagttttttttggacaaaaaactacttaatttgttatacactatacaacacactgtcaatctagatatcatatttagacatcttcaattgctttaaacatttcaaaaaataaataaataaataaacaacaacaaaaattgctttaagactttggacccaaaaatgtaattttattaattacctacaacttagaaaaagtcaaatttcacatctttattatgtgaaatggttaagtattgtgtagcactttctgcaacacttaaccaactataacggttgcttgaaaattcagaaacattaaaagacatttaaacatatttttcaacacagggctccatttttgacacatgaaatatgttggttgcttgaaaatggaaacatatttagccaacaataacacatgaaatatggttgcttgaaatccatatttaacttcctttatttctactattttaacagacatttcacttatgagcattgctattagtattagcggagtctaaacctttctacattttaagaagattgaaataattttaataatataatattaaataaaaataatagctaaaagttgaactttctataaaattaattcgcaaaataaacaaatttttttataaagtggtcagtcaaaaatttaaaaaagaaaacgttttcacaaataattacttaaataaaagaataatttgcagtataaatac

SEQ ID NO: 98324 - DNA, 554 bp, Cannabis sativa
taaatgaaaatctcctcgagctacgatccataaacagttggacagactgaaagattcagcaggatgttggtggagtacttgcgatattttttcatcactaaccataagaattggtcgcagtttctagatttatcttaattttgtttcaactctcataagattttttttcatcaaacaagagccaatttgaagttgtgaatggaaaacaaccactgttaccccacacggtggatgaatactacggatggaattcgtaggccttcaattttacaaacaactggaagaagaacacagagattgcccaagcatatttagagaaaaccttatttagaatgaagaagtgggcatatcaaaaaccccgaccgttggagttcaagacaggtgacttagtgttgatcaagctacgaccagaacaaatgagattctgaggggtcaagaacatcgaactcgtctgcaaatatgaaggccctattccagtcatctccaaatatgactagcctcctacaaagttgaactatctacataggtgaagatacactcggtccttcacgtca

SEQ ID NO: 98325 - DNA, 1343 bp, Cannabis sativa
agcagtatggtctcaactagtatccgaccatgggtctatattccaacagtgtaatatatattcatagaaacaaaatgggcaatcaacctaatgaagagattgtggtacaacaagggtagtccgataggtgtcaaatagtggtacaatggtccctcattaaatgattattttttattatgtttgaaatgagatgattaatgcccgatagtggtacgattgtatctcaataaatgtttattttattatgttgaaatggggctagggtagtctgatatgtgcccgatagtggcacgatgttctctcattaaattcttgttttattatgtttaaaacgggatgattaatttcagataggtgtccgatagtggtacgatagtaccccaataaatgcttcttttattatgttggaataagacgagggtagtctgatatgtgcctgatagtggtacgatagttcgtcattaaatgcatattttattatgtttgaaatggaacgattaatgtctgataggttcctgatagtggtattgtcctctttaaatgcttattttatgatgtttgaaattagacgattgaggtacgataaaccgatactaataaatacatagttcatgataaacacgttttttcatgagtagaataaaagacaacattgtttccccccccaaaaaatacatggttcatgataagttttggtagaataaatctacaccccatccttacctaaacagcgacacgctgtcaccatttacattatcaaatggtaggtctagaatgctttaaatgctttattgcgtacattcagcgatccccactacattagtaaataaacaacaatttagtaaattatggtcaatatttatggaaattttaattaagttacttagagaacgttgtgtcataaaagcacaattattatctcgattttgtctatggtacgacctttttatcagggagttcctaagcgaatgatagatgagctttttgctcttctaagagatggtatctggacacttgttctctctactccaaatatgcacatcattgacaataagtgggtgcatagaataaaactcaagacagatggtactattgataagttcaagtctagaattgtagccaaaggctatccgcagaccccaggtgttgattatgctgatagtttcagcccagttttgaagccagcaactgtttgaatggtcctcagtatatcggcgtcctccaattgggatgttaggaaacttgatgtgagtaatgcttttcttaatggcacactcaatgatacagtataaatgagacaacctcaaggttttatagatactgaaaaacctgatcatgtgtgc

SEQ ID NO: 98326 - DNA, 627 bp, Cannabis sativa
aatgataataataaaagtaattttcaaatcaattaaaagtaataaaactaaatcatcatctcacctagatactattgacgcaaaattacactgagagaagtcgatcatagaatttgagtggaatggaaaaaaatagacactcacgtacagagaagtcgatcatgatatttgagtatagtggaacaaatagagagacgagagtgtcgattttagggttcgaaaaagaatgtgctttgcgtattaaataccaacatgggtttttggggatttaactcgttaacctcagcaaaaaaaaattgttatttttgaataaattttttttttaaaaaaaatcacccaataatttctcataaactaacagtaaattttacctcttatgatctgcatcatatgttgatcgacgactatgtggaggccatgatatgttaataatacaattaaggaaaagactaatgattgaatgaaagactttggaaagcaactaagattttaggctagagcatcaaaagagaggaaaactaattctgagtcaagaatattacatgaataaaataattgagaaattgagggactcatctagagatggaaatttataccgcggggatgggtaaccgcggggatccgccc

SEQ ID NO: 98327 - DNA, 1336 bp, Cannabis sativa
acacttgtgttggtctgtagggtcagtcatcaatttaggaagcagccagagtgacatacttgtgtataaaagccattactctgtgggtgtaggacccaatgaagacttgaagcgggaacgttccatatttcggcatattcctcatcgagaatagggcaggaatcggcggaaaattctctaatgtaaaaataaagtttattataaaaaatctaaatgaataaaactattaaactaaataaaaatttaaatttacacgttatttattattcaataatattaattatcatccaaaacatactttaaaaatttataaaaaaattatattaatatactaaaagaatataaacataaattataaaatataaatattattaaaaaaataattaaaatattaaacggttcttgtcaaggtggggagtatcatccccgtcccttcctatttaatattcgaggacaaaaaatgatcctcgtccccgctcgtttttttttttttttgaaagaatacctcaagttcataaactaagaaagaaagatgggaacaacatgagggagtccctccccttaaatagtactagcctcgttccccatttagatggggaattgccacccattaggggcggtcccgtggcccttatctccatggaaaaaatgtgtatccctaattagtgccaaaaagataaaatgtattattattattatttaaatatgtttttttttaataaatcatgtaattttattaataacaatcaattaaaataatagcctgcaacccaatcgagaaatctcccgaattgaaaacacgaccaggattagaatcagaaaaacgagccacccaattggctatctgattcccatatcgcgcttggcaaaagaaactaatataaaattagatgaaaatgaatgtagcatcacagttaactttaagaacacatatattcaatttcttctactgcttagaagacacaacagtataaaatgtagcagtaggttcattcaacccattaacttgagcactcaattactgtgtaatgtatataattggatcattaacaactccttcaatcgcagagaatttgttattcccaaccactaacaatgatttgatagtgagccatcgaagaacaaagaagatcactaactaacaaagaaataaaataaaataaaatcatgttacagagacaaaactaattggagtaacctaaacaaaaaagacactcaaaatcatatcacaaaaacaagattaatcgcagtagtaaaaatctaatcacattaacaaaactaaaattctcgaccaacccacgcctaagcccaaaaagagccggtgggctgactagaa

SEQ ID NO: 98328 - DNA, 805 bp, Cannabis sativa
acaatcaaggtgccttcattaaacgtaggcttcttgctcataatattctgatcttgcaggatttgttgaaaggatatacccgaaagaacttatctccaaggtgtatcttaaagattgacttatgcaaagcatacgacacggtggactggaactttgttgctgatcttttaaaggggctttgctttccatccaagttcattatgtggattcaaagttgtcttcatggagctacttactcccttatgttgaatggaagagtccagggctcttttaaaggagagaagggtcttcgtcaaggagatcctatgtctccgctcctctttgtgctcataatggaatatttgactagattactcatccaaaagacgaaggagaagggatatggttgccatcctctatgtaaatctctaggccttgtcaacttgttttttgcggatgatctaattatcttttgcaggggtaatgagaaatctgttcatcttgttaacgaggctttccaacggtttagtgaagctacaggtttaatggccgataaaaccaagttcacggtgtactttggaggaattcagaatgatggcaaacaaaagctcctgagcatccttcaaatggatgagggaagctttcccctcaaataccttggagtttatcttcggccaactaaatggagggtttcagattatgaaataattttagacaaagtccataaacacttgcataattaggctagcaggaatctctcatttgcaggtagagctcagttgatccattcggtcctccttggagttcaaaactactggatgaatct

SEQ ID NO: 98329 - DNA, 3697 bp, Cannabis sativa
gttatcctgagaatcaatctatcaatctcaaaatcatcattacactgttaaaataaaataaacatattaaacttggacagcagaaacattatcaccatactaccttgagacggtcaaatacaaccaaacatttatcttcgttgccattcattgtgtaaccatccatcatggtatggtaaatgtcaattgaagcatctatgccagcttcttccatctcccgcactagtgcttccgctctatccatattgtgtgtttgactgaaatatatttagtacataaacataaatgacgagttcagagtgtagaggggaatcaaccaggctaaacaataatacttcaagattagtagaaaccaacatgatctggaatagacttgatagctagcttagcttacagtgttttaattttgggaattcagctatttgtatacacagtatctaattaaaacaatagaacattggttctttccaaaaagaaaaaactaattaaaataataaaatgaaatatacttgagaatacccaccaattcgcatatataatgtttccataaattatagcatttaaagttgtgtgcgtctctttggcctccttgaaccagtactctgcagctctttcaaaaaaagaaaaggaaaatcaaattaggtaacgtgaccaagttaatcaaaaccttacacgtctaaaaaaaaagcataaattccatagttttacacttgtaattactataataaacttttaaaagtaaaatgcaatttcaaagtcactagcaagatactatgatggcagctaacgacataaaactttaacaactaaattagaatcacatgcatgctaaatgttagaattttggataaggtgaatggagtttcatctcaaaaccaattggcaatgaaaggagtagtccattcattccatcggttttttttgggtaacatgttagaatttgggataaagtgaatggggttctatctcaaaaccaattgacaatgagaggagtagtccattcatcttatatattctattatcttttcacacattaacaatgtggaactctctaacactaaatatgcatcatacccccaccaaaaaaaaaagactaccattgccaactgctgttagaaaaagataatgtcaccataaaaaccactaaaggaatcagaaagcaagtataaaatcgactcatccaaaatgtatgaggttcacttactcagaattgcccacttttgcaaatccgctcactattatactataggtcaccaagctcatctcaatgccctcctctttcatttttctaacacaagataatgcttcttccatgtctctaccaactgcataagcgtgaataaggctgcatgtaatacaaattcttcaatgtctgcagataatctcaaacacaatcctaaaacccacatagaaaccaataaagtaggagttaaatatacttcatcatgaatatccattttcatttctttatgaaaaagtatttaactttggacacaggtgagacagaaacttaaatgtactagcaacttaaaactcgtagattttagtgcatttgcttctacagtaagatgttaggatttttttatttttttcaaaataattccaggtcaatggcatgggtgatagaaagaaaattttatgcaatgctgccattacaaagtcgctagcaagaaactatgatgacagctcacaaattaatctttagcaactaaactagtaatcctatagcatgtttgatatgaagtatgtatcaattatcataccaaaaaaatcatggttaaaactagtagaataaagaactatgatggcatagcccttcaaaaaggcataacaatagttaacgagtgtatgaaccataaattagaactcatccggagaagcttcttctgtgcaaaacttataataatttaaggtacggagaaacatccaatactgtcaatgcacttcatattacttctcacttcaaaattcaggacaaattatgaaaattattactcttaagggtagccaaaaatgaacgattctagaaaatctctattgaattataaatacaaaatgcactaccagacgttaataccttgaatagacatgagatgatggctctattccccttgctcgcatactctcaaaggtttcgcgcgcatgatgcatgtctcctctccttgcatagtactttaccatcaggccatactcccttctagaaggctagtacatagtatatacaattcatagcaaacagaggaatcatcattctttttcagaaacatggacagaagcatttggcaaagattttagcttttcccagcccaaagctacagatcaacacgtcattgcatgtacagcttattcaagtaataagattgaacacaaagaatgaaaatagtagataccattagtcaaaatctatttttttttttctcatccaaaatcctaagcaaatagcattagcaataaattaacgagtgttattaatgaagtcttaccttcttaattctctgaaaagactcaacaactgccttccaattctctggttcagtttccaccaccttcttaaactccatacgcgagctctccctctcttcatgccacttagtacgatactcaactccatcgtgtccatgaacccacctctccctctcctcccttttccctttaagcctccttccatcatccaacttcacagtcaagattctcccgtggaactccacaccatcaaattctaccgccttcaacgcggagttggttgccgtcgagccctcgtacaacacaaaaccaaaccccgcatttctctccgtatgctcatgagccttaatcaaaatcacatcctttatcggcccaaattgcctaaaaaactcggacacatcgtttttcttaatccagctgggcaaattgcccacgaaaatcttcccctcttgccggaattctactctggacgagtctgaattcccttcgcccccgttctcttcgtcctcttcttcctcgctctcctccacagtttgtaaatgactagtaggagctggtgtttgcggaggtggaggaggaggcggaggtggagagagcttgctggtaagccagagcttattagtgacagagtgtgaattatcaacactcttggtcggaccgcgaccgcgggttacgaagttcttgagcgggttagatgggatttcgggggcgggtttcggggaaggagaggatgttttgacggttttggggcggcggaggttgccagagagaggagataatgagttggtggagttgtcggaggcaggtgacggaggcggtggagatttgagggataagggaagaaatttggtaggcttaatggatgttgtgaggtgtttgccggcggtggcagtggcggtgaaggagatgggtttgttgggatagtgaggggttgtaagaggaacatccattatccgttacgggctgagtgttgtcccagtgtgtgcgtggtaataatggaattttttaccaacatacatggcccaacaacaaaataccacgtgttccaatagcaacacgccacatggcctaatcaacacctgcaagggttttatacatatactgctttaattaagtcatgaatatataataagttaattactaattttttctcccgaactttaacatgtactaaatcatgtcttttggacttttttggctgttaaaaattcccccggaactattgagattgtta

SEQ ID NO: 98330 - DNA, 1367 bp, Cannabis sativa
  modified_base (1233)..(1234): a, c, t, g, unknown or other
tttttttttttttttttcaatgcaaacatttctcatttgagctttggtaaatttcagaaagagatgctctgcccagtcaccatttgctcaaaattaagtcattttccaaactttccaaattgcccatacagaaattcagtaatgattttgaagctgggggctacaaatggtttgttcattgacttttttagcgactttagttttgttctccttagtagtttaacattattacacactgaaatttatcgcaatgtataggaacttttctatatacccaactggggacaaaagcaaagatggagaagaccatatatctgtgtacttggaaatagccgaaacaagtactctccctactggttgggaagttaatgctatctttaatttctttgtatttgatcaaattcgtgacaaatatgttggtccacaaggtgagttttttcatactctttcaagtacttcgtttgaatatttttatcctctcaacctctttcctattggctcctcctgagttattacagatgctatagtaaggcgattccattgtatgaagaaacaatggggcattgtcaaattcattgatctcgaaacatttaacaatccttacaatggttaccttgtcaatgacacatgtagtttaggcgttgaagttttcacagtcaaaactaattcgaaagcagagtgtttatcattgataaatagtccgataactcggaagattagtttgagtttttctaatgtttcaaaaccaacaagcagaattcaaagtgggttatttcctgcaggagactataaatggtatgttgatgagtagtaccaattagatagatgaacattcatgtatgtcatgttttgatttgatctattttttgttttgttttcttgttggctgctctctcaggagagtgttgttctatgcaaatggatgccaattagaaggcaataaaaccaacaatattgtttcgctattccttgttgtggatgcttcaacgcttgctgctgacaccaaaatacttgtgcattacacctttcgagtgcatgacaaaagaaatggaaaccattttgaacgaagtggtgagtaacataaccatatgcttaataagacttaaattaattaattttctgcttgtagtttcttgttcttgtttagatattataaagggtaaatattattttgaactctttgttttgcaaaagttaccgattggtctatgtgttttgttaaatgataaaatnnaccttgtattttctaaaatgataaaaataggaacctgaccttaatttttaacaattttttttttatatcaccaacttgaagttaattcttaatacgaacacatacagaaaatgtaaacagttttgtcatagca

SEQ ID NO: 98331 - DNA, 908 bp, Cannabis sativa
aacaatcataagacgtcacttataaaaagtattaagtaccagtggtacacaataacaatacatggatgcctaacaccacgatgaaatattaccttataattagttagtaatatatattaaataaataaataggactcaatattaagttacactaatagtgatattacacaatacgaaagtactagataccataaataccttttagtatttgtcctaagataataaaaacgagcattgctattaagtattagtggtgtctagcacacctctagacatatcgtcttgtgattagctagcgatatcccttaaaaattatattatattatattctctaattggactaataataatattgacacatacaaaattattagacactactaatattctttagcatttctcaataaaaaccaacaccctgtaattattttttttacaagtggcagtaatatatagagtgtaaccccagtttggagcctggtagttgtacttttgaccatctaaaaaatcaactttaacgtatatataaaacatatatatataaaaatatttgttctattacaattacaaataataacagtttttggttttggtgaaacttacctattatttaatttatacattatatatatgtatgtatatgggtattttttgatgtatataatctgcatggccattaaaggagagaaagggatgaaactgaaacatgatccgtttctttggggcaaaaatccaaaaaaccaaaagctgaaatcttacctaagctatacactacaatacaacacactacaaatacatttatacttaaatgtaaaagtcacaccaaaatattttaagaaaattatcccatatattattttttaattttttttttaaatttacttactccaataatttttatatgggtt

SEQ ID NO: 98332 - DNA, 2050 bp, Cannabis sativa
aatataaatattaatttttttaaatatttatataaattttttaataatttaaaaataatatataattttattgtcttattgttttttttttccaatcaatttaagtaactattatttaattaataatattctaaattttgaaaatttatgtataataatttaaaattatacatttttactaattttaatgaatgagtttttgataaaaaaaatgtataaataaatgtgtgataattatttcttttaaattcttattaaatttaaaatatatcaataaaattaaaattagaaaatgaaaaaaaatctcaccggcatgggattatttatcccaccatgctggatgagataatcctagacagatgaggttagctggattagttatccagacttctaacatgcccaaacattgaattggatacattagcctgtctaatccaatccaatcctgtgtactaaacggactctaagtgaaaacaacagtacaatgtgaagcttgccgcaaaaataaataaataaagagtagtatatatatgaaactgcaatataagatttactttaagataattattgtaatatatatgttagattaatatgaatttaaaggtatatatatatgaaagaaaaatcttatatgaatttatggattgaacatatataaaataaataattgagattgtgcacttgataggagcttggagagtggagaccaataatactctacatttatatacgtgacacattttatcaaatctcttctactattacattttagaatatttggggaaaataattaaattaggtaactcagtaaatggtgaccattaaccttagaatattttgtcaataaataaatccactttgatatattaaattaattaaaataataagaatttgatttaatattactacaaataaatattctaacaagttaaagattagttattatacaaaacaagacaatatgatcattaaaatattaaggaaatggtttgtcaaaaaaaaaaaaaggaaatggaatggactcaacttgccttattttgtataatttaatgatattgtggtttttgattgaggaacatgaagaaattgttacatattagaaaataaatatttggtgctgtttttagtgaatgacattctctattcaaaaaaaataaacaacaagtagtttcgttaagtaaaagcaaaatttgacaaaatcattaaacaaaaaacgacatgaagtacatttataagtttccacaagaaacgacattaattggttacatgcataattatatatatatatatactaaatatattcttttgcatatacaataacatatatgtatattattataataacacaggtgagagtgccatcatggactgatcgaattttgttcaagatagaagatatgaatcatgatatggatgcaactttgcactcttacgaatcaatggacgatatatacggctctgatcacaaacctgtcaaagctcacctctgcttaagaagaagatcataaatacataataactatatacattcttataacccaccacaccaatatatatatttacttatttaattacaatatcatctcttaattcattaaatatttttttttttataagggtgtgtttggaaagccacaatgtaattggatttgtgtgtaattggaagtaattatacaatttggcatgtttgtttgaccatgtaattacactgtaattagaagtaaatgtaattacactgtgtaattactaaaaactttccatattaaacattagttattaaaaaaatattattttccttgtaattactaactattttgccaaacaagatattagtaattcatatgtaattaccacttcatatccaaacacaccttgcattttaaaatatagtgtaattactacaccgtgtaattactaccttaggtgtggaagtaactgtgtaattactaggtatggtaattactagggtggtaattacatagtttagtaattacattatatatttaaaatgcaaaaggtgtttggatataaggtggtaattacatatgaa

SEQ ID NO: 98333 - DNA, 1416 bp, Cannabis sativa
  modified_base (568)..(572): a, c, t, g, unknown or other
agtacaaaaatcaaaactataatgtgtacgtgtataataatttatcctatttaaaatgaaaagatagattttcattattttggataagtgttcttattttgaataatagttttgactgaattttttaaatttatatatatatattattttgtggtctcaaatttagacacgtgcattattgtcagtctttttttaaaaaaaaaaaatgattttctgggatttaattgaagaaatgtcattagtttgctggccttctaatattatattattttagattcaatcggatgagatagaattattgaaatgaaacatttgtgggacattcctccatctcctggattatcctataatacattataggataatatgaataaatatatattaatatgacttttatttccatataaataatttatatacatacatgtagtgtgatcatttttcatattactaaaggaaaaatgtgctccaatttcaagtctattcccatgatcggtactcctcattattttcttataatactattgtgtgtatttttatttgaaactgataatatatatatatatannnnnacatatatatatatatatatgcagatgttagtcctctgttggccaagtgtgatgatccaaaaatgggtgaagatggaggtgttattgaagttgttaggcaattaaatcaagcttgtactcaagctggctttttctatgtggtatatactcttacctataatatatttatttatatatatttatataattcttaataggtaggattaggattgtgcataaatcgatcgaattcaatgaattaattgttaaatattaaatatctaattgaatcggattggatgttggatggaatgtccaaaaattaaattctaacatctaattaaactaattattattttcatttagtttcgattttatctaaagaatattatgtctaaaatattagataaactcaaattaaactaataaatgtatataaaatacatccaatgtggacaaaaccaatttaaggaatattgaattgattggatgactgaaattaatgtgattggatcaaatagtataaatatttgatcggatttggatatacctaaaaacatgagatgtagtctaataaatattagccatgcataaataggtaatattaaaaaaatttaaatttttattattcctaattgaatcaaaatttaatggtttaatatcaaattaatatttataattaattttatttaatcactaattaaatataattatattgagcagaaggagcatggtatacctatttctttattacaagaagtaaaggaaaaaacccacaaattttttgaacttccatatgaagaaaaatcaaagatcaagctcaatgcagcagctggttacaggtctattttatatttatataaat

SEQ ID NO: 98334 - DNA, 816 bp, Cannabis sativa
  modified_base (47)..(49): a, c, t, g, unknown or other
attagcaacgagctgcacagtacttttaaaaatcacgtaatacgccnnngttagttagggtgttacacaggatgccttgtttcaacaaagacattagtgttatgagggatctaagggtcatcaagaattgagacattcacccaattcgcgatagttttttgagctcccaagtatatcaggcttttggcttccaagatgcttcgccaaataaagcttgggttatctcccaactcagctgagaataaactaccatgtgctttgccttgtaaatcctactgaccagcgaactgtcattcaccaaaagccgccagaattacttccctagaagagccaaattaaagtctctcaaacatctgaaacccaatctccctgcaagcttatgacgacacaacctatcccaactcatcgagtttatacccttcccactactagaatccgaatgccaccaaaacttagccataagttgttctaactccttacaagtttccaaaggcaaaagaaaaatattcatggcataatttggcaaggcttgagctatagatttcgacaagacctccttccccgcatgagacaataaacggccctcccaaccttaaatcctcttacgaagcctgtccttaaaaaacccgagaatatgattcttgttccgcccaaccgaacatggaaggcccagatagtacccattttcaacagcttcatagatttctaacgaagcacgtcaacgtgacactctaccgctgagttatatcccttcccttgtcccccatcgagaaatagaactgactaatcctaaggcaaagggtcgagaaactcaac

SEQ ID NO: 98335 - DNA, 1092 bp, Cannabis sativa
  modified_base (57)..(63): a, c, t, g, unknown or other
aactcaatttttctgctgagatggtagaccagcaatctccacaactcttagaggagnnnnnnngtcagaacctaaatcaggaacatgggacctattcttccaaaattcaagaagatcaaaagacaaagggagtaaaacagaataagccttcattgcattccttgctgcagaagtcattttggcagtcctcaaataattataacgaaatctaatcccctcattcaaatcaagacggccaaaaacccaatggctttctttcctaagatttattatgaataagacatgatcggattcataccaaggcttagaacacagaatccgtagacctcttatgtaatgctctattgggtgagcatcatgtatgtgagacatctttattttcattgccttggctttgcagaatttgtggtataacgattgaatgtaatcatcgaaaaggcagtccgttgcaaaattcagtgtaacagcagaagaatatttctcttttttcccaaggtaatagatgatagtgttcatatgctgaaacaaaacaacaaagaaacacaaaaagaaaaagttaaaaaatattacaaaaatttaataacagtaactaaactaaaaaataatgataaaacaactataaaaagttttaaaaggaaaaagaaattttactgagtcattgataaacatgtcacaacaagccaaatgataaaactaggttttatcttaaatataatcaacacctaatctaaacctaggggaaaatttcttcgcaccatcctcataacaattgtaagccctaaatcaataaaaaaaacaacaaaaaaataatattgaattcaaataattacaaaataagaacagaattcaaacaaataaaaaaatacaaagcaaaataaagaaaataatcacctaggatgttttagcaaaccttcgccaatcgaagcatcaaactttgccctaatttcaagagagacgggatcaacaaatatatcgttaagagtgtaaagacccttcacataagtaaccatcttaaaatccctctcatctcctccagattgagaacctgatgacattacctccattggagtgctgctcacatcagccgaccca

SEQ ID NO: 98336 - DNA, 624 bp, Cannabis sativa
aaaaaataaaataaaatgagcaatgtggtatatactttagctgcatactatatttggtacaactattattgttggaatgaaaaaagaaaaaggttaaatttgtatgatgtacgttggagtcttaggaccgaacaaaagtataattttattgatgttattaattaatcgtagtgttgatttatagagttaatagttaaataatttatactgtatcaattttcattctggtatttaagaaacaaaacataaaataaattgcaagagaatgtatcttttattgctaatatgacaaaccattttcaaaagatgaagaatagatgaaaacatgctcatgcatacatccctttcaaacaaaagaaaagggttttacaaaatggtttattaggcaaaggtttataattttactgtcaatagaatttttgacaaaaatacggtcttcttataaaataaccgtaaagtaacaaaataaaacagaataattaaaacaataatggaacaactaaaaaataatcgtgaaaacttagtacagtacacagtataaaacttacataaaaaaaaaaaaaaaattgcctgaaatttcaaaatgtggtataaaaacctaccaaaaaaaaacaaaaaaaaaaa

SEQ ID NO: 98337 - DNA, 905 bp, Cannabis sativa
  modified_base (831)..(850): a, c, t, g, unknown or other
aataactatattttctggtgtcaggatgatcttcctcgcatgcatgccatcatctagcgagataaacgcctcgccgtttgttatcttgactcgccaaactatctacactcatgttgtatatcgtgtaatgtacgctaagtttttttagtgttattgtttctcttccatacagcgaggttgaggcctcgtcatgcacacttgcactcacgtggtacctcgtcaatacatactctgctaattatgtttctttctcgcagaaggctattcagctagccgagttataaacatactctgcgaattatgttgccaatgagttgttccatgccaagtgtactttcgtttgcgtgtttgagtttttcgttcttcctagtgcgacacgtgtcttcctctgatgtgcttatcgaatttcgggtataacacttttagtcataagttttgttgagactaaaagtaaaaatttctgtagtgtctatacttcctccccaatatctttcaagtaggcaatgtaaccgctcttcgcgcgactaatttaatttcttttagtattataataaaaaataactatttattaatttaataaacaattacttaaaaatataattcttatatataataaaattaaaaatatattatctaattcccatacttattataattttttttattaaaaaataaatttaattttattaattattatttggagttatttattaaaatatttaaaatttattagatgtagtatttttaattattttgtcaaaaaaatttgttgtcataaaaataagggtaaataccattttggactccgtattttgcaaaagttatcaattnnnnnnnnnnnnnnnnnnnntgacaaaatggaccctatattttctaaaatcttacaaataggatcctgaactgat

SEQ ID NO: 98338 - DNA, 866 bp, Cannabis sativa
actttactatgcatctttttaaacggtttaatataggaagattttattttaaagagtgtatcgatgctctcttatttatttcagtattcgaaataattttttaatttaatttttttcatggtagtgtacgttgtacttattaagatattttataaaattttaacacgctaaaaataaggttcaaacaatctgttttatacgtcatttatatttattttatacgtgtgtaaaataaattatttgaacatgctttgtatattgtaaattattcagaattttttaatatgatgtcttaaataattataacgtacgcgactatgaaaaaaattgaactaaattttttttagatgttgaaataaataaaaatgtattagcatattttttttaggaggtgtattatagaagcacccattaatatatattttctttttaattaaactttattaatattttgaagcttttattatttgacttttttattaaaaaggaaaaaaaaattatgtagatagatacagcgttttaaagagtttttcaaatttgtttgattgttggaatttaattattagaagtaaaaaatagggtatagtttaattaccccatttgaaatgatcatccttagggatgcatactattcctatggggatgggctctgcacggacaagatcattttttgtccccacctaaatggataatgagatggggatagagatcatttttgtccttgaatgttaaacgaggcgggaattggaatgacaccatgccttaatggggacatgtttaatattttttttttatctttttaataatattttataatttttaatttatgtttgtattttttagtattgtagtattcttttttataa

SEQ ID NO: 98339 - DNA, 894 bp, Cannabis sativa
aatacataaataaataaataaacatgattagttattaaatctaaatttaaataattaaataatatgtatttacctgattccatagcttgggccacagattatatctgttactctcagtgttttggttccactttcaatcgatatacaatacccaccaactgaagtaaaataaattaaattgcatattaattactttatttcaattaataaaattgtatattaattacttaattacttaattttataatttgagtactatataaatgactttactcaataattcaatcctttcttttatttaattaaccaataatcactttatttctttaaactattttcaaaaataaaaattaaattaaattaattgttcaaaaaaaaaaaagtaacactcaaattaagaatatttaatattcagcaaaaaaaaaaaaagaatattaaatattaataaatctcgaccaaaaaaatttaaacatgattttattgaattttataattatattattgtagtttaaattttaaataaatatctttatgaaagaaaatagatgagaaactaggtataatataagtataaatacataatatttaaatatatatattatgtttataaaagtacatatttattcaaaaaaaaaaaaaacaattacaatatgacatatattaaataaggataaaagaaaattaaaagaaaataagcaaatattttactaacctgttctaatagcagaattaaagatttcaatatcttcagtatgcgagatgtaaattccattagtagtattacttttttgtaatgaagttacagatagataagaagcttttacgtttttacagtgagtaaaagaaatatgatttttttgaacgtttcgtactgaaatatctctcactgtcaaa

SEQ ID NO: 98340 - DNA, 772 bp, Cannabis sativa
catgatgatcatatcatccacgtagagcaataagaacactgctgtagattgctccagattcttgaaatataagcagtgatcgtatatatactgataatttcaactcgatttgttgcatatatgtatcgaatctcctatttcattgtcttagggactatttcaaactatagagggatatgttaagcttgcacactaatttaacttatttcccttctacctgaaatccaggtggttgcttcatgtagatctcttcatccaagaatctatttaaaaaagcagtcttaacatctagctgttcaacctcgaactccaattgagctaccaaagataacattaaccttattgtcttgtactttaccacatgtgagaagaattctgtgtagtttataccttccacctgagtaaaactcttagccactagcctagttttgaacctcattgattcattattattgattccctctttcaccttgagaatcaatttgcactccataatcttcttattctctggctttggcacaactatccaagtcttattctttcggagtgaatccatctcctcatccatggcctaaagccatttagacttgttttgacttgaaattgcctcttcatagcttctgggctctttaattttagtttgttggattgctgtcagtgtaaatactattatgtctacttctgcgaaccttgctgaaggatgaatctccgagccaactaataaccttccaaacttgcctgttcgaaacccttctagcacctttatttggcc

SEQ ID NO: 98341 - DNA, 2035 bp, Cannabis sativa
tgggcaaaatattgtgaacttactttgggagccgggttacccctagtgcccaataactagactaagccagagtaagagcgagattatgagtatatcctggtgttgttgaaaattgtgccccactaattttaggtgcaacaaggagagtaactctcagaaattacgatcattgtgtataccctggtccaccaatcgggtaatatcctccaaaagccggtatttgtttcttctaagttgatgtacttttgaacgctcttctaaaagtcttgaaggctagtggcccctccttattggagctcattctagaaagaagttctcgtctagattctgacttgaagtaacgacaactgctgcccatggtcaacttttttagtattggaagcttcttccttaaatattttaatgaagttttttagattctgaatcgataattgtttgatgttagttaaagcactgacttcaaggtttactttcctggccgctacaaattgtctttgaaaactgacctgtagtttgttccaacaatctacgaatcatggttctaacttcttaaaccactccttaatgaaccttcttaacgcgagtgggaaacacaaacacttcgcattgctttttactcttgtcactgtccttaaatggttaaacataaataagtggtcactggggtctgtgtctcctacgtacatgttcatttcgggcatttaatttttttaggagctccgcttccaggatgtttctagcgcaaggctctcggtcctaacaattagactttgaatcatcgcccttttgccttcaggagactttggctatatcttttcggatgatcgaaagttcaactaggattagggtgccttcagagaccaatattgctggttttttcttctccagtcaattcctaagatcaccatgcttggcattgagtttctgtgttaaatgaacaggagtgtttttatggtttccacccatatacctcagttcttggtacacggatatgttgttttggtttccccagtcttaagggccaacattctcccttttgatattgcccctctgcagaccttttcctttttcgaaatcgaagcgatctttttgcaaatcctgagccttcttgtttcttttggaaaaggatgtggggttcatcttgggagagccttctgacggatatcaaatagggcttagctctcaatttttatgtttttgagtgtttggtgaagactcttctctcatttagtctggtccaaagggcttggcatttggatgtacatggatgccctctgtctccatatacttttgcgtggcgaccgttatttcttgcattttcctacttttttcttttgttctgccaattcggcttcatggttagcgactttctctcaaggatattagtttagtgtaacttccatgatcatagtcgttgtaaccttcttagtttttatcatactctatatcatacattttgtcttgctcttgtatcttcgcatctattcgcgaagctgcttcttcatcagttggccttccaccatcgtagtgtgaatcttcttatattattatttatacttaaggccttgtataactctcaatgtaagcatcaaaatgttggctgagatttttagaaactaattaatgaaagatgttaaaataattagaagagagttaatgcagatattttttatgttgttggagcattaatgagccttagtccatgagtcactgatatttaatatataggtgtttctttgtaggaactattctacactattttttattatgtccatctcgaatttagctgggggtaattatagccttatccagagaaccaaaaggtctctattatctcaagcgttcacctttggtatgcacaagttcccaaaactcaaatagtaggacatgcatatcttcataataggttacataggacttctctaggtagtaggtaagacaagcctttatccttgatttatgcgacagttcattatgcaactatcactaatccccttagttagagtgtaatcgccaaagaatgggcttaatgcgt

SEQ ID NO: 98342 - DNA, 773 bp, Cannabis sativa
aaatactttttatttaattcttaaatttttaaatgaatttttaattaaaaaatacaaattaatgatgtggactaataagagaatgacaattggacgcttatttggtacttaacggggaggtacctacggaagtttcaaaaccttaacagaaggtatttttaccgccaaaaacttttgttaggtatttatctgcaactccgagttaaacttgggtatttttaccgcaaattactctaatttttaactgactttaagtatacctgaagatctttgtgaacactgaaaatcagaatatgttcaaccattaaaaaccaaaaaaattgtagtagtagtagtagtatagtgaataaagtagtgtagtagtagtctacatgataaaagttagttaggcaatacaagattccattaaaattccattctaaatataaaaggttccaaaacagttggtactttttgtgttttttaggattagacattagttcatgtctaaaagagcacaataatatcacctttcttgtaaatttatcgttaaccatcttgaaatcagaattagttgctccatctcgaagaacctcatgagagcatattccattatttccacagcattgttcaattcgaacagtagattggcaagcaatgttctctatcttcttaccatcgctatgcggctctctgagtgacaagcctgtatcataatccagaaaattctttgagatagaatttaggtagaatcttgacaatttatcttcttaaaaagaattataatggagcaa

SEQ ID NO: 98343 - DNA, 614 bp, Cannabis sativa
  modified_base (581)..(588): a, c, t, g, unknown or other
aggaataatgaaaactcaatttttctttttgggtagggtgtgatcaaatttgaagatggggaataataataataataatgaaggtgtaggaagaagaagaagaaatgaatgaatttatatattggagaggaggatgagagagatgatgaagagagaaagggagagggtcaactataagcgcatgtgcctcttatggtctctattaatataaccgactagtatatattagtcactcgttcaagcaactgttaggaaatacataattaaaaatgtaacattgatattgcacactaataatatctcgcatttttagtttttgttttttgaaaggaaattagcaaattgcataaaccattacaatatttaaaagattcaccaaagcattactcgcagtgaatatacgaactaaatgaaaacaagagctacaagttatataatgtgcagccttattagcatttttagttattggttaataatattttttaaaaataattaattgtgccaataataatattaaaaagtgctagacactaagtagtgtgttttagcaattctcctcatccgatccaatccgcactttnnnnnnnnaacaacatccaatccgcactaagtgc

SEQ ID NO: 98344 - DNA, 561 bp, Cannabis sativa
aaaaaaaaaaaaaaattatatcctctctcaccttaaatcttagatccgccactctaataatatgttgtcacatatttttaagttacaaatgcaacaaaattgtaaaataaaatacttttgacgctacttttgttataattaaaatcatatatatacaacaatttcaaatattaaaaaagtttcgtcccaataaccttttaaaaatcatcataatactatgcaaatttgatctatattattcttatatatgatgttatgctagaccaaaaagttcatcactttatttaaaaaaaaatatatgtatatttataaatcataatttttaaaatttacccatgtttttgcatgcatgtagttgtacgtacgtatatgcacttttgctcgacctaatcgacaaaaaaaaaggaaaaaaaaaaggtaaaagagaaaaaaaagaagatgtagggtttcatcaaatcataatatatatatatatatatatatatatatgttcacaatcacatcaaactcatatgtttaacattatttagtatattatacgcatgcatttatataatatat

SEQ ID NO: 98345 - DNA, 906 bp, Cannabis sativa
agcagctgcacatcttcattataaggccaaagcatggccaccccaccaagatgtcctctcgcatcaacagaatacaaaccatcaaaccccatcgcaacccgtaatctttccaacttgtccttacgacagagagtttcacacaaaagcagaagattgggtttcttttggataataagatccaccaggaattgataaacccatgggttcccaagcccacgacaattctagctaatgatactcataatgggcggtgggcctggatcccagcacccaccaaaggcccgttcatggagcccgattcttgattaacttcagccacagtcacatccatactactattatccttctcgacccaatagactgttggcccataactcgttgacctgattgcacaccatcccttgtgcgccttttttagaatccaacaatatgacgtcatcattcggatcatcaatatcagtgtcattagcatttatctcattcccactatggtcaacaccaacatgatatcccatatttttctccatgaccttaggagaattaaattgaaactatttctcgactgctgttgtaacatcaccggagcagtcaccgcgccacccttgaaccggccggaaaacatctcgtctgtctcattcctatcacacaaccactgagagcccaccaggttgttcctccgtcgtggctgagccctcatccaagcaccataaggctttatgatcatctcgactggtgtatcaaaaagcatatgacaaaatttctcaaagtggcctatgataccacagataaaacaaaacgtggggatatattcatatttgaattctgccaagaaaccgtcctccattgcagtccgccggagcttcctgcgtctttttcaaaggagcagtgtgttgggttttatgccct

SEQ ID NO: 98346 - DNA, 716 bp, Cannabis sativa
cttcaagttaggaggtacatttgtatctcaaagtaagtatgctaagaacctcgtcaagaagtttggtctgtagcgatgatagacatgtgtcgttatttttaatgagtgtttcttccttcataatagtcttccaaggcaacccaattttctatacttacgatatcgtcgattgctccaaccatatttgtgcattgcaagcctgtttaacttgcaaaaattcatgctttctaaattatactgccaagacctccaaatctttgaacccaactcataatccaatactagttattcacttttaactaacactatatcatatatgcgctaaaatatcgtaagcatactggtaacttattaaaacgagttaaaccctatcatgggttattgtagcccagctattaacttactgttaacctttaacaataggttaaccatacaatctcataatatattaaccagtaaagttttttttttggggtaaggatacaataaatataattggcaaaccatgccaaacagaccttactctgtccatcactactatacctcctataccctcacttgtatctgattttctactagagactcattgtctgtaattccttagttaaggctctttgacttatacttccgaaatacctttagacataagtctatactcgtttaagcatttcattccatgttcgagcgcaactgaactattaataattctctttctc

SEQ ID NO: 98347 - DNA, 984 bp, Cannabis sativa
gggggggggggggagttccctctttgggtaatggatagaatcatagtttgaaatgttcggggagccaataagcagtagaaacaacagtaaattaagcaatttattaataatcaaagtgctggttttgttggtcttctcgaaactagggtcaaggttcacaagcttggaaccttgtacctaaatgtgtttaaaggttggtgcttttcttcgaatatagcttggcatcaagggggtaaaattgtgatagcgtgggatcctaataaatttgtggttgatattctcaaatgcactagttaattaatgcatgtgaaactttcagtaattgatagtagttttgagacctatttgacagtggtgtatggggccaatgacaatgagggaaggaaacttttatgggctgacttgtgtgaattgagtactaaggataattggcttgtcatgagggactttaatgctatattagccaaagaagaaagagtgggacatagagtttgttatcatcctgatacagattttatacagtgtgttcagcagtgtcaacttgaggatgtcaaagcaacaggctgctactttacatggtcgaacaaacaacaaggaaaagacagaatagtttccaagatagatagaattttagccaatcaagagtggttggataaatatccaaatgctgaggcaatgtacttgaacgaaggcacctttgatcacagtccagctattttgtctttgcacccgaaatggaaaagtgggagaaaaccttttaagtattttatgatgtggtcatctcctaagtatgttgaaaaggtttcggaagtctggcaaaaggaaaagagagggaccaggatgtatcagttgatgagcaaattgaaagagctaaaggctatactcaaagagattaatagagaaggtttttcggatgttcatgctcagtttgagcaatcaaaagctgatctaaatgacctgcaagataagctacaacagggatcc

SEQ ID NO: 98348 - DNA, 690 bp, Cannabis sativa
gagctcgttacaagcttcaaaaaggtatatagaatgtccaaaacggacacccaagtcaaaaattatgacaaaaatacgaaatctgatcttctaaaaatttttaaaaactatgaaatacgaaaatctcaattttcgcactcatcgaaacactaccaaaacttatcaaaatcactccaaacttcatagggcgaatatataccatatatattaccatccttgcataacagaaattaaaatcgagcccttaaatggaaaacgccattaacgttcggactaagctttaaaagttccaaactcgatttataactcaaaatcacctcaaattcaacaagtaaacatataaactagtcccatagttaccaaagaataattctacgaagtcaaaatctccataacctttttaaatcataaagcccctatataaaaccaatcgtttttaatttaaaatgtaactaaactataccttaagctttccatcttcaaggatttgctatcctgctactaccagagcttagatcgctaggtttcagatcgaaaatgaaagaaaatggatatatagagagaaagttttattgaagagagaagaatgagggttcgttcgttggttctttttactgttatatatgttaaacttaatatatgggtatgctcttaatgggtattacccatgtatgggtattttattcttga

SEQ ID NO: 98349 - DNA, 567 bp, Cannabis sativa
acataaaagtgacatgaaaataacatcaaaataacaataaaaaataacataccgataacaaaaaatcaacaacaaattaacaagactacaacataaaaaatcccaaaatatttaaaatcaaaaaaatcgtaaaaatatttaaaattccgtgaaaccatatttttataatttttttgttgtttttatgtttttgtgaaataatcccaaaaaaatataagtcatattgtgttgtactataaataaatacgggtcgtgtcgtgtcgtactataaaaatatgggtcaaaccgtgttgtacaacaatttatagaataggcccgacacgacccgcaagtccagtaattttgtatcgtgctcggattcatgtagtgcttcagaccgatccatttttcttaaataaattaacttatttttttatacgggttcaaattcctgttctatgtttttacatttttaatacaaatgatgagctatatctattctatataaagtgtgcctatataactaaaattcttggtttatgagaaattcaggggtgacttttgatttttatttaataaaataataaa

SEQ ID NO: 98350 - DNA, 1050 bp, Cannabis sativa
ttttatttaaaaaaaaacacaattttttaaaaaaattgaaaactgaaaacacagccaaacaagctcttggcttcttcatttctaagattttgtttctttttctttttaagatctcttaactgatagattgaaacatcatcgccaatgtcttgtaattattttgctgcataagcacaagtcactaaccactagtgctctaaatacatgttggattttttgacacggcatgaaattggcacaaaattagcacgagcatgactaaacacaaaaaaaaaaaaaatataagtttagacacgatacgatgctacaaattggtatgatactgaacgaaaaatgtgtttaagcacgatacaatatgagaaacacgaaagacacaacatgagcaaaaatagattagtttgaaagcacgacacacgacaagcttgatatattaataaaccctaaaatttaataataataataataatagatatgtatttatcaattataaataataaaacttttaaaaatataatatatttgaaatattgtataattctataattaaaacaattaaaatatctaacattaaaattatatatcaatttatttagaggatgatataaaaatttgagtatttattactaaatattcaaattttaatgctaataatttttgtatatgattacatataaaatattattgagaagttatataaacataattaaattataaaatatgaatatagtttagtaattttttttcttttatgcacgaattcaagctgggaaatgaaaatagactaacttatttaacaaatacaagctagcacaagcaaaatataataccaatcttagcacgacacgaaaatactaagcttacgggtttgggtgtactttaaaaatattggtactacaacacggcaacactaaaattgtaattagcaagtcgaattgaaatcattgacaagtttcaaatctaatcagtaagaaatgaatatatacaacacaactcaaaatctgaaaaagagtactttcaaatccaatcggggtttctaattaattaagaaga

SEQ ID NO: 98351 - DNA, 1315 bp, Cannabis sativa
  modified_base (673)..(681): a, c, t, g, unknown or other
ggtgttcatctgatctaatctacattattttgctcatagtgtatccgatctgcactaatgtggcgtttggttgaagttaatccgagtcggccctgaaatttagtgggtcatagggaaaaaaatatttttagatcctcatttagaaaaaaatgtggtattttttaaaattggtaaaaaaaaatgtgtaattttaaaaggggacaatttttttaggcccctgagctaggtgggctctaggcagaggcctagcccgcctatgcttagggtcggccctggaggtaatgaaatggaatggaatggaaagaaaataattttcaatccattcctttgtttggttgcatattaaagtattggaatgtcattccaatggaatagtctttgtaccattttggtagaatgactattccattttaaaatggaaggaaagactattccaaagcatgatgagacaaaatttaataatttttttatgcattttaaattttattccatccttattcttattctcattcccattcttattcttatgttttcattcctcccaaccaaacgccacctaagtgcggatttcatattttgaatccaatccaatctgcacaataactcaaatccattccaatctaatccgaataaatgcggattagatcggttttggattggttactttttaatnnnnnnnnntttaatatttatgaaaaaatatattttttttcacataattagcaataaaataaattaaagtattgttattttatgtctccaacaacaaattaaaataaataaaataacaaataacaaatttaaaaaaagaacaaaaattgtatgtataaagaaatgtttaattttgctttgaattgtacgtagaaaaaaaattataaataaaaatagaatagacatttaatctattaagttttaaaatatatgtgtattatatttaggaatttttacacttggtgtccttttttgccaattttttatatttttctttattcggttatttaaacttttttaaaaaaattatttttcaatattatattttaaaaagtttgataattacaaaaatacctatgcatgcttatgtcataggttttctctaatattacactccatttcttccaccttctggcttcttctctttcatctccaatattacactccatctcttccaccttcttctctttcattatttttttttaatttttcgtttattttctgttagtttatttttttccataacccactatcatccctgtgaagccctaacccacgaatttcccatctatgctacgatcctaaaatgggtttgaaagacatt

SEQ ID NO: 98352 - DNA, 606 bp, Cannabis sativa
tatatgtatgttattttgatgttaattttatgtagttttttttgttgattttatgttgttttcgtgttattttttagaaaaccgtaaaaatgtaaaaaattattctttgaatgaacgtaaaaatataaatattttacaaaaaatgtaattattccttatttctgcctaactttttggacttgactcattattggttgattgttatttatctttgaaaaataataaaaaataaggatatttacaatataaatatcatacgttttcggttttatacacttaaatactacttattttttttttcaataaattaaacattttaagttatatttcgattacttctgtcattacttttatgttaaatcctatcaaacataaagtatttgcgacataaatacctaatgttttaaatttcatatatttatatactatatatatatatatttttctagcagattaaatatcaccataagtccgttaaatcctattaaaatatactaaggtgaaatgtttgaacatattagttgtcactataaaaaacaactacttttagtgacaattttttagtcataacataaattttttgtgaataaatgtgacttttagtca

SEQ ID NO: 98353 - DNA, 709 bp, Cannabis sativa
  modified_base (125)..(125): a, c, t, g, unknown or other
aaaatttgtgactgactgtacatcactaattatatgttgtgatttaaaagtctgtggctaaaggtattagtttcaaaaatcacaatttattatgactaaatgtgtttttagtcacaatacttgtngtgactaaaagtaaattagtgacaacttgtatttaaatatatgttttagtcacaaagtaacattttgttgtgactaaaagctacatttagtcacaaaaaatttttgttgtgactaaaaggttatcactaaagatagtattttttttatagtgttgattccgagctaaggcaggttaggcccgcgcctagggcccacccaaaatatccagggcccgaaaattgcatataatacatcatatgtagttgaaaaaatggtaatttttttaaaaggcccaataatattcgcacttcactttaaatacagaaaaaaaaaattaaggctcatatatattcaaggctggctcaactaatgtgacgcgttataagtgaaaaattttaattcttcatattatttatttaattaataataaattatatcaataataatattataatgaaattcttttttacttgtacaattatctttttcatatttaattttcatgtgtaaacttcaattgcaattgataataaatacttataatacatatatatatatatgtgtgtataaaataggttcatggatttgttgaagatgatatggg

SEQ ID NO: 98354 - DNA, 1516 bp, Cannabis sativa
tttactttatgccaaagtgaatttgattctaatggatatcgccaaagccatttcataagcagccctttgtttctcatatctaacctaccaatagcgagacctccctcatgtttaggtctgcacacctcctccctagacaccaaatgatccccacccattaaatctcctccttcccatagaaaatctctcatcattttttctaacgagaataaaaccgcttttggagctttaaacatagaaaggtagtaaataggaagagatgatagtaccgattgaactagggtgagtctaccacccctggataaaaatgaggctttccacccatcaagcttcttagcaaatttttccaatacaggtgcccaaatcaactttttcccgggcgagctacccaaaggcattccaagatatgacataggccaactccccacttcacaaccaatctgactagcgcacaaagcaaccacactctcctacattgagatcccaaacacttggcttttattcatgtttacttttaatcctgaaatagcacaaaatgcccctacaattcttaccaccggcttttattaatgtttacttttaagcttaacatgacaaataactctttattcaagagttattaattgtatattaatatttacttggtatatatttgcttattagatacagtatatatttatttttatatatgtgggatgttaatttaacatgaacaaattctcttctaaaaaaaattatgcaaattgagttgtgaaatctttatgtgatgcttacagaaggttctctgcctcttcgaatggtgacattgttcattatgaatgtttgagttatccatttcctattcatccatttttgaatttttgattctcctacattcatgtttctcagtttcatttatgttcagactatgaaaaatgaaaagtggacatttcataactttttgtatacttgcaaatgtatagtactcattgaaggagaacattttgtagtgttcaatttcatgttttatcttaaattaatatgttctaatttaaagtatttcaattaacattaacatgtttcaggtccttgctgccaactttattgctttagtttggaatgttattctctcgtttaaagctcacaaagagatccttccgaaaaaggtttgttataaatacgaaaagcataggacatgagcatcttatatgtgtattttctttcaaaattaatttgcataattatgtacttcaatctatcaccttttacgtttaattttttattggggttggggggagtgggctatgaagtaatgctaggaattggctagagacatggggatattttgcccgcaagacattgtgtacttttaagtgtatgttttgcatgtggcctccacaatcgctgcttgaatacaaatgcacaatttcttcttatttccaaatcacacccctttcccaccaatcactagccgaagcagagagaacaattggtatgtgaccagaacccgtgaaaggaagatgcgtaacatgcgaat

SEQ ID NO: 98355 - DNA, 603 bp, Cannabis sativa
ggtaccttatcaaatttatctaatgacttttgttatataatttctcagttgaatggataggattgctgtaaatgtagggacgctgtcagcaatttagaaaagtttgataatttctgatattaaattataatttctcagttgagtggataggattgctgtaaatgttgggatgctgttagcaatttagaaatgtttgataataactgatattaaatacatataacccagtctaattatcatacatcaatatatgtaataatgtttttcttatctataagattgaattcaatgacttcaattagtcaaattgaaggtgtcatgaactatgttttcccccatgaatcagctatgtatctcccatattacgccttctgtcatgtttgaaaatttacagtacgggttgggagagttggttaagatttcataatctatgtatttatcaggccagcaagtagcttattcctgggttaattgctttgactttgagtattgatggttcgttttaagccttatttttgcacagatgtgaagattttatctcagttgtaagatatgaaaatcaccactgtttgggtttctttttttctttttctaggtaaccga

SEQ ID NO: 98356 - DNA, 739 bp, Cannabis sativa
atttgggtcaatttctatctcttctgttcttccactggccctacatttgtattcggctccccaagtcggggattcgcatccttatctctgccttgggcgacttcttcttgggcaatacttttccccttgcccgaactctagccggaggtattttccttttttaccttcgctagggcaaggttatatcattcctgtgcaattttttgatttcctttgaggcatcctatcccattctttgttgaaaacttgatgcataaatgaaaaactgatgtgacaactttcaagtcatataggggtggttggcctaacatgccgttgaacgctgatggaacatcaattatcaaaaattgtgccatcatagttatgctcctcggagcttgcccaacagtgaggggtagatggatttgccccaaaggtgcaacactttggccggagaaaccatacatcagttgggtacatgggattaaatctttaagtttgagccccatcttctcgtttgttgtcttcaacaagatgtttgaagaggctccattatctatcatggtccgggccactgttttgtttgctctctgtacttccacaaccaagggatcattgtgcaagaagtgaacgtggataacatttgcttctgtgaaggttatagtgggttcccctacccatggtatttttggctttctctcctctacggccaaaactacttccttctgtttgtacagtaaggctcgggcatacttttctc

SEQ ID NO: 98357 - DNA, 620 bp, Cannabis sativa
ggttgaagtttgagattgaaggttgttcggttagtgggtgtccgtgggagtcgtctcagtcggatcagggttgtgggtctccgtcagagtcgtctcggtcggaggagggggtcatctcgtggtcggagtgggggtgagggggctgggtaagctcgtacaatgtggtgagggggttgagggttattcttgggttttttataaaagtgtcatatatgttttattttgaaaggtataaaatattagggtttttaaagtatagtttttcaaatttaatgtgcaagagattgagttctctgaatggtttaaaactcaagtaagcattgttgcctctcaatacttataatgttcacactaactcttgaacttttcttaataacaaatatttttcctgaattgtagattaatgaactacggttgagcaaccatggtacagtgtcagatgagttgtatgctattactaacccactgattccaacaatttatttttatcttgggtgcatagtgaacggtacaaatttttggtcaaggaaagggatgataactgcaaaacataaaatagcggtgttatggtgcccgttgaagatggaaaaaatttatatggcacacttgaaaaaattatg

SEQ ID NO: 98358 - DNA, 1394 bp, Cannabis sativa
atttatatgataactttagggttaggtttagaatttaaatagaataaaaaaataagataaaattggcttaatttaaaccatatggccgaaatactatgtgggcccataggtttaaattttgccattttataaaactatatttctttttaaaattactatttttcattccaactttataaatgtcaattttatctatcaaataattataattaattattaaataatattgtcatttaacttatttattaattagacttttcatagtctcttaattaataaacaaactctatttttttttttattctcaaaattgcatttgcttagtgaaactcataaattagacatagtcttattcagaattctaattgattaataaaatcaattaattgagtctacaagacaatattatctcaagtagtatggggaccatgggcctatatataatcaagctcccaacaagtagttttagaatttaccgagtaaataaactatcttattaattcctcatgtctctactgtaggttcgaaattttactatactaagtatagatacactataaattatccattgtttcaatctaaataatcaatgatcttctatggatgatttacatcgagtagggagaaatttaccgttttacccttcaatgtattttatccttaaaatacttagctatttgtaaatgatattccaataaactaatataattattgaaatgagtactccaccattcaaactcatttagccaagctcaaaggaaaccttcgtttcacttctatgtgattatagaagttatagattttatatctataatcagtcctcctactcaatcgcactaccgtattcttaagatgtaagtgtttggccaatccaattggttagctttaacgaacaggtcaaaaaacacaagtaatacatttaagccaaaacctaaccatctcaagtaatacacaagtaatatcttaagattgagatattacggtaagtttatgatattttttccactgtgaatatcggttcagtctgatgtataaccaatacatccaatataagcttactttgctaatgtcttggaaaagacattccacttatgcaagtgtaagtaaaatacattgattaaatataataatcatgaataatataataatcacctaattatgacctaatcatgaaactaattagtttaatcacctaatcatgactattttttactgtgtagacaatataataatcatgaataataatgtgataggaatttaatagaaattatatatgatcatgaaataaacatgtgaaccaagcattacactaaacaagtatggttttagtgaaggcactaaaaccaacatagcctatcacattaaattagaaaaatcctaaacatcactgtcca

SEQ ID NO: 98359 - DNA, 530 bp, Cannabis sativa
tttttttttttttttaattataccctcttttatttgttatatcccaattatacctttatgtaatgaaaaaaaccttcctcactttcttaaacagtacccttatatgagggtataatcaataatggacttataaaaagggtacattttaattgaatttaaaataagactatttttggttaactattaaaaaaaaacaggtatatttcaacttaccccttgtctatgaccatagggtaaggcatagtaggccactcacaaggcctcaaaagttaaaggccctgaatcttttataatttatgattaagttactcattataaattataacgataaatacaattttgaaacctgtgttttgtaaaagttatcagttgaaccttctgttttgttaaatgacaaaatggactttgaactttctcaaattgtacaatagtaccttgaaccgattttttgtcaaaataaaacttaataataatctgatctagaaatactatgacaaaactgattatttctgtatctattcgtattaaaa

SEQ ID NO: 98360 - DNA, 2575 bp, Cannabis sativa
aaaaaaaaagataaaaataaaatggattaacaaaaaaaagagtatttggtgcaattttcaccatagacaatatatcctcaatgcacttatattacaccaataaaagaattctttggaaactaaatagttaatacaaagttgaagaaaaagtactatgaaatttcatcactcaagaaatttaacccaaattttatgatgataaaacccttattattacaaatgaaagatgcaaatcattattaacaagatgatacttttaactttgtgttacatttcttgttggtgcaattatcataattatattattttatagcttatttttatccaatgatttttttattaaatcctttgtcttatagcaaaagaagatctgtcactgttgcattaaatagtacgattaagatattgaatttaatatgagaatccaaaataaatgcattgaatatgagacagctgctgcaatatctaattttttattttaatatattttaatctttgagcagacaaaatcctatttttctattctattttctgctccctctgttttctctcatactcactcagagcatacttcggtatttgtgtagagattttgacccaagtccttgctgaaagtgatgtgtgatggttgagggagccactgtggctactgcctacaaagccacatgatggtgcattgacccagatttttttcactacagcaacatcccagtgaaaaaatcccaactttgtacagttacagtagttaaaataaagtaaagaagggtcaactcaattgagtgcaaaaaaagttattcaatatatgtgtgtccaagtatcaaactctgattgagtctacccttataattggcctgaaattattgtacaagatacaggaaactgagatcaaaagtcccataaaaaagttcccttttaagttgtttacttgcaaaagtttttgcaaagaattattgactaatgatgagatattatactacaattagaaaataagaataaggcttgcctttgctttatttatatgtctagagtgaggagtcaagtcagtcaggactcaaaaagaagagactattgtcttgaccacaactgataatctgatcccttatcaacaaacttctgccagcttccatccaaattattttccttggaaggattccaatcgaaatgaccaagcttcatcactagagtgtcaccaatctgtgcaacataaccttcattgtttgcatggaatatcttcacagtgctcctgcaatggattccagctcttcttcgagcctcaatcagctcggttattatgtcacgaatgccaaaatcgtagaagtggtcgtagaatatcacaggctgcaaaaagggaacaaggagtttaagttggctcaagaaaatattcggtactctaaatcccccaggggaaattttatgtaagctacaataagatgttgtaaagcaatttagccttaggggcaaagagcatactgttcctggatgcgtcagaatataggcatatccctgtgcaagcttatctcttggaaatggccagtgagcctggaagaaaatagaaattttaagtcagattcttccctcagctcaagctcattagattagttatcactttataaatgagctacataacataaactaaaatttgtatagtatttacttattgaggaaaactttggcatgtagaacagtagttgttgaccaacaccaagaagtgccgataggcaaaagcatggagagcagcatataagtagtagattatcaccctagtgaatcttgaaagttttattattctgattctttcatactacaaatcgttttaccaatgtgcatgtttatttatgccttttctgaataataaaatgtaagagagagacctgtgttgatcctgtatcatggttctctaaaaatgtgacagcacgcgaaggccaccatcccataactccagttggttttccttgaggatcaatcaacctccagtattgattgtgcagagcagagtggagtattccctgaacaaggacaatacctgagtttacatctttgattgaaaataagtgaataaagtatccgggacagggaaaccaaaatacatattatgagatatttgagaaagcatgaatataacctttgttgtaacatcaaatgctgatgaagtaccacctgtggcattgatccaattgacaatcctttgcctatgggcatctataatttgagtgttccgtccccacagtaaagaataagaagaagaagaagaacttagccacctagtgatagtgcatgacttaagcaactaagaagatcataaataacacgaaccaagagcaaaataattctagttctttgtcttgtaaataatttcaagtacaaatacagattgctagagcaacatcaaaatcttgacctagtcttcggtagccaaacaaagtatactgagtactgacacctagaccccagttaaagaatcaaacatgttactttagaaatctagtatattccatgccccaatttggatgatcaatttaacaagttcataggcactcaaaaaggaaaaaaaaaaatgtcccaccctgaaaacatc

SEQ ID NO: 98361 - DNA, 619 bp, Cannabis sativa
ctgaagagcaggaaaaaatataagggtagtacctttccagactcttcggacactctgacagtagaacagcgcatgagacaccgattcttcctggtttctacaacggttacaacccggagatagaattattttcctaaaggctaggttttgggcagtggggagggttaagtttgtggctcggaaagcaaagtgtttcaccttggcggggatagaaagatgccaaagggttttccaccaaggcgagggagaggaagaagaggggatgtcaggtggggtagtagtggaaaaactgaggtggtaacctgatcaaactgtgtaaaccccagagtttgagggctcctaaattagatcatcctgggatggggtgagaggaaggggaatggaaaggatattctgagccacgtgagttgggtagcaactttgaatcttagctatgtcccaagacatagtggatgtgataaatgaggcgactttgtcagggacgggggataagggagtaacttgacggaaacccgggatccaatgatcaatggtagtggatgtgttttgtccattgccaatttttgagataagacctttgcgcagcaactctttcccccagcaaatgctacgccagacg

SEQ ID NO: 98362 - DNA, 882 bp, Cannabis sativa
gcccaaataaaagtctaacaatcaatatatatatatatatataatatacaatatcttttcctcataatgtaccctttcctcataaacataaggtatagatataatgaggcactataccccaaatgcattgtttttttttttaatactgggcttcgaaagagcaccccaaaacaaagaacacgaaaataaataacaacaaaacagaaaccaaacagttttagtaaaataattttgtaagatgagttcaggcttggtgctcctgaaggcttcttttatttaagctacaagacagacaaactcaatctttgggtatttgattactataaacattttgggtatagctgcaattaagtgggtttaaattgactaatgaaaataaaatgttaggttgtttagtaaatttgatgaaactcgtagagaaaaaatctatggagatttatccaaccacataggaagggtttatgatgatacaaaatatgtagcaagattttaccagcttttggttgttaacaaaacaaaagtcaaagacatttatacaaacatataacatacattacatatatatatgggatgaaagtattgacatgttttgcctagagagaacagaccaccactaccaatctgatcagagagaacaccaagagaagagattttgacctcgagagagattgtaaataatattatggaagaacaggaagatgataatggagaagatgatgattatgatgtataacaaatctgaaaaataaaatagaaaaaaaaaaaattgtacctaaaaaaaagagatggttgtggtcgccggcacaaccaccaccattggtagtggtggacggcgcaaccagtgggtggaggcaggtgatgggaagggtttttttttttttt

SEQ ID NO: 98363 - DNA, 522 bp, Cannabis sativa
aagagatatgtatatatatcttaccggaaatgaaaatacagaaaggtctccaaccctaaccgatttgtattggaccaaagggttagctgtatgaagcatacaagtaagagattgccattggtttaagctcaatgagtccccaacaaacattatgctttttcctctaaaccttgtcaagaaatctcgcccatcgaatctatatataaaatcaacaaccaatattaattataatacaatgcaacaaaagggattagctccatgtattattataagataaatgctaaaaaatatattaataatgtctaacatcattttcgatattatatcattattaatataattaaatcgaatttcatataatactaattaagttaataacactaactaatatagagtgtttcctttaaatggtgcctatggtatctaatagcaacgctcttattataaccattattgggcacaagtattacttaagactttttatagatgacgttttactattagttagcaatattttttaaa

SEQ ID NO: 98364 - DNA, 541 bp, Cannabis sativa
cctatctactgtaacttaacatggcaataccctaaactagcagggaattaaccaaccaaagctccgaaactaacacgaatcgacaacacgaattttttcgtgaatcccagttgcaaaatctagttaaccagttttacaggtcctgtaaaaccggttacccggtttacaccagaaaaccccaaaaattgcaaaacctaacccaatcgattccaatccttaccaaaccttccaaacctgcatattataccccaagtgacatattccaagcaataaaaaaactacaaaaactaaaaatcaactttcaccattaaagagccaacttgagttctaaaactcaaagcttgctcaaacaatcctacagccacccaaaccatccaaaaacaacataatacatcacaactaaactccaaaaaaccagctcaaacaataacaaccactacagaaatcataaacccaattcatgcaaaattttacaatctaaagcttaagaaactaaagagagagttgctagaaactttaccttaacttggatactctataa

SEQ ID NO: 98365 - DNA, 924 bp, Cannabis sativa
ttttttttttaaaaaaaaatatctgcctactacattttacagattatgaaatggaagactttacttatttctttgaatttgtgcttttgactaatggtcaagggaattttcatacagaagttttttttttcacccctccattggaagcttattcagttgcttgtaatttaataggaaccagtttcccatgttgttgctcgcccttccccaaatgacattctcgaatggcgtaagtttataacaatctgatatgtttcaaactttagtgaaacctgttttgcttattttttcatttgttgaagtgcttaatctttcttgtcacatttctgcttaaccaatgtttttgtgcaataagaaatcagtccaaacattcatttatgtttcctattatatatattgtcaagttgtcgacatcacaagaatatttgaggaattaatgcaattattaaatgggattgctcaaattattgatgattaaagataatgttagcagctacctgaataacataaatgggagctgaccgatttggcagcagtttgaaggtagctgttgctgatttctttgattgctcagtgactgcatcttagagaaatgtagttggttgatcaacaatgtagcttcatacagacttaaaatgatcacaaccaatgcatatgagcaaatttatcattgatcaatgctgtgaaatatgtgatttgcagtagtaatattgactttattatatatttccctgtggcttaattcttattgacacatgaatttgtgtctttcacttttatgtttgttagtttgggacatttaatgcttaaggtaagttattttttattgattcattagcactttatccatgtttttgtttcttccacaattcagattatgtgttggagggaagtgaaggaacaccttttgcaggttagtcccca

SEQ ID NO: 98366 - DNA, 907 bp, Cannabis sativa
ttgttcagagtcacttctaatttctccatagcagccatgttgttgctagctaatataacatcatccacatagacaaatagaattatgatgcttgattcactcctttggatgaacaaagagcgatcagatgttgaatgttaaaatccctccttaattagagttgtagagaacttctcaaacaactgtcgagaagtttagaccatatagagacttctttaatttgcatacagcattaggtggcatctcccccttaggactatacccttgaggtaaagtcatatacacctcttcatgaaaatctccatggataaaagcattattaacatcaagttggtgtaaaaaccagccttgaatggcagcaaggacaagagtgagcttgacaaaaacaagcttggtgacaggggaaaatgtctcattatagtcaataccctcttgttgattgtaccccttttcaacaagccttgctttaaatctttcaatggaaccatcaacattatacttgattttgtaaacccacttacaccctatggcatggtggccagcaggtaaactaacaaaaaatctaggttccattagtttctaaggcttcaattacagtgtccattgcaacatcccaaactagtatgcctttagcttggtgaaaaaactctggctcgaaatgactagaaatggctagcacagttgctcgaaactttggtgatagcctgctgtagttaagtatggaaaaaagagggtgagcagtagaatcattatgtacttgagattgcacattgttagtacggtatgatggttttctggtttgtctagatggtcgagtactagtgacatgttcaggtataccaatgatattaggttcaagaatgtgtggttgaatgaaaggtggtgtactaggatgatgtataggtga

SEQ ID NO: 98367 - DNA, 651 bp, Cannabis sativa
ggctgccttagcgattggtttgcttggttgacaggtggaatggctccattattctgcgtggatccgtcgagcatggcccctcctactgaattcgcagacaaagtctgtccgcctacctttttgcccacgagtggaactcgtgaccggggattggacggctgactgttggttgtctgggaagtattcaccgccgggtcatcctctgtttcccccaggggaatgacgctcagcgtttgctggcctatagtctaataggctattcgtatcagcacagtagcttgccgactacgatcttcgatttctgcatggtgagcccttaatgcctccatctctttgtccctccactcagcaaacatacgcctgtgttcgtcaaacccgtggtttactgcagcaagtaattcctcctgatcgtgatgcagagcattgctatgaccctgcatgagtccgagcgcagcgcaaaggttttgcaattcagttgcgtctccgatggtcgtctgggcattgatgcctggtggaatagtcgtgttatgaacgccctagctgtgtacggaatcgttattcccagtctcttgcatactaggcgtagtttcagtaacaggagttgtcccaccattcaccacgcttcctgtctgtccaagattgacagtgggt

SEQ ID NO: 98368 - DNA, 749 bp, Cannabis sativa
gatttcttgttagagtatcctataaacactgaaatgagactttaagtatggtcagaactgagattttactaataccaatctcattctgtttctgtttaccaactacttgcatcatgatatgatagtttcttaccttgtcaaatattgtagtgtggctttggttttggaaattatatttttcttgaagtttaaaccttgaccctcattttctaatgctattatgtagcttttatattgccctgtcttaaaataatttagctagaagttttgccttagttttgcaggtattgtgctggattctggtgatggtgtaagccatactgtccccatatacgagggacagtatatgatattagagcacaactacagctgcctatttgaattcaactcagccagttgacagatctgttcaattagtataattaacaactatttaattttctttgtttgtgtaaaggaattttctttaacgaattttgaggcagattttgtcaatgcttttctttttctttcgatagcccacttgtacttttcaggttaatgaatgatcttcgattaaggggtttttttctttcctattttcagttgttaattacacccgggatcatattaggatgatggacaaattaattcaaattcgaagagcaacggaaccattggaacttcttaaattggtaagctttaatctaggattttggggaaatgattggaatggatctgtattctattgagctttttgcaataggtgt

SEQ ID NO: 98369 - DNA, 649 bp, Cannabis sativa
tattttataagatgaattctatccggatgagtgaaaaaatttcgaaagggttttaatttcataaggtgtcaaaaatgttctaaaaatgttattttctgtagtacaaatatctttacgaaatttagaacagatatttttttgagtaattgttatccgaatttttaatagtattcctaatttatgtgtgttaagtttttagttcaatagacaacttgtttgtttgatacaacttgtttggtttgataatatctcctaattctattacgatatttaaattgtatgacattatgctcattatcaataaagttatcattacaatgagtatagtgcctctaaaattggtaccatacttaccaatacttgatgatttcatattttatctcaagaacaagaaataaagccaaatcatttccacaatgataagatcactaaaggccataccgagaaataaggtatgctccctgtaaggatttgccgcggcgaccttatggtttggttgcagtgaccccgcgacaacaattcaatctttgttgttttgttttaagcataatttttcactctaaactccgatttaaacgttctttatactgtttgaaagcttgtttcaagctctattacttggtttagagttggagtcctaaatttgaat

SEQ ID NO: 98370 - DNA, 923 bp, Cannabis sativa
aagataagataaactttgaagtaacaacacattcaagcgacctctgctcagaggcagaggtttaattattacagtactattacacatttccacacaatgagagactctatattttaattacgtatcaccgtacaaattaaaatacatatattattcaataattgtactttcattttaatcaagcctgagtatcatcatcagggtagcgatataactgaaaagaatgattaacagcagtgaaaccaccatcaacaacgagattaactccactcacacaacgtccctcgtcactagccaaaaacagagcagcattagcaatatcttcagccttaagcaccacattctttaagttacccgctttgataaacatgtcctcaaactcttcatcattaaccatacaaaactccgtagccaacggcgtggccaccccagatggggacacgcaattcactcttatcccaaactgtcccaactctgcagcagtgctcttagtcaatccaactaccgcatgcttggctgttgtgtatgcgtgtgtggctaagcccccaacgcaagaggcaacactagccgttgatatgatgctgcccccagttttagctgagatcatagcattggcagcgtgcttaatcccaaggtagacgcctgtcacatccacccgaagcacgcgctcgaaatcggacaatttgctgttcattattttaggattgggctcatcacaaatgccagcgttgttgaacattatgtctaattttccataggtgttaatggctttgtcaactgcggctttgatttgagattcgttggttacatcgcagtggatgtaagtgacgtcgttttgggaagtagagtaggatgctgcgatagattggcaaactgaatggcctagatcgtcttggagatcggctatgacaactttggctcca

SEQ ID NO: 98371 - DNA, 1025 bp, Cannabis sativa
cattagaccatctcttacatggatttgtaaatatatattatatttgacaccaaaaaaataaatttatcatagaacatctttataagaatactttatttaaaaataatctctaatttatttttaaaaaaattaactcagcatttaatttctaaattgtaattagttttacattttctaagtctagtatacctctataagaataactatatcttaataaaaatatgtatataatttataaatttgtttatgtagatttcataataataaatgtataaatattatatttattcaataacaattttattacaatatatcaattatatcttaataaaaataaatatagtttataaatttatttatgtaaaattataatttttattctaaattgtaatacatatacaaatattaaaatatatatagtttatatatttctttatgtaaaattaataatttttattctaaattataatacatgtataaacattacatttatttaacaaaatttttattataatatagtattaagggctatttattggtattgttattacattttatgttttgatttttcttctcaatgtacctttatttagttataaactctcaattagaatataatttgcttggttccatgtgtatccttagataaaaattttactttatttacattaattagtatttatattaaaaataaaaactaataataattttaccaatttattatgtaaaacaataaatatatataaatagctattttttttttaaataaaaacatatcaattttattaataatgaggttaaacctcaaatacccaaaggatcaaacaacatatttagcattttcaatggggtaatatacacactctcaattcattagaataaaaacttctcatcactacaacaaaagaagactattaatcccattcttacacttaaataaaaaaaataaaaactgggataaaagatatcttgtaactttttattctacttttacatttggggccttaaagaaaagtttggaacaa

SEQ ID NO: 98372 - DNA, 683 bp, Cannabis sativa
gtccctgtcaccactgtgccacctactacatgccccactgtgccacctgctacatgcacaactgtgccacctgctccttgcaccaatttacctactgtgtcatcaactactcccacaactgtcccttccatacctacagaacccaattgcccacctcccaccactcaatcaaccaatatacaccatatgcaaacacgggccaagtccggaatccacaaacacaaagctttccttgccacaaaatatcctctacttgaatccttattacccactgaacctaaaactctcaaaggtgctcttgcagatcccaaatggaatggggccatgactgaggaatttattgccttagttaaaaatggaacttggactctagttccttacaaacctggtatgcatgtagtaggcaacaaatgggttcaccgtgtgaagctcaatgctgatggctctcttgccaaatgcaaatcgaggctcgttgccaaaggatatcatcaaactccagggattgattactcagagacattcagtcctgttgtgaaaccggccacaattcggatcatcttaacaatggctgtctcttatcaatggaaagtaactcaacttgatgtgtctaatgcatttctcaatggtatcttaaccgagacagtgtttatgcagcaaccaccaggttttgaagacaaacaata

SEQ ID NO: 98373 - DNA, 2069 bp, Cannabis sativa
  modified_base (1804)..(1809): a, c, t, g, unknown or other
tgacttgatccagattttaagactcattcgactaaaggtgaaagaacatttattggtagcaaatcagaaggtggttaacatcctagcatgggcgccacctccacctcagtgggcatgctgcaactctgacgttgcagttctccccaatggtagtatgctggctgcggtaataagggacgactcgggatcgattctatccatttcaacccaggaagccagctatacagaccctttagttgctgaagcaaaggcggtttgttttgcagcgaaggtagcagctgaggcaggtgtaaaaaaatagctttccaatgtgataatctgtgtgtggtgaattcctttatagccacaacacagtgcaacgtggattttagaattgaagcggcgaagatgaggtttgtgcaatattgctcaatgtttgaagagtgggaaattactcatatttctcgaatgtgcaatttcgcagcacacaatgttgcaaagtgggcagcaatggggagaaaatctggagcctttgtgcctcatgatatggattcgggagtcttggatgacttaagagaatgggacccgggacctccaaaccaattgtcaagtatatgagctgatgtagttttagtttcttttgctgtttccagttttttcttgcatctttttgtaatttgctctgttttcgtacttctgttgtttagactctcgggcgtttgtttttgccctgttttaatgaatgggtgtccttggacacccccccttcatcaaaaaaaagatttgatcaaagctagagaaaatttgttgtgaaagcttgttctgaacttctggtcagatggttatgcttggaacatattactttctattggagcttgattatataacgattgagcttgatcaaataactgatcaaatagtatagtaatttagttatataagcaatgccccctttaattagtgttataaattttcattttaattggatgggaaggtatttttgttattactttcgtgcattaaattagatgtgtatcgaagcactaatatttggattggatgatgaactctttttcattgttaagctaatggattttaaaagtgttcatttttttgcgggctagaaaatatatttggcaaacttataataaagtttatgatcgtgtgataaaacttggaaatgtcttccgcagttgcgatttcagagaaataataagtctttatgtaaatttatttgattttttttatttatatatatgaaaagaaatgttgttccagctcgttcaataccataaaaatgtgttctttcttgattacagggattgcagaagaagataaatgtggttttatagtgtcaattgctctgaatagattatgattaacaaattcttctttacttgacgaattgctttttcacctaatgatttaatattattatttttacacagaatttatcacttatgcattctttatattaaattttttgataaacttatcaagaaatattgtaagtagactcttgattttaagttattataaattagtatttaaattaatgtgatttttttttcaactatgttaaaaaaaatctttttgttatttcggataaactgcactattttttttaaaaaaaaaaatctttattttaaactaggcaattccgctcttcgcgcggctgttattttaaattattagtaaaataatagtagaaaattaaaatttattgcatataaataataactaataagttaagaaaatattttccaatgtataataatattgaaattacattatataattgcatattttattattattattattnnnnnnattattattattattatcaaaaattaaaatccacaaaataagaaagtctattatttaagtctatttaccatattattaattttaattttaatgataattattctattttttattattttcattgttaggttgttggtaaaattcttttcccatttctattactttctttattgatatgtttttttatttttttatcatacttatttatatagtattagtttaaaatttatatgatagcgtatagtaaattttaaaatttt

SEQ ID NO: 98374 - DNA, 549 bp, Cannabis sativa
ccataagtctttgcaatgtgagttacaagatcatagcaaaatgccttgccaatagaatgaaggatagtcttaaagaggtcatatcagaaaatcaaagcgcattaattcggggtcgtctcatccaagataatgccatattgggatttgaaagtcttcattgcatgaagaaaggtcggtttggaaatggaaggaagatgactctcaagctagacatttcaaaagcctatgatagagtcgaatggcgattcctagaagcaatgatgatttgtttgggttatgaaaagcgttgggtggataaggttatgaattgcattaagtcaatttccttctcaatccttcttaattgagaagtcagcggtcaaattgatcctagccggggcattcgacagggagacccccaatcaccatacatgttcttactctgctccgaaggcctgtcttgcctcatctatgaaactgagagagccgataggtgttaggctaaaattagtctaagtttcgggtcatatttttggttagttttcactctttgtttctagttttagggct

SEQ ID NO: 98375 - DNA, 625 bp, Cannabis sativa
tgctgcatatccatttcgagttcctaggttgcctcttctactttgatgttcttttacaacactttgatcagtacaattgtcttgtttctcaagactttttctctcctatcaagtacgtgcaccggttgttccttgtatgaaaaatctggctgaagttccaatgcttcataactcagaatatggaatgggtccgagacatacttctgaagcatcgaaacatggaacacatcatgtatagctgccagtgctgagggcatagccaacctgtatgctacttgcattatcctctcaaggatctcaaaaggtttgatgaacctctggctaagttttcctttcttaccaaagcatttaatgcctttcataggcaatacttagagaaataccatatctccgacataaaaatcaatatctcaacactttggatttgcatagctcttctgtctactctgagcagcgagcatccgtgctgtgattttatcaactgcctcacttgttcactaaacagcttcgggacttaggaactttctctcacctacttcatcccagtgaatagatgatctacactttcttccatataataattcataaggagccatcccggttattgcctgatagttgttgttat

SEQ ID NO: 98376 - DNA, 1041 bp, Cannabis sativa
tgatgctcagaagtgcagcatataagcaatataagatgttggctactggatcaattgccttgtggaaacaattcactaatgaattcttggcctaacaccatgcctcgtgagactacattatcctaaggacaagtttggccaacatcacatagggagatacataaagcctgaaaagctacatccagcgcttcaccgctaaagcgaccaaggttgggagactgtctaaagatgaatacaagatggccatagccgctagagtcaagccaagaatcaagttatggaacaacatgctcaagagagaattaggcaatctggaggacttctacgaaagagtcaataggtacatccaagtgaaggatggacatgagaatctagatgtgggaagaaatagctagcccaagatatcccccactgatgagacactaaagaaaagagagttcgatcattggggagacgaacactgcaaaaaagttaagaaagagatggaacaataaccctgcgaatacacatgctttacagagttgaatagctcaagagaacacattttcttgactaatgtgaaccacatacctttcaagaagccatccccatgaagaaagataagtccaaaagggatccgaaaaaatattgcaagtttcacaaggacattggacattttatagaggaatgcaaagatctcaagatttaaattgaggagttaatacaacgaaggtaattgggcaggtaccgcaaagagaagaaaaggtaccaggacgagcgacaagaagaatactggaggaaaattggaaggaatgaggtattgtcgtaaaaaagaagccaccaagatatcttctttgtctcacatttcaatttgttgtgaatcaaggtggaaacccctcgggtgaccccaattgtcatgttaatcttttagttcattgtaaacaagagaaaggcccccacgaggatctttacaccccctttattgtaaaagcaggatgaaagaaaaatgatatcttggatttatgttattgtattcagaagaacactttaaagtggatgttc

SEQ ID NO: 98377 - DNA, 618 bp, Cannabis sativa
tatcagtttattgagtaaacaagggtggcatctcttgtgtcagccacattctttggtgggaagaattttcaaagccagatactacaagaatggtgacttcctcttggcagaactaggaggcaacccaagttttatctggcgtagtattcttgaagctcaggatgtggttcgtgaaggggttagacgtcgaattggtaatgggtcttcagtgagtgttcttcttgattcttggctgccggatgttgataatccaaaagtaacctctactcacccggccttgttaagccaatgtgttaattcgttgatgattactggggagtatgcttgggatgtagacttggtgcttgatctgttcaataactgggatgctaattaaatactcagcattcccttatcttcaagtcgggcaaatgacacttggtattggtgtttggaaaaaactgggcatttcacagttaaatcagcgtacaagtttcttcaaatgcgtaaagagacaggttcccaaccgaacagctctccagtttggaatggtatttggaaactacgtgttccccccaaggtcaaagatcttttatggcatgcggcttcagaatgtcttcctacaaaaacaagactgca

SEQ ID NO: 98378 - DNA, 4868 bp, Cannabis sativa
gaaattgaaaatctatatgaatcaaaattagtgtgtttttctttttttttttgcagtcacttaagagggaaaaatcaggagaatttgaaggagcactaaaaatggtagtaaaatgcatttgtaatccacctaactattatgcaaaggtgaaaaattctttctttattataccttagattcttaattagtattttatttatttatttattaatatttgtaggtattgcatggaagtattaaggggaacatagaaggagttatggtgagtagagctgagtcttcagattttgatgaaattcaaagatgttacaaaaacaagtatgggattgagcttagagaagccatttctgagaccatcccttctggtgattacagagattttcttcttgcattattagctagaacaaaatgaactataaatatatatcttaattttgtaatatatatataatattgatcatatgtatctatagattgtgtgtacttcattaagtagtattattatatactatgtatgaagtgattttggtataatatagtcaatataattgtcttgacaaaaatgaagacattttaataactaataatgaaatatgtgtattagatattaaatgtgagtggaggaaataaacgaaaagaagaaaatatttgtaaggagatactattaataatgcaacaaattaaaaaaggagcaaagtatacatagttttttagtgtatgaatttaacaatataatattgtattttatgcaattgtatacttaaatatggattcgaacaacatccactataaaacccaatgtaacaatctatgtcttacataaagagagctaagtttagacatagatcaatagttacatagatttttcataagagcttgttgagaagccaataagtaaagttacagaataagcattgctattaagtatcagtgctaaacaccactataaggtaatactttgcaaataactaataatattttatagtaattattaaattgaatcatgcaaaacccgctatctaatttcacaaaatattgctacaaatagcaatataacaagtgccttttaacattaatcttatcaaaatcatcatggttagttagttgctagaatctgtagtcttataatttcggtcttggtttagtttccacatgttggctggtgagttttactttttggttaggatcttgtggtccagatcacatttccaaatgatcacagctcttcaaattcagcaaacaattacaaatagtaagatccacaacattatctagattatcatttaagtcaccatgttgaaagctcatcatcttcataatcaaaattaccaactaaatgtgaattcatttcattctctctgtccaccttcaaaatcacaaaccaaaccataatgtttcaagtcactcagttgaacccaccaccttcgcatcggcaaattaatcagcctcatcgtctctttcactaaacttccagccaaaattacttacccgagttcaggtcaatctttctgcatcatacaaacatacttcccatttcgaaaaatcacaaacttaagccttagttgaatccacattctccccgaatccacaaattttttggccttgtgatcttcatcgccaaagtcactccccgaattcaaatccctctatggcatgtcttcaaaatctgttccaccatcatccacatagtcttctcttccaaagcctctcaccccatgatcattctcccttcctctatggaagttaaccaattccttatcaacttttgcattcctaggactcaacaaaaccaattcagccaactttctccttgccaaatacaaatcatttggctctatcaactcccctctcttgtatgcctccctaagaaaaacagtatgaatcttcccgtaattccctcgagtcgaaatgtaaaatataccctgatgttgaagaagaaactccttcaacttcttaggcaaattcattgccattctaaaatgagcaatcctctccaatgtaatcttcttctcaacagtcaaagtcaacaattcatgaattgttgcaactgccctcttctccattctcttttgagcctcaagtgatctcaaatcataaccagaaatatcctcataaggtgaccagtaaggaaccctctgccatttccacacagcaatcctataatacttaccaatcttaaaaccaggtggaaaattcacaataaatgagaacctaatatcctcagcattagcacctctctctctatactctttctccctaagtttctctatatcacataccatcaaactagggtctttctcaacacactcaatgtacttattcctagtttcttcagcatcaattaatcgaaaatactgagggtacttgagaattaccgagtactcgaaatcatcaggcaaaccgaattccgccctagcaatgcggatgtgctcgagccgaagcctggcagcattggacatcatcaagagctttctgagtctggtgacggcttcagggatttgggcatgaagtgtgtgcttttctagctcaatctggagatgggcttttcgggttaagcgacaatagaggactcgttgaaccgggtgctcataaatctcgaaaacatgagggaatttgagtaagaaagcaccaacttcatcttgtttgaagccaaggtgacgagctaggatgtcaaggcgtgagactggaagagtttgattgggttgggctagaatgagggtctgagacttgaggactttccgggttttcttctccacttccatgtagttgtcaaagccatggtctcggaccctctgcatctttttgggtatggaggtggactgtgacatgggtctgtagaagatgaattggctgggtttaattataaagctttgggtctttttgggtctgaagaatttggcagagtaagcaaagaagattttcatcttggtgttctaacatcagctaacaacaacaacacaagacaaataatatatatgagacaaattaaggtacaatacaaacatatatatacacataaaattatgtaataacagttaaacaaccacaacacacctacttaatccttcaagttctgtttttggccaattcaactccttcaagttcaactcaatcaaagctttgaggatcttaaactaataaaaaaaccagcaacatactcatataaaataaatgtgttaataaataacaataatttacaacaactaacagaagagacatttgatcaaacactttataagcaattctagaaaaagagaaaaatacctcactcaaagagacgatacattgaatataagacactgagctcaaccctttattaagattccaaatctcttcaaaagctgtataaaattcaactttcaatgtggtctatcattttttcttcctcacaaaaatatggcagcgtaagctgtatatatcaatcaaatgaaattacctgaggaggaggaggagaaggagtgaagatgaaagtctctttgccggtgccggtgccggtgccgcagctggtttttgcgagaggaggaggaggagagtttttctaggtatgactgtgactgtgagtgtgaagcggcaaagggctaatcaagagaagccagataagcgctaaatgaaaaatatttgcaattggggacctaattgcaaaatgtaagttaggcttgggattttccagcaaatactgttcttccttcctcgcacgaccaaaactcaatctttctccggtatcatatcattgttctcttctctctgtaatcaaaaagctcaactggtgttgttgatatttaatggcggacaatttggatgatcacaatgagcctcttgatgttcgaagaagaagaagaagaagacggcgtagattactatgaagatgaaggagatgttgatgttgatgatgatgataacgaaacagcagagtatacattcagattcaaggaaggtgtaaaccctttggatttcgttgaagataatgtcttgactccccaaccttataagctattcgaacgactcgagttcgagtatgaagctctcgctgaaaagaaacgaaaagcaccaccaccgcggccattacctgatgccagcaggtgaattgctctcacaatctttatatgtttttatgctttttggggacttattggatgttactctgtaaatagtgaagaaggagcagttaagaaagctagggttgatgatgaattaggagctagactaacaatggaggagtctatcaaagctattaactatggtggtcgtcagaagagatcaaaaagggtacttttctttattttatctataaatctatatttataaattttaagtacaaagattgtttggttggaggtaacgaaatccaatggagtagaaatgaatcaattttcattcaaatcctttgattttctatcgttttggtggaataactattctattttgaaatggaaagaaagaacattcaaatgattgtaaaaaatttaattttttttgggatgcattttaaattttgttccattctattctgatttcgattcctattcatgtgttttcattccttccaactaaacgtacccaaggttttttgttttaggggactcacaattctttcttttgaatgttacttcaggtgtcactgatagtaaaaactttaaatagtcttgtcattgttgataatcaatgctaggagtagtaattgatttttcactccagaggaaaactattttatggttatttaaattttgtagaggaaaataatcttttgggtttggtaaaatgaagctccctaactgatttgaacctaatggaggactatatgttgaattttattgattgcagctgtgggaaataggattggataatatgtatttttgtaaatttgtata

SEQ ID NO: 98379 - DNA, 529 bp, Cannabis sativa
gagagtagccaataaaaatgcattattcagatttgaaatcaagtttgtgtgatctatatggcctcaaatgagggaaacaagcacaaccaaaattcttgagaatcttgtaatcgggttgagacccaaatagacattcatagggagttttgtaatcaagcacagttgttggcattctatttattgtaaaaacaccactttgaaatgcaaaccaccaatattcaagagataaaccagattgtgccaagagagtgagcccagtttcagtgatatgtctatgttttctttccgctcttccattttgttcatgggcatgtggacatggatgttgaaaccctattccttgatctcttagaaacctagcaaaaggtctatattccccaccccaattagcttgcacatttttaatagggagattgaattgtttttccaccatgctcttgtatttaatgaatacatcaaaggcttgggacttaagagttaaaggaaaaatccaggtatatctagtgtgatcatccatgaaatggatgta

SEQ ID NO: 98380 - DNA, 974 bp, Cannabis sativa
ctaggctattaaaccgctcatgttagggtgataaccttaatcctggttactaattactcacatatataatttccaatatatgcgcccccacgcataactctacgtgctaactactgtcttacctaatgtcccgcaatagtagagattccaaatcctagggtgctcctgaccaggtattggtaatcctagtcacaatactggatttcacaaatagggttaacccctgattccacatttataaaatacatacatggcattcgaaatacaggtaatcacatagagctaagaacgagctttccaacggtatatagaactcccaaaacagagttcggatcataaagttatatattttcaaagttaacattcaaatctgcccagaaactcgagggcgggtcgcggcatgcaaaagccatgccgcggcacctgggaccaactcccaggttctgcataaataggcgggtcgcggcatgctaaaagccatatcgcggctactgggttccaaacttagaaaccaacaagcaaagcttcgaatttaaacttctaaacacattcaaatcaatccaaaactgaaccaaaactcgcaaagcaacaaatatatttttaatcatcaatcaaggagttaaaagcaatatttcatgcattaaaatccagcactaaaccttaaaattcagattgcccaacaagcataaaatcaagctctaaattaacaaaattcaagctctagaacttgagcttcaaaaccattcaactctaataatttccagcagcaaaatataaaatataacatgaattctaacctagaaaattccctaaaatctcagtcaaaacttatcaatacaatccacaataatattatgcaatccatactcaaatctatcaatattaaacaccaattctcttaacatgcaatctcaagaacaactcgaccatttcatactctttccataataaaattcagcaaaaattctaaataa

SEQ ID NO: 98381 - DNA, 602 bp, Cannabis sativa
  modified_base (532)..(533): a, c, t, g, unknown or other
aattttgatgaattaagtgagaaatttcatggattgattaggattcatgtttgtgagcttggattgtaattatagggtatttttctggtttgaaattcatgttatattgatatgtgattgctggaaatgggttgagtttgaaggattcttagctcaagttcttgagcttgtgtatagctagtttaaagcatgaattttgtgtttattgcaatctgtaagtatgagtttaatattgggatttttgtgtttgaaacatggattttaactccttcttgtttgctagcaaccttacttgttaatcttgatgtttggttgtgaaattagggtgaaaaaattaagttttgagctgaaattcgaaggaaaacttgctggtttctgggttctgcacccaaatgtcgcatgctctggagcatgccacagtccgcccctcttggtggaacctgggttttgtcccaggtgccgcgggatggtctgggcatgccgcggctcgccctcgtgattttggggcagtttgtgttgaaactttgaaaanncataacttttgattccgaacttcgatttgggagttctttatatcgttggaaagctcatttcgagctcta

SEQ ID NO: 98382 - DNA, 789 bp, Cannabis sativa
tcaggggtggttaggaccctccaagcttgcttggccagcaacgcttggttatgatgaactaaggatcgaaaacccagccccccaaagaacttggattggcaaagtgaagaccaagacttccaatgagctttagaacgattcccaaaagagccccaccaaaactgtgccataagtttctcaattttgtgacaaatggaggtaggaagtttatagcaggacatggcataggagggtatagcttggataacggcttttaaaacaacttcttttccagctttagagaaaaacttatgactccaaaccgtgagattggaactgacacggtcaagaatgaaactgaagctgtttttcttagaccttccaaaacactagggaaccccaagatacttagacatgaagggtctgttcgaaatcccaagagtatggtaaaaatgatccgagacatgagagggggtatttggggagaataaaatggatgatttaccaaagttaacacgttggccagtggcttgattataaagctgaagggctgcttgaagagcattgcaagaagaatgagtagccttggcaaaaatgagagtgtcatcagcaaagagtaagtgggaaactgcaggggcagatctggcaattgaaataccatcaaagttcccaagctgtttttggatgcaaagggcagctgctagaccctcagaacacaaaaggaaaagatagggagaaagaggatctccttgtcttaaaccgcgagaaggaaagatttccttagtaatactcccattaatactaaactta

SEQ ID NO: 98383 - DNA, 580 bp, Cannabis sativa
tgttgggggttctcaatgaaggagctgatcctcccagattaaaccgtaccattattaccttgatcccaaaaactaaaaagccatagaatatgaaagactactgacccatcagcctttgaaacgtaatatcaaagctcattaccaaggttctagttacaagatttaaggtggttctttcgcatgtcatttcagaaacacaaagcgcattcttaccaaactgtctaatcacggataatattttagtggcatttgaacttgtccatgccatgaaaaccatgactacgggtagaaagggaattgtttcactcaagttggacatgagtaaggcctttgatcgagtagaatggcgctttattgaagaagttatgaggaaaatgggctttccggagaagttacaggatccttgatcccaactcgtggcttgcgccaaggatgtcctttgtctccgtacctgttctcatctgctttgaaggcctatcaagattgttgcaatatgaataacaagatggacgattgacaggttttaagctcactagacatgcttcaccgatttcctacttgctatttgcagacgatagtc

SEQ ID NO: 98384 - DNA, 549 bp, Cannabis sativa
aagtcttgtatttccaattctgaaccctgtttttgttatttttttttttgttttaataatgttatgaaactatgaaaaaactgagatgtaactattacgaaacattttaaatttattaaacaaactaactatttgtctgagtgttttctcttttttctctatcaaaataaattcctacaatattgaataaaactattatgaaataatgatgcaactataaatcaacttgaaaaaacttacaacttaactccaattaacatagttgttgcttgattatattttgaaatcgtaaaaaaacgactatgcaactgaatataccttacatgtattgtttataccagatttggattgattgggagctcctgatcttttcgttatttcaagtcagttgttaccaattgtgaaccctgtgtttttcatcagctctatttgaatcagatatttttttttcaactattataaaactaatatgcaactatttgcacaaaacttaccacgtataactgctatttcttggtccccgtcaaatgaaattcatgcataatatat

SEQ ID NO: 98385 - DNA, 1902 bp, Cannabis sativa
atatatttgttaaaagagaattttcttttttgtaatttcataattaataaaggttattttggtaattcaattaggagaaacccataaacattctcatttttataatagttgtagattagagaagtttaaaactactaaattattaaatttatgaaatcaataaattataaaatatattattattattattaaaataaattatatataattttacaatttgatatcacatataatattttaattaataatcaataacaaaatattatttataaatgtcacaaatgtaatattagagaattagtatttgtatgtttttttaaaatataaatttaaaaaaatattttttttttcagaaaagtaatttgatgggaaattttttcaaaaaaatacaaaataaaatcaaaagatatggaaaaaaaaggtatagttacccttttattataactagttactcctattgttattcttatttggttttttcatattttttttaactaattactcttttattataactagttactcgtattataagattttatttatagaaaatataatttttaatatatttatgctatactttcattattttattgttaatttttgttatttgtatattatttttatgttattttatattatcttcacgtaatttttttgttattttcataaaatactgtaaaaatatgtgtataaaaaaaactttaaaagtaaatgtaaatgtgtaatttttgtataaattaaaaaataacaatttatgtaattttcccataaaattacatattgatataaattcttaattttttttttctcccaactattttgaccacttgaatttatgtcaacatttgtgtcacatgtatatattattgttctattacccccactcttttttagttgaaattctccatgagagtcattaattgctacaaggaaaaaaaacactatgtggaaccaaaagttaggagctagggtcaataattcaaaagacagaaatctatttgtccttttttaaacaacaaaattaataaaaatcacaaaaacactctcacatctttcccaacccaactcaaaccactctcttactagttagtaccaaaaataaaaattaagtaagataatttgagtggttgcatcactaattcattacaaaaacctaattttgtaaggtatttaaagctaatggtctatatatatactagattacttatttgtgtttagacttttattaaattttctagcaattatataaaataataattttaggaaagttgaactttttttttcatacaaaacaacaatgtgttactcatttatcaatatgaatcaatttggaaatagaaagcacaattctaatatagtggatgaaacccctctcaactttattcaatgatttagtaaatttttattttaatagtgattgtttattagtgtccaacaaagataattaatttttcatattaattattaaattaaagataagtgttaattacaatcttttattataatctctcagtcaatttctacgtctgaaatcacatgtctgaatattctttttttcaaaaaaatttcataacaatattctttatagttacagtatcattactgtaaatttttgaagaattctaaatagtttacaatgtcgaaaatagagtttctgatattctaatttaccacacacgttcaaaaaacttcaaacatattttcgacaatgtaaattattcaaaaaaattcaaaaatttgtagaaatgatgttgtaagcataacgaatactaccataaaaaaaaattaaaaaacgtatttcaacatatattttcgagcaccaagattaattaagagattataacaaaagattgatcgtagcactcctctaaattaaaaatataagagactaaatactta

SEQ ID NO: 98386 - DNA, 1143 bp, Cannabis sativa
agatgagttccctttcgagcatggattcctgaataattacaaaccagaaagtactgttacattaaacacaccacactcctggttcactttaccttctatggccaaaaacacaagttctcaccctcaggaaactcaagctgcagaccatacagatgtgttcaactcactatcaccatctcagtctcattctcacaaccaggtcagtgaaaattctcattttgataatactgctgctattccttttgttgctgaacctgctagtgcagaaaatgtgtcatcacagccacctgcagaagctcaatttgaacaaagagctgctgtaacttctcaccccatgatgacaagagcaaaggcagggatatttaaaccgaaagtatatcttggacaagctaaattcgacttgtctaaccatgaaccagcaacagttgaagctgctctacaacatgaggggtggaacaaatcaatgaatgaagaaatctgggcactcaagaaaaataatacatgggtgttagttccttattctccactgtacaacattgttggttgcaaatgggtgcataaaattaaattaaatgcagatggctctcttcaaaggctaaaatcgaggctggttgctaaaggttttcaccaaagaccaggtgttgattacagtgagacatttagcccagttgtcaaggctccaacagtgagagttgttctcacacttgctgtcacaaaagactgggaaatcagacagctcgacatcaataatgccttcttaaatggcactcttgaggaggatgtttacatgatgcaacccccaggcttcgaatcaattcaacatcctactcacgtgtgcaagttaaataaggcaatttatggccttaaacaggcaccgagagcctggtttgatcgattcaaaagcatcttgctgcagtggcaatttactaactcaaaagccgatacatccttcttcattttgaagaagccacagtatgtgattatgttgttgatttatgtcgatgacataatcatcacaggaaatagctcacgggaattgaacttgtttatcactcaactcaacaaagtattctctctcaaagaccttgggccacttaattactttctcggcattgaagtctttcgagacaacacagggataca

SEQ ID NO: 98387 - DNA, 782 bp, Cannabis sativa
tatccgttttcaagaacattgtcgcatttaattatagctgataaatatatatttaattaattttatatatgttaaagtataattacaattgtctattcaatatacgtaggtaaataaaagtactgtgtttccatttaaaaaacagtttgtttaagaaatactatgtttggaggaataaaaagacagagaatgtgagtagagataaaaatagaataaaataaaattttaatatataaaaaagaaaaaactgataaacaaattgattttattttattagaatgaaatgaaaattgatttctttctatatttcattcaattttatttcctcagaccaaacacaacttaattagtctctttctatcataaaatgagttgctttggggcactcactttttcactttattatgcaaattgcaaatttttaactcaccatgcaagatgatgaatgaaagaactatactttttctttcttttgtcatgtaggggagtttaataacttaacttatataataatggattacattatactaatggtgtatttcaatgtcattatttttttaatttagtttttgcatttaaattgcttattgaggctaaaaattcatgacaaaaattagatgctaataagacaagatttgatataatgtgaaacttgaaaacataaatattcttgtgaaacttaccttacaattcgaaggcacatcagtacgtcgaaaacatgagtgacaaactagttaattaattaagctaaatcagtcgtagggcaactctcctttggcaag

SEQ ID NO: 98388 - DNA, 567 bp, Cannabis sativa
ctgacgagagagggatccaaacaacctaaatttttttatttaaaacctatctgacgagaaagaaaaatcaaaagttataattgagatagaactcataacccgtgtataaagctaaatactaacggctcgcgctaaaggacaatattaaacgagacatcaaaatgtcttgaagaaaaagtacttaaacctaacatgtggatagaagatctaactactcatgtaagcaatgaaaatatatacaaagtgacaaggtcattaaaaatatatttaagtttgcttgaaatgagatcaatattgatgatcacgaggcagaatcaatgactgcttgcaaagcgagtgaagggcaaatgataagttgttcacgcgtaaagtaggttattaactacttaacgttagaaagaaatacgagcaatggaaacccctaagaaactttatgcatatgattatttagattgtgaatgaaactcaagcaaacaaccgtatattgaagtttaaacttaaaagtatgaggcattaaaaagcaaagttggccatccaaatttgtaaatttgtctttacaaaaaatgc

SEQ ID NO: 98389 - DNA, 1133 bp, Cannabis sativa
tgttgtttggatgtcatttttataaaataccgtaaaaatatttaaaaaaaatctttaaacgtaaaataaaaataatattttatgtaattatttattgagttatttatttttataatgtgccgtatggtaaagttgaacaacattttaataattcaaaactggtaactgcaccacaaaacattttaaatagtatttttttacggtgctatccggtgtcgacggtttgaactctttgagctgtttgatgaacaacctgtggagtgaaatctgaccaaaccccaaccaccaaaggtccgtccctctgttctctctcgttctcgcgagacccaggccggcgatcggcaacccaacccctctctccctcgctcggcgaaccagactggcgacccataccccctctccaccctatctcctctcttgtctctctcgatacaagatggagaccgagaccacaccactcgccctcctcggtcctctctccatctctctgtttgatcggtgccgccaccggattgtcgtcgaaggccaagcccgccccctctgcatttctgttcaggtatatgtatctatatatatatatatatatatatatatatttcttaccacacaaagttagttttcattctgtatttgttctatgaattccattgagagctttgggctcttccattattataattctattttttttttcaaaacaaaacaaaactgtttttttattactttgaaaaaaataatgttgtttctgcaattatttttcgtagcttttggtttccctgtaatttataatagccatttcatagagaatccttgctatggattagagagaaataaagtacgagacagtagcaaagcaaaatagggaataagatagtttgtaagtattgaaacaatcaggaattcgaggacacaaaggacacaggtcatcttttcatttttcacctattttttctcttgagattagtgatatcattgatattgataaatgtttgtaagtatttggtaatgataataaatggttgatcttagtataacctcaatcccttcatcctcatgattgatgggttttcgatttttgtcgaagaaaagtgcttctagtcatgagcaagcataacttcttttttttttttttt

SEQ ID NO: 98390 - DNA, 700 bp, Cannabis sativa
caacaagatatatactggttcaagatcgatagatcgacgtgatctatgactctactctagttctggaacaccactataatcctcatttattgattgagcaagaataggtacaatacagtcgagatgagattctttgttgagttcttacgtgattcttcttataaaattcaaactcaatctctctcttttctctgcacctctctctatacctttgaatcttttctctcttagactctcaatctcttctctctgagttctcgaaactccgaaattccgtctcttctcaaaaggtaagtaaggtgatatatataggcttaggatcaagattctaaagtcagtagctaccagtttcaaggttgttaagttagttagaaataactaacttaaccaactcctcttagagtgaagcctccacgtcaatttaagtatcagggcctccgggaacgtagacgagctttcaaactcgcgaaccaagaacatttgttgaagatactcccgaataggataaagtctgctgaagtcgactatccgaatctaccattccaagagggatagccagctgaaaactcccttccaaactcaactatcattccccaagacttctttcaggaccaacaaccaagggtaaacatctttcccgaaaagacaattgcagaaactatttcacaattaccttatactatttgtttttttttttttt

SEQ ID NO: 98391 - DNA, 932 bp, Cannabis sativa
  modified_base (722)..(723): a, c, t, g, unknown or other
acaagtacaacacaattaaaaaccaatggtgccctcaatcttatcttctttcccaaaatataccattcttaacacttacctctaccatttctttctttcttttcttgtctatagaagtaagaactttttgctatgtatatatatttactagctatagcagctagagtgcaatatagttaaatttgaagagagtgattcacatgattgctgaattattactaatcggacaaaattgatgtttgtactttctagtgtcacttgttaaatcataaccaattcaacttgtttaaaagacataaatagcaagccaataaagaatataaataaatttataacactgtaattttttggtatacatataaaagtgacctccggtttggtgcattgttaaattctcaagttattttttttttctcaataaaaattagggtgattatacaatgcaccctcttcaaagggaaaagggatatactaatacactcttaacttgtttcagcctcaagaaaatttttttagtctatttttttttcatattcatgtacattataactatataagataacttacaaaattttgaagaattccgaataatttacaatatagaaaacaatgttcaaatagtttattttacacgcgtataaaataaaatagtcacgcgtgcaatactctatttgaacatagttttcggcatgttaaacttttttaaattttttaaaattttnnaggatgtcttaaataactataaccatgagaaaaaatttgactaaaaaattatttcaggtgctaaaacaaataagggtgtaccaatgtatccattttaagggggtacgttgtagaatttccctaaaaatcatactacaccaaaattcaaaggaaaataaaatgatataaagtgcgccttttttttagggtataaacaagaaaagtgagca

SEQ ID NO: 98392 - DNA, 639 bp, Cannabis sativa
cctactatttcttaggtgatcattactgtttcgtggttggccacgttgatcgcggggttgccactgcctacgttggggcatccttccactgcttctgccacggtcaccattgttatttctagagtttcctccaccactccgccttagacggacattgtaggagtcatcgcgtcccatatgatgaccgggtaggacttgctcattggcctggggtggtcgattattattgcggggaaccctgttggaggggtgactcctagtcctctcttggttccttgggcgctcttcaggtccatagaccaccctctccctctggttccttggggtaggaacctctcgagaataggtttgaggtatctgttgattgtgggcatcagtacccatcccttgagtgttttggttgcagtagcttcgtattaagttggcagcctcttgggtgcgatgatcttggttgtcttggcgcctcctcatctcacgagcatgatcttccagccaagattggaattctctcctttgattatcaagactttcagtcaaggccactcagcttgattttggtcttggtgcacagtttgaaactggccttgcatctggcctatcgcgtctcgcagctgatccatctgttggaatttattttac

SEQ ID NO: 98393 - DNA, 972 bp, Cannabis sativa
taatttttaaaaattatttaaattcatatttttttattaatagggtgtatttattattttatggtatgtaaataaaactccccaataataaatagtgtaaaaagatttttttttttatttatggacattgattttagtgttatttgttataattcagtggaaattttctaaaaagagtgatgctatctcaacagaaaagtcaggggttacaggcccaaaggcctaaggatgtactgtacagcccacgaaatattagtcgggtcaaacccgtaattaacatacagaatatcgggctatcgggtctctccatctcttcgctctctctctctggaattttgggttcaagacttcaggtcgttgattttgtcactgtttgttgatcaagacgttatggcgtaaagcccacaacttccgagtcagttagctgctaaatctaacagttaatgaatctgattgaagcaaatgggttacgcttctctgattttcttgcttctcctcaatctgattctacccttttcatctggtaaatctatttctctctctttttaagtatgtagatgcacatacatacatctgtttattgttccggtctttcgtctttattccatatttatcacacgattacaaaaaattataaattttggtttttggaagttttctatttgtttttttaattgaaggtattgtgtaattttatgtagattttcccgtttatgttcaaaattttgtaactgggtgattcaagatttaatattttggtgtgattattgatagtcctaatgatttcttatcaattttcctttttgactagagatcttttatcattgtttgaagtttttcttagagtatgttaataagattaatactggtacatacagcacctcgttggtggttgtggctgaagtgtagaactattagtctattactagtgaaattatacatctttagtattctttatgcttgtttgttttg

SEQ ID NO: 98394 - DNA, 813 bp, Cannabis sativa
cgattggttttctaaatatgaatacatttgtaaatattaatatatcaggtcatatatatatgggaaccaatttgatgtggaagaagcaataacatttggtagagatgtcgctagttttattagtggaactttcatgaaagtaagagttatttttttttgaaaggatgaaagtaagagttattattacttttcttatttgtatacaatcaattgggtcaaatgagtattgtcttaatttatctccgttgcctttattattttgctcatgaaaagctttagattgtttgtatgagtttggagaatggctgccatattagtatatttgttagctttatgattgatttgtttctaacattttttatggatcttttggaccatttatgttcttctaagcaggtaaaacatttcaatatgtgtaaccatctgagtttttataagccaagtaattggttgaatcaaagtattcttgaataaatgtctaaaaaatcgttattttcttgggtagtggatagacttttaagacacaacttcttagctcatgcttcaacatcattgaaatttgctatatgttttgtataccatttgacaatatgctatttttaagaattcttctctctttacaataattacatgtttcatttttatgagaaaacagctacatataataaatttataagataagtttgtttgtattgttttatgtggtccttcagggtgcttcttctcatattgcattctgttatatgacatactcatatttgtgtttattcaaattatttcttacaaataaattaagaatcctgtgttaaacaa

SEQ ID NO: 98395 - DNA, 1199 bp, Cannabis sativa
agagagagagagagagaagtatttagacggtttagtatgaaattaaaactgaaaaagtaagtgtagagggagaagcaactatcaaatcgtaatgattacatgcaaaaccataaaaaaaaaaatagttatgtaaaaaaactgatacaaaaatttgaaaacataaaatgactaaaataacctacagaaactacaaacaataaaatatgagctctttaaacatacatttcatatttatgggctttaaaagcccataaaacatgcccaaagtttaaaataagcataaaaagtattcaaactaaactatgtcatatttatcataaaacattttaaaaaaaccataacgtaattttcactattataagaagtgggttgggcttattgggcttgagtccatcatcctttttcaatattaacatacatgacattttgtttagcaaaaaaaaaaacatacatgacattttaacatcggagggagggagaaatgcaaacaacttgtccaagtgaaatctttggtgaattatacttccatgattaatctgccaatgttgctaaaactatataaacacctggtacggacacgtggtaatgatcaaaaggttgagaggggatttggtgtgaaatggacggaggattggggattaggaatgaggaaaggggacatagactgagtccgcttgtggcggatctgatctgatcaaagtgagtgcagttgtgaatacacagtgtggtggcacatttggtggaaaaaggctgacacggacgttgaccttattgtacggagtgtctacattatagtcagagacattaatcattttctttctcattcttatgataatgtttgtcacaaattttttaaaaaaatataataatatatacttttcctgttttcacataaaagggagagaaacccctgatacgatttggtttgatgtatttttttgttaacagcaaatttgatttgatattaatatattattattttattttaattttattttatggctgacaaaaagataccaaatctccagtgtagtaagaggcttgatgaagcccttttcaagacttgggcaaccaccaacattttcttgttagacctttatttgtatagactaaaacatacatgattatgaataaagtgcagaattaataaatcatatatgcactataatttaagtatcgaaatacctccagtcattgaa

SEQ ID NO: 98396 - DNA, 675 bp, Cannabis sativa
ggatgttaactttaatgatcttgacaaaaaaaaaaaaaaacaacaaacccatatttgttcataccagtatatatggatatatctatttttagtattaagataataattcaaattttttattgagaaatttataaatttatatatattttattaatatattaccaaaaaaaattatttataatttattatacatttttttaattattagaaatatattctcatttttatatataaattatatatatataataataaatgtatcatatctaatttaatttgatgattattattactaattaattaatttaattataattttatcatatctagttttttttgctatcacaatttcaaccttattaccaatcatattaataaataattagattataattttttttattaaatactaaaaaatataaatattctaccggcagagataaaaatggtgtccctagtgtgtcctattcataataattttcttctttcaagagttttgatgatgtattacttgtgaaaagctaaaaatagctatgattaatgtaagaagataattatgaacaaattaatttcctttcaaaaagaaaaaaacgtgaaaactttaacacaaacataataagggaaaaaaagagagatttaactagaaaatttaaaaaagcaaaaggaaaaaatatt

SEQ ID NO: 98397 - DNA, 586 bp, Cannabis sativa
aaaaaaaactttatcccttatagcattaatgtaagagtcattatttctgtgtggtaaattatgtaaataccttgtgttcattttactatcttagtatatttcattggtcatctaagttgcttttagtttcatatgttgtcttagtatctgttatggtttgccatgtcagctttcttgttattttgattatattttttccgttagtgccagctattttttgctaggttgttagttagtcgagttaattctttctcaacaggatatataatattcggttgtctctttttctaattaactctctttttgatagaattgttttcttgattcttgctctgctagggcaaaatattcttttgtatttttttggtttatatgcagatggatatccagtgtacattatatcaagaggttgaagaaggagttcgaatttgctttgtctgaggagagttcagagtgaactgttggaggctcatcagctgcgtggatgcaaggcgaccttgtgttcttggatctaaatgtgtttagatctcttaacttgagtttgttcaagtgttaggtaacatcgtgtaaaagtcatttcagatta

SEQ ID NO: 98398 - DNA, 991 bp, Cannabis sativa
ttacaatacaaataactatcatccgcgaaaagcatgtgagaaaccatcggggctcctctagccacaaggcagccaatcaaccaatgatgccattcatatttcttcaacaaggaagataaaccctctgcacaaatcaagaacagatacagagatagtggatccccttgtctcaaacctctgccaggattgattgggtccattgtatgttcaccgtgagtcacattgtaagttaccgtagagacacaaaatttaattaactgcacccaccgattactaaaccccatacaaagaagcaagttctcaacaaaagtccattcaacacggtcataggctttactcatattaagtttaatagccatagatccatccttgccaatcctctttcgcttcgaatagtgcataatttttaaggcgaccattacattgtcagagattaaatgtcccggatgaaaagtactttgagtattcgaattacagccagaaaaatctcttctaatctattagccaaaaccttcgatattatcttatagagcacattacacaatgaaatgggtcgaagatcaattatcacctctggttgtttcttttttgtgcaattcaatattaaatcttagtacatatatattaatttaataactaatataaaaaaaaatctgatatccacttttgaaaactacttatcatcttaaggttatcttaaggtataaaataactaaactctagtaatgatattagaagcacaaatataatttcttgttatagttatctttcaatattaccacttatccaaaacaaaattactagtatttttttatttaagcgtttatatattagaatgtataaatataaattagaactcgaacccaaaatttctaatatacacgcaccttcttatagccacttcagctagcccccaagtataataaaattaccagtgtgttagtataatgattcatatcaattctatgagcactcacaataaattttatac

SEQ ID NO: 98399 - DNA, 1010 bp, Cannabis sativa
tggaggcttgaagcggggacgttacaattatcaaataaaatctactatttaaatatatttattaattaaaacctcataatctcttaattaacaaataaaccttctctcttactttctcctcaaattttccctccctttagtataatatgggaatcatgggcttatgtaaccgaactattaatatgtagttcccgaaatatatgaataattttcctaattactaatttcttctgactccactatagattcagaattacactcttaattacataatatatttgatggatttgatctaatctaatccaacaaatgtacatagatgcatcaaaaggagcaatttcaattggaatggatcaattggcaaaatccaacacccaaagcataattgaattatctttaaatacgcctaaaaatattaaatgtgatccaataaacagtcctaatactaataacctatccttttgatatctttctctcaacctgaaaacacagatttatgctcatccagtttgttataacaaagcttgtggaccttctcaatttcaatcatatattgatcaattttataaattttaagaaaataatgttccattttgtaccttaagtccaagaaaattggaatagtcataagcctaagaactaaaaagtcttttcccaatacttttgaaatttctatgtagtagtcatgcccttgatgaaggacttatttgatgtcatccatgcttctcattataattcaacacatatttggggagaatcgttcatgttggtacaaactaatgttctgaagatttaagatgccaagattacaaggattttattcggactaaaataatatgtacacgtgtgatacaatttttttgaaaacttaatgaaagaaggatacaaaaatcatcctatacgtgattaattattattttgaatagaataacctttacaagtattgaaaaaacttgccaatgtattatttgaacgttatcctaaattttcatgaatgaatgaacaacaat

SEQ ID NO: 98400 - DNA, 557 bp, Cannabis sativa
ttctcaagcaacatatacttttttcgtagaagaaaactccactatattttcgatcatctatggaagcaaatatttgtgttttttcaattcaaaagttgttattatttgccttaagataacaaataataatacttaaataatcttaaatatttaaatttaattcttgattacagataaatacttaagttaaatttttgaccgttaatggtcctgctattggagaccgattcatatatctctttcaatttaagagctagttatttttttaagcgtagtctcgattcaatttcgttgcgaatgggttagctcgaagcgctagagtctctagtcaagaatctgattttgttattggggagggattccttgtgtgattcccacatttgttgtttacgagggattcatcgtgtgattcccgccttattggtgcatattattaaatttttaatttttttgtttaaaaaattaattaaatatactaataaaaaagtaacatatgaatattaatttagtgagtgtattattatcgtcaaaaatcaaatttaaatatttatttacaa

SEQ ID NO: 98401 - DNA, 1089 bp, Cannabis sativa
ttatagggatttccttgatgactcacgatgcgaaagcgtaatttgctaagtgttggcattttgcgcagattgctcactgctcggtctagaggacctcgtccgagcaaatgtatgagctatcatgtacggcctgtgtcttgcgagcagatacccggagtcgattccacgtgtcactatcaggtgatgccacgtcagagtgcaaaaattaggataacagggacataaaccaaaacctgggacctagaccgagaccaaaacctagacccaaaaactgaggccggacccaagacctaagaaggagactcggacctgggacccaaaatttggacccacactaactgggaaccgaacccaaactgggacctggacttagaccgggactcgagacccaaacccgaaccagagcacgaacttggacccaaactgggacctaggacctgaacatagatgggggacaacagaccctagaattgggccctaaaattgggaccagaacttgggcctcaaaacatggatcgggatccaagacccgaccccagaccaaaacatggacctaggacccacctcggaacctgggatctgagactggatgcttggactcgacccatagttggtgtcttgattatggacttacaccagaatcccaacccaaactcgaactcaaaccaggacccgaacacatacctagacccaaaaccacactcgggaaccaaaaccgaaacttgaactggaatcggactgggatcttagaatggtactaggatcttgacccagacccaaacccagaacttgactcaacctcagaccctaatcgagaccgaaacatagacctgaacctcgcctcggacccaaatgaggaccgaaacccaaactcggacccaaacaggacacgaaatcggtaccctatgacttgaaagtggaaccgaaatttgaagctgattgggacccaggaacaggaccaggacctagacctagacccaaaattgtaaccggaccaagaccactactcaaacacaaacccaccttaggatttggtcccaaacttgaatccaagcccgaactggtactcgggacctgaacctagacctg

SEQ ID NO: 98402 - DNA, 1158 bp, Cannabis sativa
  modified_base (37)..(40): a, c, t, g, unknown or other
tctattatgatatagtattaatgattatttattgttnnnnttgttacattgatatttttttagttttttaattttttttttctagtgtaactatatttaattataacttcccaagtagaatataatttacttggtctcaagtgtattctcggatagaagttctactgtacttaattccagtgtaaattactttgagagaataaatttaaaaattgtgtgatgattttccttttttcaattaacaaaatttattcttattttttttaataataaaaattaattcttaggatcattgcataaaatattatttaaaatctccataaaagcgatcatctcaattacattcttcataaaaattcacttaattatattataagccacataattacattgtttaaaaataaaaataaagttacaacttatcaaaagatttgagagttatttccttcaatgcataaacaaactttattcaataattagtttttttaacaatcaaatatacaataataaaagtatgatacatttaaattatataaatttacaatttactatctacaattgaatataaattagggatacttaaaaaaaaatggacataaaatatacgcatattttatcgaaagaaactaaagtaaaaaaaaaaaaatcaatccaaagacaaattcctttttcattgacatctaataaacatcctacaaatatatatataaatatatatatatataattatgaaataactcacatttcgcgtgcaattatatttatttttagcgataattaatttataaatttttttatataatataatgaaaaaataaaattttaaaaaaattactaataaatatatagaaaaattatcataagtttaaaattattgtcttcaccgtatcttacttgtagtaactactacattcaaaatcgatgtcatcactatatctcacttgtaatcaatatcatattgaaagtccttgtcatcgccgtattaacaattgagaacaaatcaatgaaataaaagtttgaaaacgaaaatgaccatgtaagctataagataatttatggcttatggtatatatatacacacagggtcggccctgaaaatatatgggcctaaggcaaatttgattttggggccctccaaaatatatataaaaaaatatt

SEQ ID NO: 98403 - DNA, 1539 bp, Cannabis sativa
aaattaaactgaaaacataattactagaaaagaaaccaaaatgactaacatatttttaccaacatcatatatggattcacctttagaaattactttgtcctctgcaataaaaaaaaacattgaaaacattattagtactaaaaaaaattaaaagggtcaaaaatcccaattacaaaacttaaaaattaattgtttagaataatagagaacttactacactcttttgggtggcacatacacctcaatccaacaccacaatttccatttgttttttcacattcattacaaatattaggcacatgatcaggcacatcaaaagaaaccctaatccccaatttgggattctcaaattcatcatcatcatagtacaatctagtgtaatgtgagcaattcaagtctctaggatgaaaacccatgtcaagtttttcaaaatcattaatgaataagctatcaaaacatctttttttgtcaacaacattttcatgcacaccacatgtttgtaataatgacagacagacactgttgttagtacttttactgtttgagcaattgaggagaagaagtgagttgggttttgatggttttggaaaaccagctgagattgaaacataagtgtgatgagatgaaataagaagaagaagaagaagaacaagtattgtcagaaatagtaacaagtttagaggtgtaattaatggaggagattgggtaaaggcctactgaggttctgtagtacagtttctgagattgacagaggagcatgtgattgaatggggatgaaagatttgaactttgaattggtaagaatggttcttgaattgggatttttccacaggtactaattgtcagagaatctttaatggcatatgatgttaagtaagaaaaacttgttagaattatgagaaggaaaatatgatgatgatgatgatgatggtggtggtggagtttcttgaatggtttcatttttttggttctttcttctttggcttgttttggggtttgaatttgaaatagtgaagaataatgttacatgatattataaagatcactactacaaattatagacaagagaatattactttactattactaccactttatttactttttctttgttctcttttaaaagaaggaaaaaaaaaaaagaacaagaaagattccactgttgaaatccataattttaatttctcttttgagcaatttggcatgttcaatggaccttaaactttattttttaagttcttttatgtatatataatgcacccctaaaaaagagtgcaatgaaccgatgtactttctatctgttttaatatttgagataattttttagtctaatttcttttatgattgtttatgttgtagttatttaaaatatcctacaaaattttgagagatttagtataatttaacacatcgaaaataagattcaaacaatctactgcatacgaaactcttattttatactcgtgtgaaataaactatttgaatcttattttcggtatgttaatttttctaaattttttaaaattttctcgaattttt

SEQ ID NO: 98404 - DNA, 2123 bp, Cannabis sativa
acatataatccataattattttggtgataatatatctcataagattcttgttatcacttttaaaatatcaccgtatattatctatgatcatatattttctatgatgatcggcctctttagggtcttttagttccacacatggtttcccaagtggaatttgttcactgatctcagtattagtagcagtcgatggccttgggggatgagctgtggagctggttccgagacctcttttgggcatccgcgatgtaggtgtggtttcatcaccagttcaagtggctggcgtgcccctagtctgatggccaagtggttctttccgcacttgtggatcgagttgcaaacatcttgtaagtgacttcttgagttgtgactctcaatgaaagtaccaaaatattgacgcaaaaatttagccaacttgctcgtatgtatagacaatatgaaagttgtaagtaaatatgtaaagtaaagagcacacacaagaatttatagtagttcatttcttgtgttacaatagtaatagagctatgtctactttgagtttttattcgcacaagattgattacaagaaaaatagctaagtttgtaaactctaatttagagagagattctctaaccttatgggtacatttttgaatgtgaaaaatgagttagaggagctctcctttcatagggaatgaggttttattaaaataataataagatattctaaaaaatatggaaaaatatatttaggctatttttgactgttgatgatgatccaatggtgaattgactccaaaggtcggtcgtcaatttttgatgcttgactcacgtctgcgagacccacttcgtgtaagttgtaccttaaatttgtaactttcttaaagacaaaatttggagttgataacttcaaaattgcgattggggcgtgagacatgacttgatagagcattaaaatagcttcgaaatgcaaattgaatcgtgtcaatcgaatcaatattgagtgaattatggttgttttattgaaagctgttttgggacagtgcccaagttgacatatgacgccaacatggacgttgggtgagtgggaaaacattctgggacgtattttttttatacctaagtgatattttgacatcacttagttatttcttgtgttctagggaaagtcgttcaccagttctcgaagatattgttattttgcggaattaggagactcgaaactgatcgatttgcaagtaagttactttttcgaaaaagtgaaaatatgaagttataaatttgacttctttgacttcatagatctcagttactatgaaaaactagatgaaagctcaattcagaatcagaataggataaggagaacccaacgcaccaggtcacatgttagcttgggcattgggtgctctttctggagcttccaggaagctgttttgatacttccaaggctcttgaatttgggaaagaggtctcctacacatttttaaccatgctagagagaatgctcggagcattctttgcatttgagtgattgaaaccagcgcacaaggttgattgtcaacctgggctcaattttcatgcccctggaattcttattttctcctcgagtttacttgtatctttatttttttttatgacaaaaaaaattcctaaaacacctttttaaaaacatgattggaaacagcccatgttgacagaatgtcaacctaggcgctaggcccaacaccaagtgtcaacttgggcgctgggtctagttttaggctgctagatggttctgtttgattcttagaaatacttgtatcttatctttgatgaaaacagagaacatgcccagaagacttctcgaaaagactccttagaattggcccaatttgacaaaacatcacctgggcgctgagccctctttttggctcccaagttagtttgtttcttccttgtaagtacttgtttccttgtttttgatgaagatgaagaaaattcatgtgatagatcttcagtttgatgtttggaagtgacccaagttgacaatatgtcaacctgggcattaggtgcctcaagcacttggtgctccgattgctcaaaaacaaaaaagctttgaatctgattctaatgcctcaaatatgtttgtgacatgtctaattcat

SEQ ID NO: 98405 - DNA, 886 bp, Cannabis sativa
attcaaagttctgcttttcctcttcagcacaaagcctagtcctttctcagtctatgtttttgtcgacgaggttagcaagcttaacaattttcattacattaatggcacccctttctaagcgaaggcctatataataacattagttgcagaattaatagtaggagtaggaaacttgataataagactgttgcttttgtcaaaattgttgacttcaattttatattttgcagctgtgtaatcgatctatgcagcaagagcctagcttgtttggtgtaaaggtgagtgcttttctatttaaattgattgtttcaagcagttgttgcagtataagattggaatcttttgttgttttttcctgctacttttaaaaatgtaaaatgatgtgtatattcttgtgtattcatcaagctgcaagaattagttacaccatttagggtacttgggttgcattcttcagagtttatatgtttataaatgtgatcataaaccttcaaacctatgttaataattgttttttgagaattagcttctgaaaaccaagaaagaatcatcatctcaaaccctatctttcttgctaatatgagctttcattgcctctgattcatatatttcctgttctccagttacacctttgggtgtcaaattaaaataaaccagatggtcatacaaacttatttgattggatattgctgatttaatgaaactttttcaaagaacatgaactgcatctatttttccacaagtgagaagttccataccaactctcattgttgagttcattgaatttcataatcttgagcaagtataagcctatatgtttacaatcccatttctaactttggccggttctatttatttcagactctgtatgcacacaaagtcgaag

SEQ ID NO: 98406 - DNA, 605 bp, Cannabis sativa
gaatgtatatgagatgaaatggcttgaaaagtttctatttttgtcttactcaaactctattgattctgataccatattctccatttttctaaatttcaatcaaagaagtaaactgatgccattttacctacgttttatgtgttctctaagaaatgtttctatgacagactggcagttgacacttgatatatctaagtaccttttcttatatttctcctttgcaggcattggagatcagtgctcgaatcggggtgttaaacaattcaccgaccaacttgttcaattttccggtgttaaaggattctgcatgtacgctaataaattacaacatgacaattctgtattctgaccgttattatcattttacctttgagaactttgcattttataccctttgttcttaaaaaacactggtatgtcagttacagttactctttatttggctccatgctatgttcatgatgtcatataataactcattatactaaacaaaatatacctttaattgatttgtgaataaatcaagtaagaaacttaaaggtggatgaaaatgcgtgtttattatgtccagttctggttattttaactatgtcagtatacatttc

SEQ ID NO: 98407 - DNA, 628 bp, Cannabis sativa
aatgaggaagtcgtggacgaggctatcagcaaagtcgcagatggatcttcccctgctgctcccaatgcttaactttttcctttaatatttacttgcgttagactctcttttatatatatatatgcggtacaagggtacttgtgatttgtactttggacaagtttgtatttatttttcttttgaacgagtttacatcctttcagggatatttatctataacattttcgcagtactcgggtactcgcgtgttttgctatttataatatctcgattgcgacttaactacagcttggtgtaataagtattaaggtaggaaaattttaaaacttggaaaatttcgaaaaaattcataactcttaagtaatcaatagtacatagtggtatataccccgtatacataggatttttatgaaaaaatgactaagtataaatacatagcgagtacaaactatacagtgcgagtactaatgataataaaattgtaagctctcgccattccaggctcttcgaatcgcagtaccatcgagttctgcgagtcggtacgttgcatcgccaaccttttctacgataagatatggtccttcccaattgtccctgaagaccccatgcgctgggttcttcgtgtttg

SEQ ID NO: 98408 - DNA, 1882 bp, Cannabis sativa
ttgggtgaatgatttgagcggacctacggcgtagttttttcccgcattgggttttcaagtaaatttgcttgatttgtgtattttatattgtttgtggtactttggttgatatttgatattgcttattgtgatgtttgataagtatcccatttttgacatacaaagaaggaaaatattgtggttaattgcaatagatttttcctcacggttatttgttattttatttattttaatttattattggagacataaagtaacaataatttatttcattttgttgctatttatgtgaaaaaaaaatacttttttcataaatattaaacaatttaatattaagaagtaactaatccaaaataatcgatctaatccgtacttttccgaattagatttgagctattgtgcggattaaattagattcaaaatatgaaatttacaattagtgcggatcggatgcactatgagcaaaatagtgcgaattggattgaatgaacacccctgctgtcacatgttcattcaggatgaaaatctagtagtattcacattgttttgatgcttcacagctaacagcttatgtgttatttagttgaagatgttgttagagtttgtgtcctgattttaaacgaacttggtttgtctatttttactgagtatatgctcaatgagcaatatctgcatgtaatgtaatggactatgtctgatttactaattaatggaaaatgtgtcaatcttaaaaaaaaaattataaagacacatgtaaatggcatggatcataatgtggtaattttggtaataattaacaatttgctacgtttgaatggcttgtgtaatcataataccgtgactacttgtaactagtttcctcttatccttgcttaaaattagaaagtgtcttatacatactaatattactcatataagaagtaatcatgtataatttatatatatttatataatttgattctccatcatgtgtcactattcatgaacatatatatatatagctaaattaaggatttgaaaatgttataactattaattaattagttaattatacaatacacatatatgcataaataatacttgaatgaaacatgattttcgatgtaaataattaaataactatcaaacagtgatttttttaatatattactaaatgaaatgaaaagctcgccattggaaaaaaaaaatgttaagagaatgatatatttttttttttattaaaaaattaaaagtaactatattaatttataattgatcgtatattcataacagtaatttttttaaaaaaattatttcatcatagtatttaatttgtcatgaatctatttatttttcttcatacaaaaaaggaaacggtcgaatcaagcattcaaactataaatgaatacatagttgtttttattattattatcattatttatgaaacagtcttcaataactggattgagcattatcacttgaatttttgtttttcctttttgtaattggggaaacttattaaattagttttgattattattggcaataatattgttagaagagctctcgtacgtcattgtgagtggtccattacccaaattcaagcaacatctcccgtgggtatattttatttatgtacatggttccaaattccatgcattatatagaggaaaatttgattttttttttaatgcatgcattaatttaaaaataataacttaaatttaagttgcacaatattagtagtatatgtatattttaggattttgttcctaaaatattcttccatacactgcacgtttgttatacagtactaagaatcgaaataaagtaatagagaaatgtaacagaataaatgaagaataatcagaatcaatatttgtaatatgttatttattaaatt

SEQ ID NO: 98409 - DNA, 1486 bp, Cannabis sativa
aagtcattgtcgacatgttgctaaaagaatgtaatgggatttctgtcatccatgttgggatgggttgtgtgggtaaatctactcttgctcaacttgtttatgatgataatcaagtacaaaagcattttgggctaagagtatgtgttactctatcagatgagtttgatatttcgaaaatgtggtattgataactcaaatgaaattcaaaggaggttgaagggaaagaaattcttgatgatgtttggaacgagtcttattcactttgggacagtttgaagagttgttttgagtctggatcacatggaagtagaattattgttactactcgaagcacaactgtagcctctactatgactggacatattcatcaactacaaactttgatgaatgaagattgctggcaattatttgtcaactttcagaaacatctttgatctcaatgactatcaagatttgcaagtaattgataggaaaattgtggacaagtgcaaaggtcttcccttagcagtaaaatctcttggtgggttattgcgttctgaaccaaattccaaaaaattagaggacatacttatcagtgacacatgggaggagttgtacaagaaggagggttccattcttccagctttaaggttaagctatcgccacttaccttcacatctcaagcaatgttttgcgtattgttccatatttcccaaagattatcaatttgaaagagaaaaatttatctccaaatgcatgacctaatacacaatttagctatgcttgtataaggtgatttttgttttaggttggatttgaataatgatttacttgatctttcaacaatgacccgtcatttgtcatacattatgagtcttatactacttaagaaactttttcaagtacaatatgttgcttaaagtaggaagttgctaaagagtactttctttaagtgaatctttgatcaaggagtttcctgaatcaattggcaatctacaacattcaaggtacttggacttgtctttgtacattgtataatttacagactttggtattgtcaaagtgtagaaacctttgtcaactgccaaagaagattgaaaacttaatcaacttgcaatatcaaacacttgaatttcttatccaatgtggctttgagtgatagaaatagtgaagagtttaagatgaaaagagtagcagagcttgataatttacgttgcatttcggggttggaaaacatcagaagcttcacaggctaggataagaaatacttgatgcacttcgaccacatacaaatttggaacatcttgagattcaaaattatagaggtacaacattgtcggattggattggagattctgtattttctaatttagtatcaatcagattactctattgtaaaaattgttgtgttttaccaccacttggatgtgaaagtttgtactctataggtggtgatgatgatgagataattcatgacaagggtcctctatttagttctctagaacaa

SEQ ID NO: 98410 - DNA, 573 bp, Cannabis sativa
  modified_base (515)..(533): a, c, t, g, unknown or other
cccatcaggcaacagggttccaaatcccgtttcaaaaacatcactaggcctatcaagttgattaagaactctcaatgccacataagatcgggtagcatccgaatcaaataaaacagtaaatacaagaccgttgataagaagttgacctgtaaccactgaagggctggtagtagcatcgacctgagttatagcaaatacacgtgcaggtgcgggtttggcttcaggctttggttcctctttcttcaattgaggacagtctttcttgaggtgtcccactgagccacactggaaacaggctctccggttacaagtctcggggtgatgtttcttgcaacgcggtcactcaggataggagtaagtttgacgtcctcatttattctggtttcctcgaaaccttttaccttgccctgaacttcccgaaaacgtaaaagttctcttctttttctcaaatgtggggccagcactctcttttccagaactgggaacagggagggtatgttgggttttatgccctnnnnnnnnnnnnnnnnnnntgtaatccagattattctatatcaataaagtaacagaagt

SEQ ID NO: 98411 - DNA, 1178 bp, Cannabis sativa
aataatataattcctcaattaactcataattatctagttagggttttgctaatccttttcttaatcccgggtattacaattctcatcccccttgctcaatcaatcaactttgctttgttggactatgaaactatgtagcatacttgctttagcattgtagtcttgagcagcttctatttcaacaagttggaaatcttcatccctcgggtgttgttgggtagcagttcttgcttcaagatacttatctttggctctataaaacttaacctccacatctcctatatagttcttattgaactttctaagagcatcctgaggtgacaaatttgaatatatatttattaaattttattaaagcaaaaaaataatgcaaagagcatcctaaggtgacaaatggcataaatggaaaatacacataattttatactatactgtatacagtataaatgtaaaagtaagtgaataacaatataaacaaataatttaaaaatagtatatcatgtaaattatcctaaagaaatgatagcaaatgactccaaatcataggactatgttagtaaatatgttcatttcaaaacttgtagagaaataacctttttagattatgtattatttatattatcttttggcacataaaaaaatcgataattttttttttcatattagtttttttttttaagaattagaagcaaattacttaaagattatggtatatctatattagttttgttaaaatcttttttatttgaaatttatgtcgctttttttaattgtttatgagttgttgtgggtcgttggtatataaattttgttgtacagtatatttctgttttgctatatagtatattattattcttagatgatatttactttttattttgctatgtacgtataatagtagtttataattttgttactataatacaaatattttaagggtgactactcaatagttacatttttattataaccatgatgtttacatttttgttgacttgtaatagtgggttaacaggttaacattcttttttttagaattaaattaactacaattaactgattttttaaaataattaatctttaatttgaatatttaaaaagtccttttttagatattaatattaataattttatttttatattgaagtctccattataattttttttaattataatat

SEQ ID NO: 98412 - DNA, 2388 bp, Cannabis sativa
  modified_base (1315)..(1319): a, c, t, g, unknown or other
gtataacatctttttctcaaaattagtttattttattttaaatatacttattttgctcaaccaatcgagcatgagtgcatagatagaatatttttggggtaatcaattaatttttgaattagctttgtttcaaaaacaaacaataattaaaagatctttaaatatatatactataagtataaaaatgaaaaaacctgaaaaaaaaaaaaaaaaaaaaacttaattacctgataactttatgttatttaatttttgactaaaatataatatttagatataaattgttattaatttagtattaattacaacaagtattgtaactaaaaagtaaaaatatattaatttatttgtgactacttttagtcgtgatttataatttgtaacaacttttttataatcataaattttataagtattagggtttagttagagtctttaattaattgatttatttcaaaatggttggcttgagttcaatggctttgtttgcccccttccattgtttgtggccatgatattatctgcctccctttatatggaaaaatattttgtttttttgttgtgtttatgagaattttgagtttaagaacaaaaaaagcaccctataaagattactattaactgacaaaataagaaagtattgtgtgaaattgatagagtctgagatggaatatgagtcttgtttacaaaggtatatataaagcgaaatatatattttttgtaatcattaggttctttgttagaattagttatacatatatataacaatttttttaattaaaaaaatttagttatagaaacactaaaaagaaataaaccaattatataaaaattaggttctgtatatataaaccctaatgttgacctaaataaagttcaaccctaaaaattactaaaaccaaatgagatacaaacaaatgatgcaacaattaaaatcagatatgtaacgtgacaagcatgtaagatattaagaagaaaaactacttactgtttgaagttagggtttggggcgatagaaagctcttcggcctgtgaatctttgaatgtagtgaggatctctttgagaatgtgaagtcggagaaaacttgcagaaaaaatgttaaggatagggatggcatacaaattctcaggcaaactcgatgctgtttcttagcaaagaagcttaagagtttctcaaaatttctaaaatggaggaaataatgaaaggtgattccttttttttactttatacccttgaaatcagtttcgtcagatcagagagatgtttgatcctatggacaaaattcaaagtagaagtggaaaagatggtcatttnnnnntgatgtacctcgaaactgcaaaaccgccaaaatcagaggacatgcattttttcaaaaggaattatgacaaatataccctttgtaatcattaaaaagcactttttaaggggtaattgttatacccgaaattcggctagcacatcagagaaaaacacgtgtcaagctgggaagaatacaaattaaggcatgtaattataattacatttgaggtggaataactcgttaaaaacataattgacagagtatatttagagctctgttgactaaatagtcttatgcaagataaagatatacaaaccgttgccttgcacatcaacgagaaaccatgtaactttaggtgtataagacgaggcattaacctcgattacgtggatgagatatactgactgtgaagacacttagcgtataatatgcggtatacaatctaattataacagacgggcaaaacaagtgattgtgaggcgtccacctcgccatatgaagacatgcacacgaaaaagatcacctcgtcaccaaaaactgcgattgtcagatagggtgttatgttcccagagtaaaagcgacgagatttacattatcaaccttgaaaagaaatagggaaggctccagctcgctatcaaggttaccgctgctttatttccagcgagacgtcccagaacgatacggtttacaatgtatttaatacacgttttattttgacccagtaaaagcggactagtaatcacatctgtgtgatattcaaataataatcgcatttattttacgtaatatgtaatcagactctataatttcaggggataatcgttgtaaaaatatcaatcaactcagtaattaactgcctactatgtgattataaatagaggcaagatagactaagaaaggggcgaaaaaattcataagaaaaaaggccctgaaaaaccgtcaaaaatctaataaaatagacttgtggagtaggcagaattttaacatcaaaaccacgtaaaaaatctttgtgttcattttcttttctatactgtatttatttttttgtacaagtttatcattcagactcaaatttggttaacgaaaa

SEQ ID NO: 98413 - DNA, 733 bp, Cannabis sativa
ttaagtgttacaaatcataaagttcaagtggtttagctgccaatatcccttattttaatgttaaaaaaagaaaaagaaaattcggtgtagtctatagactcccatatatataggataacatttagtgttccattaaagcacttttgtatctaaattccctaatttttaaaattttagtatctcattggagaaattaaccctaagacacccaagagtcattcttcaaaaaaagtgtatgaattttactcaccttcaatttatttaacacacacgcttcttaaagatcactatgagtaaataattccctaagtcccataaactttttttaatatcaggttacatattattttagctcaagagaccaaacatcgtgttttttgaggtagatattattaacccaccttaactgcagggctggccttgagcatagccggactaggcctgtgcctagggacttagctcaagggcccaaaaaaaatttgtcatcttttaaaattacacatttttttatcaattttgaaaaataccatattttttttctaaacgaggatccaaaaatatttttttttcctatgtcccactaaatttcagggtcggccctgctcaactgcaataaatcttacttcgatgccacagtccaaaggtgcttgctaaagctgctttgttccatttagtcccctcacaaaagccaaaaccccgtttcaggtagtcgctttcattcccgtttcaaaga

SEQ ID NO: 98414 - DNA, 746 bp, Cannabis sativa
  modified_base (637)..(662): a, c, t, g, unknown or other
tttatttatttttttacatttataaaaaggagtattttgtagctaaacactcttaactattagttagtttatttttttttttaaataaaaattatataatttattaattaataaattcgttcaaaataatagaatgcactgcagaggaaactgaagtatacaacctgtaaagaaataagagtcttttgtcaagcaatgagcaaacttatttgctaaacacttttaactattagtcagtctatttgttcttaatcttttacacttaaattttaacgttaaaactctctaaacttttgaattgataataaatttaaggtatcatctattttttataattaaaaattaatataaacggcttatatgtacacttttatatatatgtcacatttatattggtataccgaatattattatttaaaaaatatttcaaaatttataatatattatttattttttaaaatattttatattttatttttataatttatttgattttaaaataaattttgaattttttttaaataaatgacaccttaaatttgctacaagttcagtagtttggagggttttattaccaaaatttgatgcaagtgaaacggcaataggagagtttaactgttgggattttatgccctannnnnnnnnnnnnnnnnnnnnnnnnnatttactaattaataaaagattaaaaatcattttatgttgcatggttcacttaatttctttcatgattatatgtttaatgtata

SEQ ID NO: 98415 - DNA, 1459 bp, Cannabis sativa
ttttatagacacaactagtagttgggaagatgggataataaatgtcaaaaatgaattacacacttgtacacgtgtttgtcatgcatagagtaatctgggcaacatttcgcgacaactcactacactatgcgacatgttctcgataaacatgtcgtattaccgacatgttagcgacattattatcgacattgtacacgtgtttgacatgcagtgtgcaattagggatatttcaagacattttagtgacatttattgacatgacactttacaaatagaaacatgatttgttagcgacattttcgtgatgttatcgattacaattcacgattacttgcgatatacaacgatgtctatacaattttaattaaagcgtttaaaaaacacaaaaaaaaaaaaataacaaccctctaaaattgtaattatttaccaggttaaattttggtaaaacaagtctacacaccactgatctttgaacatcctcatgttatcatcattaatgttctttaatgatcgattcatcatgaggtgttcgatgtactcaatggtatataccccgcaatcaccactggaaaataaaaaacaatacatttagagactaaaaaaaattaatggtaagggaaatattaatatactatattaataaatattaccttgctttactttgggggaaccacttcacttggcatgcgtttagcatgcattgatctgagttggctactctcccctaactctacattgagaatgtaactgttgacatcgtaatagccagttgacagcagatgtggaaacatctgagtccaaggtagcataatggcttcaaattcttcgttactggtacacgagatatcattatcgtacacccgaatctgccaattatcaatgtctacctcaatagccacccaatatttttgtctttcgaagtgcaggacgaagtataagtagccttgatccttccaacatggcatgtaacgactctccatacccaaatagtactggatcactgcttctggccattcaaaggtaattctgtcacccttgtgacacccccaaatgccagtgaggaattgtggaagtgttgtgtccaaaatcacacctggctgagggtatgattctggaaaataaaaacgtctcctcagcatgtgtgatatagcatttatgtgctgcatgaaaatcagagaagaaataatcaaattgtcgcaaattaagtcgcataatgtcgcgaataaggtcgcataatgtcgccaacttgtcgcaaaaatattaataaatagcacttattttgtgttagtgacggtgttgcgacaatatcgtgacagtgtcgcgacatgtcgaaaataaaaacagagaacaataaaacataaaaatagtataaaataatacaataattaaatacttacatcatcgtccaaccaatcccccattagcaacaattttgtgaagaacttcacatcagcgacgc

SEQ ID NO: 98416 - DNA, 736 bp, Cannabis sativa
  modified_base (696)..(702): a, c, t, g, unknown or other
ttttaaaaaaaaatcaaattcttatattatatatgatttttctttatggaaaaaatttatataaataaatattttaggaacattttcttttttttttttttgtaaaaaaaaaataatagaaattataaataaataaataaaagagaaatgaatcttgttgggcagttgaatgactgtacattatatgattacaattgttattttttttttatgaattaacgtatacttagtaaattttctagaaattattattgagttgtgaaattcatatttttattttcaaatttataaacttatattgaagtgataatttaaacaaaattaatatttgtatgtacattatttttttaaaaaaaaaaagtttatttcatgtagttttttttttattatgaatttttatttttttttcaaaaaaaaaaaacaaaagtttattttatatagtttttttggtaaatttagtaacaaggtgttaaaagaaaactttaatgttaatgaaagaattgttatattaccttaaagttgaataaataaatatttgtttacaaatatattaatgaaaatatctttatattatataatttatatgtaaaagaaaaaattagttaggttggcgagtgggtttgggtccaactcaaaatttggtgtacataaaaaattaaggaataattatataagatattacttttttttttttannnnnnnaaaattatatttttacatttacagaatttttttt

SEQ ID NO: 98417 - DNA, 1756 bp, Cannabis sativa
  modified_base (167)..(169): a, c, t, g, unknown or other
aaggacataacacttatccaagaatatgtaagtagaatatgtaagtataccttgtaagtataccttaaagtataccttatctataccttatcgatgattatcatgtcagtctaaattcagtgtatagacaaatcacaggacataaacttttaaacatataatcatgnnnatattctactgtgttgacaacactataattatgaataactatatattctggatttaatagaatttgtacatgaaacatataatcatgaaataaatcatgtgatccatgtaacataaaatgatttctcatcttttattaattagtaaatctaattatattgaaatggattttatttagggcacaaaactcagtattaaaaactttagaagaaatataattttatcttaaaataaaataagtattgattggtaaaaatattttattatttaaattatgataactctaaattttatatttattttcctaaagtttttgtttttttttttatattttctcaaacttaataagattatcttaataatttgatctttttttatttaccatatttcgagttatgtgttttgtttttgcttttaccaattattaatatttatccttattctgtctcttttcttaatctctcattttttctttttctttatcttttttttaaaaaaaaaatctctgattttttactcgatttgtttttttttaaatatgtaccattttttaagtcttttgtacatttttactattttttttcatgtattttttaaaataaattttacttgcttatttttttatgtttttcttcttatttatttattagtaaatataatatagtgtaaaaattatataagtatatatatggtattaatcttttttgtggtgttattcttcttttctttataaatttttgttagttattattttatttttttctaaactttatttataattagtagataatagtagagaaaatcagacaagaaaattagacgagcttacatttagatattggagaaaataccatacttatgttcttgtttaaatatatttttttaatagttatttaaatataattgataaaagtaagagatatgaatataattcatatatattgatgggtattacgtgtttttggtacgtactccttaactagtatatctattctatataaaatgtgcctatgtaacagaatttttggtttatgaaaaattattgggtgattttttttaacacttttaaaatatttcaaatcaaaccttcctattctcacgaaaacgattcagtttgttaatcgcttttaagtaataacttatttattttttttatgaaaagaaataaattctcaatcaatttgtaaaccttatcaagcgaataaatcttatttgaaagactaaataatcagtttaacgattgacatagcaagtcaataaaataaaattaaatatataattaatattaaatagcttacgatttgtaagctaatatataaatataagtaataataaatatatattaacccccttcttgaaccatcaattatcattgattgtcgaatgcaccaagtctctctctctctctctctttctctctctttgaaaacccatccccgtaagccatccttgccaccttcgttccatacaatgacgagaaaccaaaacctcgtagccattgatggcccctcagtctccaagtataacttgtcatttgggctgccgaagtaatttggccatatggatgagtcgattaaagatggaagat

SEQ ID NO: 98418 - DNA, 541 bp, Cannabis sativa
gcattttaagatgtctatggatctttacatttataaagacaaattttagtctaatatatctagactttcttttgacaagtattccttttaaatttttccttattctgaaaataaaaataaagaagtagatgagctaagaaaaaagagagctattaacttcaaagattagaaaataaaagaaaaactgaaaaaaaatagagtagatgaaaatggacagattttgtggaattgtgaagcagacaatggctgcagttggcgagttctccttgatcaccaaggctaaagacaccgactttaacgagcaaaggaaataaccatgatatgactatcactaggtggaagaacatcatgaattcatcaagaccacactccaggacggagaaaataaccaagatcagatagttcaaaaaaaataaccgaatgttcttgcagctcattgaaaagaaaaaaaaaagattacaattggtgaccttctatcacatggttttacaagaggcagaaacaaattgtacaaaaggcaaaacctacccaaaacagagaa

SEQ ID NO: 98419 - DNA, 1367 bp, Cannabis sativa
acattcggggacaaaaagtaatcaccgtccccgtctcgttttccatttagacggggaattcccgccccattaggggcgggtccccgcgggttccatccctttggggaaaatgtgcatccctactcctagtaggtttttgtggtatagatgttttatcaattcttaacgcaaacacacaaactttcataatttggattataaattgggcactaatagagctaacacaagaactcttttagttgaatcaaaattgagctcgcactactagtgtacaaattaaagctttgtattttaattctttaaccaaaattggcttttagtgttaaaaagtttaatatataataaaaaattgtaatttctccttgtgacattaaggtttcatattagtcaaaattatttattataaaaaaattaattttttatatttttttaatattttaattttatatctctttctttagaataaaaaaatgtattttatgtaaaacaaaaattaattagtagagggtaaaactgtgtttgatggctaatgggggagagatcttgggattgggatatatggaagttattcaataatatgtttgatgctcagaatagggatttgattattggtatttagttgagtgacactacttactaagagtgatgatattgattggtatttgagtaaagaggcttgtcgcctttattctgttaaaagcgcatacaagtttctccaatctattgtagaagattatccgcttgtagaagacgattgcagctggaagaagttatggcagctggcagcgccttctaaagtccttcattttttgtggagagcttgtaaggaatgtctaccaactaaaagaatgtttgttttggtgtaattaagactcgaatagaatgaagattacaattacaatgtttaattaaaccttttaatttttgtaattcttttatattgtaatgagtattacgctacttgcatgaattcttatgtgtatgactcagagattataattactaatatattataaaaagatttttctatccgtctttttattacttctttatacaatgtagttgacaagaaagaaaatgaatacattttgatcaaaacattaattattcaattttatttttatactaaaccaaataaaaaaatttgattacaatatttattacaaaataaattaaacatagtaatagtaatcctattactattaccattacattctattattactatttttgttactattacaattacattctagtaaaccaaacgctactaaactataactgtaggattttcttggtgaaattccaagtttgccctacaccactcaagcaatatgtcaaaaaacgacagggacaaaattgtccca

SEQ ID NO: 98420 - DNA, 871 bp, Cannabis sativa
tctctatatttgtataggaattttaccacaaaattgcatttcttgtacgccatatttcatatacaagagctgctatgacaatagcaaaaatcgacttcttaaccttgcttattttttcctttcttatccaccttacaattctattgagggaagtggcagccattctccaattaaaccatgatttgatcttcttcaaacagtccaaggagaaaggacaatcaaagaagagatgtggtatggcttcatcctcaatattgcagagaaaaaatttagaattctcaacttctctataatgcaacttgtcgtttgccttgattctattgagcataaagagccaaaaaaaatgaaactatgcttgggtatgtttaatcagctccaaataattaaattccattcaactttataaaagataggccgaatagcttgaaaaccatctgccactttgtacctgtcattcagcacatgagatacaaaaaaattcctatttctttgtctttaatggcgaccatcttacgccaataccagttggctgttggagtggtcttataggaccaccaattttccttcttgctgtacacattatgcacccacttcatccacaaattgtcttcttttttttgtaatggtccaaacatacttaaacatagccactagaatccaatctgagatgctcttaaattccaatcctcctgccgatttggaaagacatacagaactccaggccacgactactgaacctgtaagagtatgacttccattccacaaaaaactacgacagatggattcaatttcatacacaatttttttttggcaatataatgacttgacaccaatatgaatgaatggccatcaacactgagttgatgagaac

SEQ ID NO: 98421 - DNA, 971 bp, Cannabis sativa
ttaaggtctctatgtattattctgagtctagaatcttggtggagatacaagagacctcgagaaattccacatataatttgatagcgttttgtccattgaagcagttttccttgcgcttgatctagtaaatgtatattcagaaatgaagcaggaaaaaaaaattgaaaagtggcaacaaaataaagaaactatgaaatatatcataaggttcttaggatactgaccaaaaataaaagagtcaagacttttgttgggcatgtattcataaaccagtaagttttcttctccatgaatgcaacaaccaagaagctttacaagattcctatgttgcagctttgcaattagctttacttcatttttgaactcatttactccttgtccagaactcattgaaagcctctttacagcaatttcttgtccatcttctaatgtaccctgaaattctcacattaacaaactggttgcttttctcttgtcaatgtatatatcatttcttttctttctaatgtaactttaaatatggaaaacttactctatatacaggtccgaaaccaccttctccaagcttattgttagctgaaaaattatctgtagctataattattgtagacaggttgaacaatggaagctccaaatcttcctcttgccttccattctgatgtattgctttgtttttatctgttatgtttataagacagaatgacttgaaaatatgagaacttttataaacgaacttctctctccaaagataccatacaacccaatttgattaatttatttatttatatcttattattcatattttttatcattgtcaaacttgatgcttaattgagaccctcagaacctcgatatctagagaacctattttcctcatttcgagatactacaaaaattttcagatcaaagaaaagatactacacaaattgatccagctaacatagcggtcaaaatctattgaaagcaaaaaa

SEQ ID NO: 98422 - DNA, 766 bp, Cannabis sativa
tggcttattatacccatctaattagtcatcaatcttgaaacatcattacatgtttcagcaatggtacttatgtaaagatatatgagtggttcgtatatatctacttatatgtgtgcatactagcattattatccagtgagtacaacttttactacaacatattaattcattatacactgttagtattgcacatgtaggattaattaactcttgttaagtttgggatacaattcaagtcattgtaaagaaaattagtgtagaagatagattgtggtttgatatgttgagtatgctcaacttgatttgtgcattgtgtatagttttttgagcaataaaattttactcacttccaaaaaaaaaaaacgttatttatgaaaaagtattcaagaatcaccacacaaacaaataatgacacagaatattatagtgttttttgcttgaggtggtagctaaaagcaaaaaaattgtctttcttagtgatgacactctaccataaaagtctgtgttaaaatgaatttttttgtaatacagttatatatgatattaattaatgagctacttttttaatatattttttaatcttaaatatctaatgtatccatgtctaaacatgagaatgagaaaaagttttattttggatttttaaataaattataataaaattcatatgaccaattttttgttggaatatattttaccaggacctaaatttactaacaaggatatttttaacattctaaatatgaatttttaaaacgataaaaat

SEQ ID NO: 98423 - DNA, 1163 bp, Cannabis sativa
tccttttgtctcgacctgaacaggggaagccccggtatttaatgttacattcaggggatttgattcccaaagcttccgtgatgcctttctttaacccattggaagtattttttctaaagaagattgaagtcttaagtttattgatttgtcgactgggccaatcacaaaaattctcaaggcattgcggccaaaagcctttagcctcaaccatcgcgaccctcccaaccaaaataagatcatccgcgaaaaaaatgtgtgaaagaatcggaccccctattgagcttaatgcctttgatactccctttaccaagagcatcttctagcagtcttgacaggatttctgtagcccatataaacaaataagggaatagcgggtcaccctggcgtaaatcgcaagagggcacaattcttctaacctaaccaccaataggcatatgtttaaagtggaggtagagatacactatgaaacccaatcgcaaaatttttctggggctctaaagcatgacatcacatggtcaacaaatttccaactcatgatcagcttgttataagctttcaccaggtcaattttaatagcaaagaagccatctttacctttctttctgttaaaagagtgaatgatctcctaaataattacattattatcttggatgtttctgcccagaacaaaagtcgcttgagtaggacaaatgagtcttgttaagataggcttgactttgttagctataattttggagatgaccttatacgacacattacaaagggaaatatgcctaaaatgatgggttctcttcgggtttgggatcttggggatgagcactagattcgttgcatcgatacccttatgcataaaaccagacttaaaagaacttggcatagcatcacaaaagtcttcacccattgactcccaatagtgtttaaagaaaagaactgacatcccatcaggcccaagggccttactactgcccatgacaaagagcatcttacgaatttcatcaaaggaaggaattctaaccagatcctccttttccaaatcagaaagcctatcatgaatgagattcccacaattcatcaccctactaacatcatttccagagaagatataggttaagaaatcgtgaactctttcccaattaggtctcgttttgaaatccaggtatcct

SEQ ID NO: 98424 - DNA, 503 bp, Cannabis sativa
caccactggtgcctaatagcaatgttctatagtttaatataataatttttattaagtatcgctaaccaatcgcaaagtgacacgtttttaaaaggttctaggcaccactggtgcctaatagcaatgctgtaatggtaaatataaaataatagcatttaatgtaatgtaaattttatattatgctatattgtgatccaaatttaaattactttttattatataaggtatttgcatcacaatttaacacgttattagaatagacttcttgataaaataaattatattttacatttaaatttcttatttgcatttttattgaagacgctgcctcaaaaattcaaagcatttgtaggaagcaatatttaaagcattttttttttttgaataataatgaaaacttcatcaacttaaatcgtccaaaaccagagaagaaattacaaaaggtaaagaagaaatattaaaagtacgatcagcctcatgaagagaggatcgcgccaaacaat

SEQ ID NO: 98425 - DNA, 743 bp, Cannabis sativa
aataatttgtcgacatgtggcattttatttgagtttaacggatctgttagaaaaaggaccaacggacttacagaaaatgcaacattggggactatcaccgccaatttttgaggttggggactaatctacatcaactctaagttttttgggacttttgccgcaattatccctaaaaattaaatctttatttatatatttgctgtcttcagtctatacatgtatatatatatgaaaaactgttaataattcattgctcaatttgttttgacagaccttagcagaagattcccctgttttaaaagtcaaaggagagcttgtttggctgtgttttcagttttcagtttttaaaatgtgtttttaaaactgagaatagaaaacagttttttgtcattttaaaaatttaatgatgtttggaacaaatttttaaaaactatttttagattttttcttacgaaaaaaaaaaatcaatattttagcaccataccatgacattaacccatctgggtctaggttcgggtatggttcgagtttaggatccgagtatgtgaacaaaatataaaatataatatgttagacaaaaaaaaaattatttttgaaaattggaaacaacattttgatgttttctagttttttaaaactcaatttttaaaaacagtttttaaaaatttttgccaaacaactcttaatagtttttaaactgtaaagccgaacaacctctaagattggaactaatgttaaacatg

SEQ ID NO: 98426 - DNA, 800 bp, Cannabis sativa
tttttattatgacttgaataggcaggaagaccaagataagtttcatgacattcacatattggcattcccaaagtttggctgaagaaattcttggcgtcattggttgtagtcggagagaaagacatgattgatttttgagtattgaggtattgtcccgaagcttgatggtaaacatctaggattctcttgatggccaaagcagagttattattcgcatgacaaaataagaggctatcatcagcgaataatagatgtgacacggatggagcatgcctagtgagttttagaccccgcaaattatccagttgttcttcatgttggagaagccttgatagtccttccgaacagattagtgagttttagaccccgcaaattatccagttgttctttatgttggagaagccttgatagtccttccgaacagattaagaagagatatggtgacaaagggtcgccttgccgaagacctcttgttggccaaacattaccaacaacttctccattcagttgaaatgagaaactattttgttgggagggagaagatggagagagataagaccaacgaattggaaattggaatgctgactaagtcagttaaaaaaaaaaacaaaattgggcccttttcttgcgtgagccctgtgcagtaggtctgcctgcgcaccattagggttgggcctgacaatcaatatatatatatatatatatataaaggagggttttgaaagaggctatgtggcatcatatatgagctatctttcctattctttattttttctattttcttatttattaaatttttt

SEQ ID NO: 98427 - DNA, 911 bp, Cannabis sativa
accacactttcggctgggtcaaggctctaataccatttgtaacgcccccgcttcaagcctctattgcgcccttacacccacaaaatcatggatcttatacacgagtacgtcactctagttacttcctagaaaaaaaaaatcccaaataaaaaaaattcaatttcactcgaaaaattcatatatcatcttaattaatgttataatcaaattattatagttgaaatccttacaaaaaaaaattacaaaagaaatgtcactaagcagcatttaacatataattgattgtgctaattttagaataatataaaatgtcatgaatgaaaatcaaagtttaaaaactaattatatatttttttcccggatttattaaatcatgaaaatgataatgaatactatttaattaatgtttattattagtgttataaagataaagtagtaatttcaacaaaatatgttagtttctaaaaataacttctaattctttaataatattggttggaattattgttctcaaattcataaaaaataatataattttaaaaaatattattagttacctgctatagcaagttattagattgacacattataaatttttttagtacccatcaacgggtattatccattaagaagtgttccatataaatatatatatatatatatatacacagttatatgcaattgtataacttagttttgttatataaaatttttaagttttttagaatatttatattattgttattgttattgatattttttaaacattttttttcctttttcttatccttaattttgttgtgttttgaatgtaatttttttattattattttatttttagattttgtaggtgggattttggaatttcagcttggataagaagttcacaaataaaaatttgtgtatagtat

SEQ ID NO: 98428 - DNA, 567 bp, Cannabis sativa
gtgagacttttatcatttgagtttgaactaaacctgcttaaggcttccattcttcctgttagagactaaacctcctttttctttcttggagaaggcatttcgagcagttcttttatcttttctgggttagcttcaattcctcttgtatttataataaaaccaagaaatttccctaaggacaccccgaacggcgttttttggatttagcttcatattgaatttttttcgatattacgaagcattccgcgaggtcttctacatggtccttgctcttgactgattctactagcatattatatgcatatacttccatgctctgacatatctagttttcgaacataccgttcacgacgcattgatatgttgctccagcatttttgagttcgaatgtcatgaccttgtaataatacaggcccatatttgtaatgaagcttttgtgttcttgatgtaaaatatgcaccttaatctagttgtacccagaatatgcatccataaaggtcatcaactcgtgtcctactgttgcgtcaaccagctggttgatatgtggcaacacaaatcagtcttttg

SEQ ID NO: 98429 - DNA, 788 bp, Cannabis sativa
ttgagaaatattttactgcttgaggtaattattattggtgatatacacatgtttatctatataatattaattgtttatgtgtacaaaattacaaattcagattttggaggcatttttttctttcaaaattatatttatgtgtaatgtatgttcaaaccatgcataattaattttgaatttttttatcacgagtgtatagtgttaatataaacctcctatttaatcttaattagttaatttctgcatccgaaaacacaattcaaaaaaaaaaaatttctccatttttttccatgataatttttattataattacaatattaactctgtaaaaattaaaaaaagtttacagtatcaataacagattaatttatgatattttaatttaccacgtgtgtttaaaaaatttcccgtttacaatcaacagcagacttcttgatatttcagactaatgttcaaaaaacttcaaacttatttatagcattgtaaattatttaaaatttttcataaatttacaaaaaatatataatattacaactataataaatacgattatgaaaaaaaatatatttcaacctagcatgtattttaactaaaaatttgtaattgacactcaattcactttaaatattaagacatggatctaacaaagtttttggatatataattaataaataaattaaaaaaaaattgttatatgaaatgatatacacacatctgatcataatatatatatctacagatagattcaattaatagtacaaattaattaatgggttcttgggcagctt

SEQ ID NO: 98430 - DNA, 820 bp, Cannabis sativa
tgaaccaggatctgagatatacctacttaccatggtcatggcatgtgctaaatctggtcttgaataaaccatagagtacatgaggctccctacacagctagcaaaaggaattttactcatttttgctctttcagcatctgttttgggtgattgtccagcaaacagtttgaaaggctgtgcaattggtgtagatactggtttactcttagacataccacatttggagagtaccttctgtagataggaggcttgggacagaacaatcactcctattgaaggtctcttaatgtctatgcctagaatcctcttagccctgcccaggtctttcatttcaaactcctcactgagttttcttttgagcttactaacttttgattttgacttactgattttgattattgaaatatacacaagagtcatacttacttttggtatatccaatgctctgcatgtaggtgtaaaacctcaaattacattatctaggagcttgtttgaggccatatagggacttcttgagtagaaaaacatcattaggattaccattttcaaacccctcaggttgctgcatatagatttcttcctctaattttccatgcaagaaagctgttctcacatccattggttcaatttccagatccatacttgcagcctttgccatcattgctcttattgaagcttgtttgacaactggagaaaaaatctctgtgtagtccacaccctccttttgagtaaacatttgctaccagccttgacttgaaccttggaggttcattttttgatccctctttgtgtttgaatagccatttacatccaactggtt

SEQ ID NO: 98431 - DNA, 676 bp, Cannabis sativa
tctcttttaatattttgttagtttgaatttgaagaaggtggctcttataaatatattttattcgaaggaattaaacttctctttgttgatcatgtatagaagaattgaaaattttgttttcataatcataatttcaacaatagtcttcttttgctcttcctcatacttattgatattctctattttgtagcctaactctatcatattggctatatctcctgcaaatcaagatattgctacatcagatgcaataaaacttgcaagagaagttgatccttcaggtagtctgatacttccgtgtcttattttacgttcattggttttcttttacaggctaagaaataatttctctccattataacttatgtttcaggtgaaagaacatttggagtgctaacaaaacttgatcttatggacaaaggaaccaatgcagttgatgtaagtatattagcatcttgaatgcagaattaaattagacaagaacttcaacctagtaaaaatttaacctttcaaatgattagttcatattctgcttctattctttctgggcttctctatctgaattctaacgaagttgaagatattccttttgtttttcttattcatctgattggaaggttataaggttcttacttcttgttgtatgtgttttaggttcttgaaggaaggtcataca

SEQ ID NO: 98432 - DNA, 886 bp, Cannabis sativa
ttctagtaccaaggtattggaatggggaacatttgagaaagtactaccagtaaatgtacaaggtcagatgaccactttaagtacacacagcaagagcatttactttaaagtagatgggtttctaggcggatcccgcccaaaggttttgatgaaataattaagtactcaggtcgcatgaccacctttaaaagtataatttttgtttctttctgtaagtgcagttgttttatgtttaaatttagctaaagatcagattagatcatgtaatagctttcataaatgtaagttactacggtaacaagactattccgaccaataaatgaataaagatgtttatttccagtctaattgtgtcaattgtattagaaagtcaggaatttaccattaatgcatacaaaaggttcgctcgacccaaagcactgaacagacgaaaactatacttgtgaaatgcaagtgaccaagagtcaaaagtctgctcggtcacttggggggcaactacacttgtacaaagcattggtaaaagcaagtaacaagctaaaaaaaacataacagtttgcacgaatgattaacaaaataagggaaaatattcattgaaaatgataacaaagcatgatctaaacccgggattaaaagctacccggtcagctagttgtcttaaaataaaataaaatattacccaagtttaaaaaccgcttggccggtcctttttgtctctaataaaggcccatgtgccgaacagataaaaaaattattatttcatacagcagggatccaaggctccttgtatggatcagcctggttagaaggggtcggaggcttgacactatagacggtaggggcagggggctcagtgctctagtcggtcgaaattgtggaattggctaac

SEQ ID NO: 98433 - DNA, 1524 bp, Cannabis sativa
  modified_base (1300)..(1331): a, c, t, g, unknown or other
aaaaaaaaaaaaaaaaaaaaaaacaatgccaaatagtgatggcctcgttgtagcagcgattgcaaccccgtacataggaggcaggaaaatagtcacccttgaagcaaaagcccttctccaggcgctgcgttggtgtattgacgagcattttcttgtccatgaaatagaaacagattgtaaaactattacggacgctccaagtcaccccaaagaagatttatcagtgttcggagatctaattagacaaattaaggaagctttgtctcatctccctgatgcccgtatcttgcatatcaataggtctgctaattcatttgcagataagttggctcactgggcttcagggctagacgaagttgcaatttggttagacaatgacccctgcaacctcataagttttctttctctctgggctccctctccctaaaaaaaaaaatatatatataatttttcttttttatcaaaatataaaataaagttgggcaaccattaatacatataaatataatagtatatttatatgtgagtagttgtaattttataatcaattatatgcaacttgtaagagatgactgacttgaaattggctattgtttttgccgatatagattttacttattatttatattaagaagagaaaataaaaagaagaaaattgtccaaagtaataatttatgtaagcaaaacatgagactatttagggtttggaagtgttggaaacttggaataatatgatgagttgtcacataataagtcaatgatcagctattgtattggaccaccgtaattgctagatcagagtcagccttatcaagtctcaatcaacacttttgtggcccataacaagttttaaagcacaaaaaccagatactcttttgtcatttttacaaaattaaattctctttagatttctaatttgtgtatttgttgtgctggcccaagtaaatgtcttatagtttcttggcctgattgaggtcaaaaagacataagcctaaacttttgaataaagatttattgaagttaatttgaattgaaaaactgataatctattaaatatacctaataaatattagggtgactctctacctaaattatttatgaattaagatttttagtttgaatcattataaagaattaagaattcattcaaaaccaagcaacatatagagaaaaattaaataaaaacaataatcactttcatatacaactggaatatgaaaacaaacaaattgttaaatcttactttattatatatttttcaaataagaaatagaaacccctattattattattattattnnnnnnnnnnnnnnnnnnnnnnnnnnnnnnnntattattattattataaataaaaagcaataataaaaagggttttctacatgacctaaggacaaagatctttgaaagtagaaacaaaggacaataaaattcactgaattttggcactacgatccttcactgtcaaagcccatttggccagctaagaatatgcttggctctatacaataatttcaatagattata

SEQ ID NO: 98434 - DNA, 679 bp, Cannabis sativa
ggcaggacgaagcagcccacagaaacgttcctgagtgatctctggccagggccgcaatgcacatggagtctccaccaactttaacatcacagttgattttgatccagtcctctggcggaggtgtccaagtcggcgtgaccacaggaagaaccggggggaacaggaaggaggcataatctgtataacaatgggaaatagtgttaattacattcacaatattaccctgaattgagttatgtaccttatcattgcggcatttccaaatcatgtccacagtgatcgaagcataaagaaacaacttttccgcatcatccccatttatctttaagttccaaaggaatttaacccaatcccagaccctaccaccagagccatgcaccgggtatactccccaggtggaggatctccagatgtggtaagcaaaattacaatagaggaaaaggtggtcaatggactccgcctcagccccacacaacaggcaagtctcgtcatcaatatggattctcctagccaggttatcccggactggcagagcattagagaggatactccaccaaaggattttgtgtctctcgagaactttcgaattccaaagtttgttccataaggccggagccaccacacaggccggggctctctcatacgcctgtgtcaaataggcagacttggtagtaaattt

SEQ ID NO: 98435 - DNA, 997 bp, Cannabis sativa
gacgtccactaccgactaacaggtagggggagctgccgccgagacctgtttgttgtgaatcgttccaaagtaaccgcgggcccaatgtactgtgagaacaggagacaattcaacggttgttatgaaccattttattacgtctaaaccaaatcctctaaagaatcaccataaccatttcattcacatcctttgaaaggatatcaacaaacctgtgaataaagtcaagaaaatccacacagtcaacaagcggatcccccaacacaaattcacagagtttcttacaatgagacaacgaagaacacccccaaatagcgtgatgagtagtttcttcttccaacccacacaaaggacataacccatcagttaatagaccatgacgagttggattgattttagtgggaagcccatcatgtgacgcttaccaagtaaaaagtctaacttttggaggaagattaagagaccaaatctttgtaccaaccaaacaaaccagacggcaaagcacgaggagcggccatattgcagaggccaagtcaataaccactcttaacagaatacgatcccgaattctcacaattccaagttatattatctggcacatcatgtgaagaccacaaaatagaaaggatagcttccgcttcatgaggtaaaaaaattgatcagatcagcacattatcccaaccactcgaagcgtctcttaataccaaaaccttgctagatccatcaattcgaacaggagccgataaaatgaaaggcgaaactaatgggatccaattgtcagattaaatagcaatgtctgtcccattctccacacgttgttccagatggaactgaggtaacagaaggagaagacaataaagatcagtaagaactcagtagctattagttagctagagatgtggagagaagacagaagaaggcccctgatcgtttgggctatgctgaattcattgcatatgcacttatgattgcagaagaggttaacagttcagaacccact

SEQ ID NO: 98436 - DNA, 1007 bp, Cannabis sativa
tatcatagtcatatttttaccgagttttcgatctacacttattcaaatagttagtcagccgcacgagatctaataattcaaaattagtgagtaaaaacaactactattttaagccatatataagaacgtatactactctacttattatcaattaattttaagataaaactccaaatttttcaacaacccttacattacaaagctaaaagactccaacactatagctcaaaaattaaggatcaaaacatatgttattattgaaataataagcataaaataacattaccttaattgaaatagaagaaggtggggaggaagaaaataatattgtaaagggtacagtaatattatatataaagctataaataatattgggtacatatatataaaaatatttttgatgtgtgtgtatatagtgggaataatgtttaaattcaaagaatttatctcaagtgagtttgaaaattaaagagggcagtcaaaatattatattagtgatcaattattggctgcttgaattgaacattgtacacatatataatacttaatttttaaagttttattgttatttttctcataagtgggagatatggatttacatctttttcaatgaccccccacagagctatttagccaagctttacgagatacataatatattctcctccatgtttggaaatctctttctccattaactttttattataattaattcttccttttcttcatgatcctcatggactattattttaaaaatattattttttaaaacactgtaatttaaatttaaatttgctagatatatctacaaaaaatatttcttattattatcttttcgaaactctctattgcatatttttttcctacatatttaaaagaaatattttaatttttttttttaaaaaaatcactatacatatctaaaaatatatttttctattaatgttttattttaaaaaaaataaaatggagaaaatatttaagatatgtgactttgttacctattg

SEQ ID NO: 98437 - DNA, 595 bp, Cannabis sativa
  modified_base (177)..(179): a, c, t, g, unknown or other
ttcattgcgcgttcaaatcaaaacaagaaaaatagaggggaaatgcagtatttgtccacgcaaggctcgaggtcgatggcagcgtctcgtactgaatttgtaagtaaaattatcaactttctattagtaatttcttttactaaacacaaactaactctatttttgaacaggacgtcnnngaagactacgcaattcatacttggaagagaggccacctcataaaagggacagaagacacttggattagcgagacatgcaaagaactacatgtaagtttcaatatgttttttaataatatttttacaattaatgcatgatgttgttattgtgtttctaatattttatttgatcaggagaacatgcttgaagatgttcctagcatgacggatatagaagatgattccagcgatgggtctgctagcaaatacaagcaattaaaagctatgaataaagttcttgggagccagtcagactatctaagagaactgggttataaattgaaaggcagctcagaaacaagttctagtactcaaagtcgagctcaatcacaaggaccaacttcatccattactccggaagatatgggagtcttcgc

SEQ ID NO: 98438 - DNA, 3129 bp, Cannabis sativa
aatagtgttagtcccatcaccatttgccaccttaatttcaaaaacacaattttatttgtcttttaccttctaatttaaatcgtaagaaaaaactggcttcaagtatagacaaaaaagtatctactgtaattttagctgaattgttttttttttttttcctttttttttatatagaataagaattgagtctacaaggggaaaaagcagtacaaccaacgacacaaacattatttcagtattcctctttttcaatttgttgctcgctataatcttcattagaacccaaaagcaattgttgatcaatttgcctattgctattgctaccaaccaaggaaaggtgatccaatactatagcattccttttgtagttccaaacaagcattgaaacgtaatcttgtggcaaaagaagacccaattccttgatgcaattacgttgctcttccagggttttcggatcatcaagctttatatattccaataaggccttctcatgatcaggtctccagttacttgggaaaggggtgtaatcagtttctggtaccagagacattctggtatactgaaggccatcaattgactcaacaagacccattctcaaaagattgtggtactcaggagattgacctttcttctccttcaaaggacgacttagattccgtgcaccaattgtgtacaccttagctcgggaacgaagtttgtatttggcagcataaagctttgcaagtgaaccccttaagatgtaagagcaaaagttcaccacttttttcctgttatcagcgtatctataccactcaaccattgtggacaaaaatttgttcatttgtgcattggtgtgagcctgagtggcatgaaacattcgaaaacatggctgtggatctggatccctatcgcccttcacaaagtttagtttcctaaactgcttgatgcattgtttcaagctagctgtaaccgataaaagggttcccacacccttctcactgataatcttaccaccagtagctgtataacgaagagttgggtaaacaactctccgacacaaaacatggtcaagaaacagtataccctttgttatgtgttctattgggaggctttcattgtcaagcttcagcatatatttctgatcgcaaaactcaatcaattcctttctcaatgttgcagcatccgcccttggtcccctaataccaaccaatatgtgaccaccatatcgtatgtagtccatcttccgagtcttgtctggtccacttgtgggaacaaactctggccaagatgtgtttccctgttctacttctccttcagggctattccatatgacatcactctttgaaggttgataaaagtctttaattcttccttccatccaccgatccagttcatccaaacaaacgttagccaagagaggactgagtatcccacaatggccccaagacggaagcttttctgcttcctcgggggaaaacccaaagaatgtctctaaccaataagggtctggttttggctcatcctcagccaataccctcttcttctggtactttctcttcactttttttttcttctcttcaccatcatccttggtagtaatcacaggagtgaccaatgctaatttcaccaaatcaatcaccttcttatcccttacatccctcattaaagcatttatcaccaaccccaccttcatcccatctaagattgtgctcaaatcacccttcatataccacaaatatcctgcaaaactcttcctaatcacccttaacacggtatgggcatttctaccaggcctaaaagcaaacgacttctgcgaaaatcttgcttcataaatcggctccaaaatcataagcaatacttcttgaacaatcttatcctgaaatgcagcggcttgtgttgttgtcaaaagggccttgattttcctcttggacagagactggtagtcagtcttatccttgggtgactttatgaaaaactcaagcctcgctccccacctaaacctatcatcgagaacagcgtttcgaagtgccaataagtcctcgagggccggcctctgaatggcgctccgcggcatgtaagaacccatgtcgtcggcacaaaccttctggtaagctaggacccatagctcaaatcggcggagataagatgtcaaattattgacaatacgatcaggttcccgaaaattctcaatccacattcgagaacagagggatacgccatcctccttcatcagggtggaagggtcatcaggatcaggtgcacgacggtgcacctgagcgtacgagaggagacgaatgagagcgaagccatgggttctttggtagcttttggagaaagaaaagctaatacttgtgagactctggcgattgaaaatgggaaaacggcgaagcatttgagattgggggagggagagggtcactggttgggtttggattaagccatttcagggagaagtttcagaaaccctatggtgaataatcgaaaaagagagagtacgagtgcttaccaaagatggaaatgtgaaaggaaggtactaccgaaggccgagtctgctgggctgggcaaagctttggctagactctgaccaaaaaaccaaaaataactcagtactaaacacttaacaatgagcagaaaagagagattaagaatgaaatatacatttacaattcgtgtggcggagccgattgagactgctgagagttccaaaaggaacgagagagaagattgtatagagtggtcgagcctcgaatgggaaaagaaaggaagtcaaaatatggggtttagggtgttcaaaatgtggggtttagtaaaaaagaaattgcaattttaatttgttgtaaaaactctttcggccattccaccgccattttttaagcttcctcaatatcgtgtaggaccaggctaagggtaatgagtccctcagagttatgtcaatctcagagatgtttaggaccttgagttggtgactcagaggttaatttgtgtgaaacttttttgttggtctcaaaccaaagaaaagaaaaataaaaaataaaaaaaaaataattactcaaatttatagttgagggagttttgccgcaaattactcttaaattttttatttttattttgtaaaatattgtcacgtaggataattttttagtgacctgt

SEQ ID NO: 98439 - DNA, 762 bp, Cannabis sativa
cacagagacccctcaggttgacctcgttcaaaagaaactcacatgaccgaaggccaaatggaagacccaataggagcctgcgtcactcgaccatctcaggagttggaactggtctttttgagacagttgtcgaaaacaaaggcaaaattaaagtcagtaaaccaagagtaaaagacatggaatagtttaaccaagtcttaagtaaaattactcacgtattatgcgaaaggtggttgtgccgattggggaaagaccagtcgtctagaagaattcgtgtatgggtccagccctgatatgtttgaggctccaagcgcctatcccggtcgagccacttgtactggcctcgccactagttccctcaggtactttgcaagtaagtcgtacttgtggataacaactgaactcgccagcaactaccaatctaacccgaaagtctcgctcatactcaataatgcaagtcctcagggtattatctacataatcttcgatggctcgcacctttgactctattagctcagccttgaaggtgacgttagggtcctagggagtctttgatttacgtggcttggaagacataatttcaaagtccaggtcacttggtgcaaaagcaatcttacattgggtaaaaacaaaggcttggccaaaggaatagaagacaaactgggaggttcaggccaagcaatgtctcgcaagaaacagcgtctgccttctaaaatttcttgcaagaagcgcttgtggcgactagcaatatcttcttggtgg

SEQ ID NO: 98440 - DNA, 505 bp, Cannabis sativa
  modified_base (28)..(38): a, c, t, g, unknown or other
taactatattgtcccgctatactaaaannnnnnnnnnntgattctaatagccaaacatcgcgttccaatgttgttggacacaaaacatgcaaatttgacgaaatttctatatttgacatattaaatgcattctgaattaaaataaattatcataaataaataattcaagtttaataaataggtttcataattaaaccctaattatcttctaatttataaattaaagctaagcgatctttacaacttctaatactccaacaccacctgccaccactcctcaaacaataccataaactattgatattatccatcgaaaatcactgccctctgatgaaaatacaccaaccaatgcctctgctgatatcacacaagcacctacacttgttgataaaccaacagcaactgcacctgctacaaatccatcaacagaagatcttgatactctttctgaggccacgatacattcatcaatcacaaaaggaggttgacaaactcttcctcctgc

SEQ ID NO: 98441 - DNA, 1241 bp, Cannabis sativa
  modified_base (487)..(494): a, c, t, g, unknown or other
gtattgtttttaaataaagcaagacacacctagcataaaacttaatatacgtgtctcgcacgtggcgttctactagtatatatatatatgaaacattaatcacgtctatacataattcatagtcatagctagcttaaatattgatcacgcgtggttggtgaaagttaagaaggaaagagattgatttcgtatatatgattgattaatacgtgttatattatttgatgtaatataatatatgattttaaaaatatatataatatagattaaaatattttttttttgaaggaaatatagattaaaatattaaactctaataaatatatataatatgaactttaacgctaatgttaatatgtttgagaaatatcagaatgttaattgagacatttatgggagatcttgtagttcgattggttagttgtattgtatgttcttgagtatatcattacaaaaaattgttatttatttagtgataattttttannnnnnnnataaattttttgtaactaaatatgactaacaaaagattgcttgtaactaaaatatagtatttagttacaaattgtcactaatttagttttagtcacaataaatattgtgaataaaaacacatttagtcacaacaaaacataatttttgtaaccaatacttttagtcccaaaccttctagtcacaacacaataatcataatttttgatatattgtgactaaaagtaagattttttgtagtgttgaagttgtagagttgttggaatggaacttttaaagtactcacgacttcaaattatatggttactttgcgctagagaagacatttttactagataagcattttcttggttagtactttttaatcttattataatgaatactttttaaattttattaattactaattttttttttttttttgtattttattccgtatggaacaatttatttggagagagtaaaacaagtgatcaactgttatattaggagtgagagacggagcttttcagtcattcaagtagaatattgattttaactccttagctagttgtgtgcttttactaggaggcattaggcattcatttttttttttttttgaaataagagacattctttttttagtgatttagaatcattgttagaggatgtatcaattatgttatctaaatttttaagagtgttcttgatccatgtacattggatggtcaagtggttgcacatggattagatgtgcatgctctttagat

SEQ ID NO: 98442 - DNA, 568 bp, Cannabis sativa
ctgttgatgaagattgaggataagttgttgaatgctatgagagtttgcaccagtgacaagaatatcgtcaacataaacaagcactaagatcaattgactgtcttgattttaataaaataaggagttgtcaaagatagagttggtgaaatccccaagtttccaaagcatgattgagcttgtcatatcaagcttttggtgcttgcttgagcccatagatggctttgtgaagtttacaaacatgattgggaaattggtcatcaacatatccttgtggttgagacatgaaaagtttgtttgagatcaccattcaagaaggcattgttaacatctatttgttgaattcgccagctaaaggtgacagcaatagtgaatataattcttatggtgctggccttgaccacaggactgaaagtgtcaaaataatcaactccaggggtctgttggaacccttttgcaactaatcgagcttgaaacttatccaaggagccatttgccttgagcttctttttatagacccacttatttcaactatgtgcatatcatctgtatacgcgacaagagtccatgt

SEQ ID NO: 98443 - DNA, 628 bp, Cannabis sativa
aaatttaacataatattatataaaaatataatatataattcaattcaatataataaaatacaatacgacctaattaatacaacgtaacaaacaagctcaagtcagaaactttttaatgataacatacgctagtttaatgaccattttttattagtaagagttttttttttttattattatttttattagtagttaaaaaaagttaaaatttatattaaaacaaattatatatatggtggtgttttaatttttttgtttcaggacatttaaaaaaaaaaaaaatagtttcagccattaaattaacggaaaattttataatgcaattctttaaaacgatatacggatgcacccttatttattttaatattcaaataaatttttagtcaaatttttctcatgatcatatacgttataattatttaagacatcttgaaaaattttaaaaaattcaaaaaaatttaacacgtcgaaaacagggttcaaacagtatattgcacgtgtacgttactattttatttatactcgtaatagactgtttgaacactgctttctatgttgtaaattattttgaattttttaaaattttgtaaaatatcttaaataactataatgtatatgaatatgaaaa

SEQ ID NO: 98444 - DNA, 740 bp, Cannabis sativa
cgtggaggcccctcagcgttatgtggcccctaaattaccagagtataacgggacaggagacccctcagaatacgtatgtcagtttgagcaaaaaatgttaaccatcttcgtcccgctaaaggacttggagactatcaagtgcaagaccttcacgcaagttttgagaggactcgctctacgttggttccacaacctaccatccggcacagtaaattcataccaggatctcatcctgagattccaggccaatttcgcgataagtgtgcggaccgccaaggtggatatggacctaatgttaatacaccagcgcctcgacgaacctctggaacattttatcaacaggtttagcgaagaatacgtcagtatctcgaaatgcaccgattcagtggcaacgaaagcactaatgcaagggttgatacacgattcagaattaaagaagacgatcatagtggaacctggcctgtccctcacaagggccttaaccatgggaagaggatatgtggccttggaagtagaagagaaacgacacaatgaggaagtgtcgcgcgaaaccttgacatcaggagatactttcctcttcgaatctaagaaccagacaccagcggcacgacctcataatagaattgacaaccgctcggccaacgaaaggaatactcaagggacagtaatggtaagtatgggtgaggcagggcagccacacgcccaacggggagaagaggagctaccacggatgaccatta

SEQ ID NO: 98445 - DNA, 691 bp, Cannabis sativa
ccctagcaaagtcttgtactacaatactggcttcgtcatccccaagaaagttgtctgaggggagaaaccagcttgaagaaagataagctgaatgatccaggggaataggtgcagaggtccggatcccatccgggaccggtctagaaaatgacttatgtttgaaaaataaaagcccttggcatgatcaccccaccgggtagggggcattctaaatctaagtagacgttcgtcaaattctataggcctacaccgggaataatcttgggcagaagggacatgatggaccgttaagggagacttaccggatccatatgtgctgggatcaggaggcccagtgttggggagtggaaggagcatcttaggcagagaaggcgcctattctttccccggcttctatccagcgggtcatcccagtagcagcatgagccttgatgtaggctaactctttttccctcctaaagaggtacttttagtaccggtccttcgccgaggcaatgatgtccggccagagtgccttctcagcctccgtggtacgaatttttgggaagaggaccttggagaggttgaagtcgtccacgcattggctgcccgagatgagcttagccttccggcagttctccattgtgaccaagtcccccacgttaagaccatttttgtcataagtggagaaaaccttggcatgctggaggaa

SEQ ID NO: 98446 - DNA, 671 bp, Cannabis sativa
aacaatctcaatagtttgggggaatttttaacgaccaaaaaagttcaggggcacaatttaatacatgtcaaagtttagaggaaaaaattactaattagcctaaaaattaaatatagtaaggaatcagaatgaaaataataataggaatagaattaaatttaaaatgcataaaaaaaatattaataaaaatattattaattttttttcatcttagagtaatctttctttttattttgaaatgaaatagtcattaataataatttcatttaaataaattttaacactttaaaatataactaataaaaaaataaaataaacattatttcatttcattttatcacctccaacggtttattagaattagctaagctaatagcctagtaatcatgcttataaaataaactttatttccttactaatttctatatatccctttatttaattaattaacccgttttgtggcagtggttaaatctttgcaaatcatatcttgtagaagcaaggtggttttataatgattatacaccaagtttgaatgaatacttggaaaattcatctacttcagttggtggtcatgcagctatagttcatgcttgtattttactcttagatggctccatacccgaaaccttactggattacaatttcaaccattttcactctaagctgat

SEQ ID NO: 98447 - DNA, 641 bp, Cannabis sativa
ttgcaaaaccttcaaggatgtgcaatggtggattagaaccaagcacatagcacaccaaagatggtttccaatagttaatctcatcctctatgtcctctaaatcaatcttcaccttcctatcctgctgagaactttaaaaagagttctctaaattcctcactacactggcagatctcagaatagggggaatagggttcataccttttgagatactactattacattgctctgtagctttaagaaaactcacaaagtcatgctggacatcctcttgcctttgaatttcccgtagagagcttcgaggagacagtggctctggaaagtccttcgatccctagctccttctccccaaatcaatttcatctggttcgtcttcgctccctgagatttctaacgcctcaacctcatcaggaagattgatttgcgatttcatctccatgtgccccgctcgattcccatctttcttgagttttttcgaatccgatttcagcttctcgcccctcttcgatcgcattttcgccatagcttcaacaaagtgctgcacggccaaagcagagagagaaaacttttttactatgattttttcatttaatgattaatttaataaatgaagaaaaatatatttaattagaaaatgaatt

SEQ ID NO: 98448 - DNA, 710 bp, Cannabis sativa
agaacaaaattattaataaaacaagaaaaatgaaagaaataattacctgctttgaggttggggaagaggaagtgggaagaaccctaaaaataaagtaattaactttaaaaatcgatgtgtatttaaaaaaaattaggggcgatggcttcagactgaaaagggtcaagagtgaaagggaatgctttggcaggctccaaagtgattggagacgaagaaactcgggcagaaggaacataaccctctggataggatacatcatgtaagcaggcaataggttcatcattatttctggggtgtttcgccaggtgggttttcatccaacttcctctttatcgaccccatcaatgctctaacaaagataactacccgatactggtgatacgacagagaaagtaacgagtagaagcaaattaggaagaaaattaccagggaaaattctcggttcaagcggctatgttgctttgaagagaaacagagaaatatgtttttttctctttttgtttcaacgatttttttttcttttaaataaataaaaaggtttcacactaaaaagtagggtggcaatattcaattcaattcaaataattcaatcggattcaattataaaaaggggtcttttcaatattatacctaatattgattttatttataaaaatacctttaagaaaattatttgcacaaatactgattgccacgtcagcataaatacc

SEQ ID NO: 98449 - DNA, 578 bp, Cannabis sativa
gttagcactaaccggccagggtagtgccatgcatctccctaaacctcaagatcttggggctgcaagatggactcaaacaagaagagcatggagacttacaagatccacatcttcaaagttttgaaacaagtttatcctgatatcagaatctccaacaaagctacggggatcatgaacagtttcatcaacaaacgaagagaacaaggcatataacaaggaccctggctggacctctagctggctggccaaggatgacaatccatatgtcgggcaaccttcagacacggctggccgaccaatacacattatcaatcccaaagaagaataattttttaaactcaaaccaaactcctcagtgttctgccctaaaatcgattaccagataaaaaaatttgttctaactctcccttaaatccttaaacctgataatgatactgagcccaaaataattcttcaatttttcaatattttaataatcaatgctcttcttacaaaaaaaaagtgttgaccgaggttttcggcaaccaataaaaaataataataatttagagagctgtaagaaattaagaaggagattt

SEQ ID NO: 98450 - DNA, 1075 bp, Cannabis sativa
cctggattagagataaatctgctaaccatgctcaatgcataggccagatctggcctagtgcagaccatacaatacattaagctcccaacacaggaaggatagggtacagagtccatgtacattatatcttcttcattatctggtgcttgattttgagtaagtttgaagtgtgaggcaagaggggtagtgactgtcttggcctcactcatgcaaaacttgtttattatcttctgaatgtacccttctcgtgacaagaaaacagagcttggtctttgtattttaatgtctatccccaatattcttttagcttcaccaagattcttcatttcaaattctgagcttagtttatcctttagcatgtttatggcctttctatcctttccattgattaaaatatcatccatatagagcaataaccatataggtgtgacattgtagtatacacaaggatcatactcactccttgagtacctatttgcaacatgaattcatggaaccttaagttccactatcttggtgcctgcttgagaccatacagtgatttttgaagcaaacacacctgttcagccccctttctcttgaatcgttcaggttctttcatgtagaaattttcctcaagttttataggccagaatgcagtctttacatccatctgatccatttcaagatcaaacatggctacttttgtcatcatgattctaatagaagtttgtttcaccataggggagaagatatcattgtagtcaataccctctgtctaattgaaccccttagcaaccaatcttgctttgtaccttacttcttcaccaggaagcccttctttgtgtttgaaaatccatttgcagcctatgatcctttgtcctctaggtctaggtactctaatccatatcttatttttctcaagtgaacccatgtcatcattaatggcaccaagccattttttgtttttcttagcaactacttctacataagtagtaggctcaccattttcaatttcttcagctgcaggaagtgcaaatgcaatgcagtgagcataccctagtctctcaaggggtctcacatctctcctaactct

SEQ ID NO: 98451 - DNA, 600 bp, Cannabis sativa
tttttttcttggctagtgcttatacattaataacatcaacaatataagtcatcctataaaatatatattaattaattaattaaaaaatatatttttaactaaaacaaaaaaataataagaaagagtttgttattttgggttgaagtaactgtacatatatgaattaggtttttctttgtttccaaccaagactcacggactcccttttaggtttgggtgtggctctaagtgggtttgttgatcccacatgttaggagagttgaatctcctagccattacacctcagatgaagagcataacagtaaacaaagaacaaagaacaaagagaaaatagagagaaaagatacagagaaagattgagaaaggagagtcaaagatgattcattactatgaaagatcagtacaatatatactcatcaaagatgagtaaagctctaacaagaatctgttacaactgaaaaagagactaacaaccgcaagctaaaacagttgataactaacttaacagaaaataacagacttagtaactgaattcccttaacaccacacaagtcttttaacctaatagtttagaatggtttttagtctctatttttttat

SEQ ID NO: 98452 - DNA, 2877 bp, Cannabis sativa
ttattcataattatctaattagggttttgctaatccttttcttaattctagggtattacacgctctctcctcgctgaaagattacatattgaggatgtttcctgtcctatttgtggggagggggaggaaacaacggagcacctattcttttattataattttgcctttcacttgtggaggtcatcctaatggggagtaataccggttttggattctggagctcgtgtttgggattgggtgcagtttctttggagtctaaagtctaaaggggtggacgttcaggaattgttcctttatgcttcgattgtagttgatacaatctagaaagcctgcaagacaaggtacacaataattctctcagtaaccttaaacattgtattgactttatctctatttgttacgcagattatggttcttgtcagtttgattggtcgaaggttgttgtgtcttctgtttggtccctccccctgtagattgggtcaaaatcaactatgatgtgaaagttggttgcggttctatatgcgtggtagctttggttagaccatatagagtttgttttgtgggtggctaccaataagctgaatttctccgattcgcttattggagaagttacagcatgtctgtcagctatggagacagcagtttcattgaatcacccttttgtgatgattgagagtgactctaagacagttatcaggatgctgaaaggaatctgttctagttggggtattggtaactatgcaattcaatgtaaaaatctctctaatcatttgttaagttataattttttgtttatttcaagatattgtaattttgtaactcaaaatgtggctaagtgagcttttgccatcaatattactggtatggtgaaactttcttctataccaaacgacatcatatgtaatgaccgttaggtctaacaccttttgattttaatctataaattctttttattcaaaaaaataataaaaattaaaattaataattttattgttaattttattattattttaatatgtaagatagtaaaaaaaaatataaatactttaaaatttaatgttataattaaatatattaataaaataatataaataacataaatataaacaaaaaaataatacatttttataatgtaaattttatatcataacaaatattgtgttaaatttaatataaaatttgccaaatttataccaacttttttttttttgattttggggagggagaatcaaacttgagatctcctctttgtggaactacttatactatatctaagactataatttatatcatttttaacatactattaatgcatacttttattaaatgaattatattttaaatttctatcacttattttcattttttagttattttaaaatgtttcattaggtccaaccatgtaataattactagtctaattatgcatattttgtttctaagcgaagttacaattattgcactgactggtggtccatattctgtgtttgttcctatatttttcaataactataattattgtcaaaagtaaagctctacctctcctaattataatttataacaaaattaataaaaaaacatatattgtcaatttcttttttctattaattatatatttaatcattatttattaactaatgctactaagtattagagttagtcacataaaaaaaatattctacttcttaagataatgcaacataaaggtggctagtttattgaagcgaaatccatgtaatgtatcccttttacatctacgaaaaattaccattgaaaaagaaaaagagaaaaaaaaaatacaattttattttatttaattttacagtagtataaaaataataattaatgaggtaggataggagaaaatttaaaggaagaagaaaaagaggcttcaaccaatctaaaagtcaagggcaaaatggtcttccaagacgagccctatggctaggaatagtgaaatgcctcaacctaccttgttgttgggtgagataggcttgacaaagaaaagccttagagaatttatcctctacgggcctatccacgtcatgaacgaacacatcagtttctccactctctctattcctagccataatcccagccgtgtaaatagcggtcatcctcccgggagcatgtgggacccacccagtaggcgcatcaaccatgatgaggtcccactctgtatcgtacacgtcactagggaaattcttaagagcaagctgacacttggagaatcgtgggtcccccaccacctcacaatcctgggtcccactactgattttcataagctcatcggcttggtggaccttagtatcgtattccacgtggtacgactccagaccaggcatacgacgtcgtatttgttcgatccaagatttgtcttcctctaaaaatacggtacggccgccgtagttaagggcattccacatgagactgtcgtgtcctaatccgaagacgaggaagttacaaggcgatttcttctcgaggattctcatggagactgagatttctttgagggtttgttgtggggttatgtttgtggttacgtagtggactaatgcgttggccaaagacggcggcgttttggtgcatgtttgaattggggaagcgatgatattgtttgttggacagttagttgaatttgagatgtgggttttggatacgacggtggctggagaagagatattggtgaaggagaagtttgatctgattattagaattaggaagaagaagaggaagaataaggagagagttagttttagactaatggaaagttgagctactttggtcctcatgcttgcttctctctctctctctatctctatgtaaatctgaattctctgggtatggagatttgatgagtgagagagagagagagag

SEQ ID NO: 98453 - DNA, 1011 bp, Cannabis sativa
  modified_base (840)..(841): a, c, t, g, unknown or other
  modified_base (867)..(867): a, c, t, g, unknown or other
ccccactctgtcccctctcctcacacactccacactcttgttatggtttatgccctacaaagcctgtaaagtaatttctatttacatatattagttgaatattttgatatatgcttgaatgttaaattattaatatttaatatcaaataattaatacatatattgaaaaacagtcagcaacatattaaaattatagaatctttaatcaacgattgctagtgttgttcactaatacatgttattcgatgcaagcgatctcgattcagattgttaatgtagtgtgatatctaagtaaatgtgttgtatatagtagagattatatatgtcaaggactgatatgtaattaagctttctttatcaaatatgtcatttactatgaagaccggattcatatcataaaaatgatcaacaatagatcgtcttgaatccatcgtaatcatgaactcatgtttatgttattagttttttttattcactcattaaagtttgtcaggaaagatcatgattttaataacttttattttgggaatctaataatgtggatggctgggaacatgatatacaattatagaatcctaactttcttaacggatcgaatgttagttctatttaagtgttaattccagaactaaaaagttgtgcacaaatttagatggaagctaaattatacttttactagtgaattaacgatactaaaggataaagaagtaattagaaaggtaaaacaataatttgacaaaaattaattatgaaccgacataaggagggctaatcactagaattgaatatatcaatggacattgcagtaaaactccataaatataattctataattactannagttcaattctatatttatagtggantaatcatggaattaataaacatgattatttggttgatgagatgcaataaataatctaatttattggagcttaaaattataggtccatggtccctggattgccaccttaaaacactgttaagggtagggataaaaaattacataa

SEQ ID NO: 98454 - DNA, 575 bp, Cannabis sativa
tgctcatagcattcctctgttcatacttcaccttcttcatggtatcatcgagtctctgacctgcgtccatggaatcttccacctccgatccaaccacgacaaccgctgcttcttcggttcactggaacccgtttgcaaactccctgtcttcctcactcaccatcaagctcgaccgactcaactatctctcatggaagtctcaaatcgtccccacggtcatagggcacgatcttgattcgatcttgttctcggatgtcactccaccaaaaaccttggtcaatggaactccaaactccgagtatctgcagtggaagaagaaagatcaacttcttctttcttggattaggtcttcaatgtctgaacctatccttgcttctgtggcaacttacacaacagccttctcggtttggagggcccttgaacaacgtttttcttcccagaccaaagctcgcctcttgcaattaaagggtaacttctctagacttcaaaaaggcaccttgccaattgctgaatatgttgagaaagctcaagccactgccgatgctttggctattgctggctcacctgtcgacaca

SEQ ID NO: 98455 - DNA, 632 bp, Cannabis sativa
ttatattaatttaatatgcataattaatgactaaaaatatacaaatttgagccttaatcattggccattactctgcggatggtacggtagagcaattctgtgacagacaccatatctccaaaggagttcttcaaactgtttgttgcagaagtgactcccttcatcgcttatgattgcttgaggagtaccaaaccgagtgaatatgttcttttgaagaaagcggagaactgtttgaccatcattttgcggtgttgctgcatcttcaacccatttcgacacatagtccacagccaataagatgtacagattgctaaaagatgaaggaaaaggacccatgaagtctatcccccacacatcaaaaaattccacttccaagattccttttaaaggcatttctttcctccttgagatattacctatacactgacaacgatcacatgccttcacaaaagtactagcatctttaaaaagtgttggccaaagaatccgctctgcaacaccttagcagttgttcttgtcccactgtaatgtaccccacatggtaaagcatggcagtgattgagaatagagtaaatctcctcttcaggcatacatcttctaattatctaatcagcacagtgcttgtagaggat

SEQ ID NO: 98456 - DNA, 551 bp, Cannabis sativa
ttcatacattacgctctcacaaaagtttatcatgatggtatttattaggtctaatccagatatggcttacacacaactcttgatatatatatatatgcatacaattcatttaacacatgctcaaatatagaaactttagaataataaccctaactcacatgtatatccaaccatccacttaatatataagtgtgccactgtgctatgctctaagtgcagtgttcactttcttacctgaattcctaagtatgagaagaatttcaaatccacaagtgatcttgagcaagcgtcgataatcttagtcacaatcctaagtttaaaaatacaatagggttaatatccaatctcataacataatattcacatttaggactccaattttggaccaagtaataaagctcgtaacaagcttttcaacgatataaagaacgttcaaaacagagtttggagtcaaaagttacgactaaaacaaaatgagaaaaattaaactgtcgcctcagagtcgccaagactaattgtcgctaggaccaaacatgtggtcttcgcaacca

SEQ ID NO: 98457 - DNA, 567 bp, Cannabis sativa
tgattgtacatgtcgagacgatgcgacctggaaagttcggtctcaggatgacttgggcttcatttttgtggtcactgtgcgacatgtctataaaaactatttcgaatgtcaagttaaaaaaaaaaaaaggatttcaattttgtatataaatatatgtatatagtttaaagttaaaagttaaatcaaaattttaatttatcacacttttcaaaaaccctttaattaagaaaaatatacactctaattaaaaaaaattgcctaaacattacggcgttacaaaatcattttacaaaatgacattaacaatagtccaatttcatgagcttaaatttaactcacattgctatggtccttttcctatttactaggaaaagtaagatttttattttttcttaattcaaggactgaatcaatctttattgttattagccaatttttattgaagtattagtcaatgtcttctcaaatttctcgaaaaaaaaaattgttttacacttattggagtgtcccatacacaatccattgagagttgaaacactaatgtaatctataacatgatgtaatttg

SEQ ID NO: 98458 - DNA, 1505 bp, Cannabis sativa
tattgcgtgtggcagttccaatacgcctcctcccatgcgatattaaatgcgagatgactgctcagaggatgcctgacacaacccggagatgcatatccaaaataatgctttgctttataaagacttagctatttaattcaaacgcttaaccctttccattcacgtgtcactgttcggttggtccacgtatattgggaaaaatcaggggcaacaaaaaggaaacaaaataatcaatgcttcggaaatataaaaatcaatgttcttattcgagatattatctattagatgtcctattttccaggtgtctctttaaattatgttcgttggagtgctaattacgctgcacatggtcttactaaattcgctttacgggtggatactgatattgttaggagggctgtttgtccaagccccattgaagctattgttgtaaatgaacttattcattaatattaatagcttttctctaaataaataaataaataaatattcatgtgtatttttcaaataaataaatatgaaagattctactatcttagctcttccttaaaagagtgcatcaatttttttagttctactatctttttataattgtatataaaaatttaacacactaaaactatggttcaacttgaagtagtttgttgcaacgtgtgtgaaatagattgtttgaacaatattttttatattgtaaattattttaaatttttaaattttttagagaatatcttaaataattataacatacacgagtacgactataaaaaaattaaactaaaaaatgatcttgaatgttgaaacaaatagagggccattcaatgtgtaacttaaacaaaatactacgtgcctcaatattataacgatcaccgtataagatttaaaggtgcatggctaattgtagaagtactcaatactttatatattaaaataatatgggaagtaggggtgagcaacgattagtttggtcggttttttacacaaaaaaatttagaatttaattttcagttttcatggttataatccgaaaattgaccgatcattatataaatataaaaaaaaaccgacaattttaattcacggtttggtcggattaaaccaaccaaaccgagctttatttttttttttaaaaaataagtctttaaatttgctataagtatttgaaaactaaaaaaactagagtattgtatgaaatatcatataatttaaggataaaaattttcttagttaaataaataatgtaaaataatttttttttaaatttgctcaaattatttgttttactagtatggtagtgagttatattaaaaaactcgtattattttatgaatgtgtgtatataatacgtaaatacattaaattataataaaataaagtagtggagaattgtgattttaaataaaaaaaaagaaatttttacaccaaaaatctaatttacacaatttattacaaatatacccctacacgcttacatcatcatttttacctttcctctttcttttattaca

SEQ ID NO: 98459 - DNA, 560 bp, Cannabis sativa
ctagtataagcatgacattctcaggaccgtaccactaagtcgtcaacagccaaagtgaagtgcagactacataagaaagtttctaccgtatagccatacttctaaaaacttgggagtaaatatttacccaaattttaacgatggtgacatggcaagaataacaacacgtggcacgaggataccgggattggattgatgaggaatatgtaaagtcatgaccgttggtatggaccgttagtcatgatcgttgaaagagaggtttgatggtcacctcttcccctgcttgagcgaggtggctacttctagggggacaatggactaacaccctcatagatgagataaacgatcaccatacacttacggtgtcaaatcagtctaggggtagatgccaatatccctacctcaaatgtaatgatatactcaaagggtaatgaagttagtctaagggtaaactcctaaactgctacatcctcatggtccaagaaattcattctcctccatgagagatggtaaatatagcacatctcccacaacgtcgaagatcaagtgaaaggggtctc

SEQ ID NO: 98460 - DNA, 678 bp, Cannabis sativa
agtaaaagaagcagaataagaagagtatgtaaaatttggttggcgagtagacttacgaatgcgctaaggatagcgaggaggagggtccacaatctcaaaaggatatggaacaggtgcataggagggaaaagagcgattttaggttacaaagtaccagtatctaatggaggggtgatttcaggttgtaaagtaccagtatctaattcttgagaccctccaacacgatgcatgcgagagtaatgaagaggagaaggaactgtaggagtagtggatgattcagactcagagaataggtcaatgttgaataagatctatttttatcaaattatgagaagtgccaggaatagtaaaaaggtatatgctcaagaaaaataacatgacgagatacatacaatttatgagaaactagatgaaacaacgatagccctttttcccttccccataactaagaaacacacaaagactagagtgtgacgataattttgtatgctctacactaggacaaagcacaaaataagtagaactaaagaatcttaaagaagatcgattagtcaagaatacaaccatatagtttctcaaaaggagacaaacctgaaatggaaaaagacggaatcatattaattaggtgaactgcagttagagctgcccactacaacaaataactctattactggcggg

SEQ ID NO: 98461 - DNA, 689 bp, Cannabis sativa
aaccaaaacatagttgcagtttgcagatgcagaatcaaagattgagggcagtagtcagaatcaagtatgagttgactaaacgaatgattagattttgatcaaataaaaaggctaattagtaatttttctttctgaatttttacatgtactaaatcgtgcccctgaacttttttggctgttaaaaattcctcttgaactattgagattgttaaatttaaatacttttgtctaattttattcaattttactgtttgagtgattgtttatgtactaaaccatgctctccagactttgatatttacaaaatcatgcccctcaaactttgatatgtactaaatcatgctacttgaactttcattcatgttagaatttttttattaaaattagacaaaagttcttaaatttaacaatctcaatagttcggggaaatttttaacggccaaaaaagttcagggacacgatttagtacatgtcaaagttcggaaaaaaaaattactaattagcctaataaaaataacatatctttaaccaaaagaatttatcaactaactcaacctatctttttgatataatacaaaaagaattagatttcaatatgagaaagctcagttacaaatcaaataagaaaagaacgtataaaaagaagcaattttttcaccgaaaccccaaagcgaaattggaaattttat

SEQ ID NO: 98462 - DNA, 1681 bp, Cannabis sativa
tttaatatttttattaaaatttagattgatcggatagtttttattgtattagtccatattaataataattaatataatagttaatggatttaatatttatatttgtaaagtctaattaaaatataagtgtggacttttttagttaacagaagtcgagcaatcccttcaactaagattatgtagagctaagttctctatatatatctaactctataaatacatattatctcatcacaattatatacttttgataattataaaataaaaattatttttaatttagaaatgtagtgagaaaaacttaattgatagtattacactattaaaattattgtaaatcaattaataagtaagcatataccctaattattatttaattattattgtgatttaaattatatggaaattaatatcttgattatttaattttactaacaaacattttgatttcaattgactatagctagggacatatatacaacaaaacatatagcacaaaaattaaagcacttatataattagccaaccgaaaaaaataaaataattaacaatcacatgtgatcttcatgtctcatatataaattataatcatgtgtcatcatcatcaactacatttatataaatattactacaattaacaatttttatatatgttatgtatcatttaaaaataagtgaaattaatatatgttggagacagaaacttttaaaaacgagtaataattttaacttaaaaattaatatctcacataatatacactaatgaaggagagaccatgtaattatttattaaattaaattaatattataagtttccacacacacccacaaaacccaaaagctaattaattttgctccacatctttaatgaaaggagcacccgtcactcttataaggtgttttattttacttcaataaatattaattaattatatatataaatgacatctttttttttttttgaaagatataaatgacattttttagtagtggtaaacatcataatgcctaataaaacgcaatgttgttgttaattgtactagtctctctcatgattaagtatgtggttttgctagtattaattagctagccatgattattagtttgtgttaattatatgatgaaatatattgggttttcacacgaaataataatgattaattaagggacattaccaatttaattagatttaatattttacagtagttatcgattaaattttatattttattaaactaaataataaattagacatgtaattttttaaataatatagaatagtaccttgaactcattttaatcaaaataaaatttaataataactcgatataaaggtactatgacaaaatttattactttttttttttgtatttattcatgctataaattatttttaagttagttatattaaaaaagaaaattaaattaagggtagtattttgtaacattttgctatttaataaataaagaatctggttaataatatttacaaaatacagaatttaaaataatattaattgatccaataattaaagagagttgagttcacaagtttattgtcattattggtttttattaattttagtttttttcttttactttgaaatttatgtgacagtcagtagtcccgtgatccataaggggaaacaccgggtataagctgtgcaatcccacaccgcct

SEQ ID NO: 98463 - DNA, 993 bp, Cannabis sativa
aaataatgatgatttttctctcctgttgtgtactttgtggactacttgggaatgtagaaataaaaagctttttaagaatattcatatggatgcagaggaattagtgcattggaccaacagttacttgttggagtacaaaaacttccagtccaagagaattgattttgcatcaaattgccactcgcatgacatggcaaaacgaaatcaagctattgaaggatcttaccaattgggcacagatgttgcattaacataagaaacagtaagattgggcttggagtagtgattaaggactggaatgaaaatgtaatagctggtttttcagtgcctataccagctcaaactacgcctattatggcagaggttatggctctaagattggccctaatctggtgctgcaacattagaattccacttgctagcgtttatacaaattttaagcagctggccagcaaagttaatagcccagccgaagaaggaactctctgctcttgctgacgtcattgaagatatcaaaaattccttgtcttatttccctaatgtttctgtaaattttcttccaagagattgtaatactcatgcccatcaaatggcaaaggaagctttagggctagataaggaagtagtttggaaggatattcatccaaacttaagtattgtaacttgaacttatcagtcttatctttaggttacaatcgtaaaaaaaaaaattataataaataaaagacttttcaactgataatattcattggtggttactggaaaagattaataatgtggcaatataagaattataaatggttaccataatttaattttaaattaaatatatatatatataagttttttctgtttttgtaataataaaaaaaattagttaatatttttccctctaaattttgatatgtattaaattatatttttgaattttttagctattaattttttttcctggattattaaaattgctggatttaagaactttaatttaat

SEQ ID NO: 98464 - DNA, 642 bp, Cannabis sativa
gttattagtttttattcataaaaccggttatatttttagttatatttaagacatttacttctggtgactttttcagtgacttttctggtaacttttccagcgacactaactttttccatgacttttccggcaaaacttattgttgttttacaaatatgggatttctactttttttttaacaaaaatatggcataaaaaaaatccatctaaatgttaaaaagttaaaaaacccataaccctataggattatttatttatgctataaataataaactataccctcaattcttatatttatgaaaattccccaaaagaaaaagataaatttatgagcgtaaattttttaaaaattatatttaaaacttgaataataaaaagtgaagaatttttatttttataatttcttatggaaaaatttacaaaaatatggatttttttcaaaaaaaaaaaaaaaaattctgtactaatatgtaagattgatcaaacaactaattgaaaaacaatagtcatgtttctaatcctttaatttatcaataaaaagaattatataccattaaaaaaattaaaaaaaaaattaaatgatattgaaaaaatgttttagggtaactagttacctctttttttttttggtatgttgttacc

SEQ ID NO: 98465 - DNA, 522 bp, Cannabis sativa
agtgcatttttatagtaactaatagtgataattacttaaaatattatttttttaaaaaaagatattttttttacattttatggtattatataaaaataacaaaaaaaataataaaaaaattacataaaagtaacagaaaaataacattcaaacaatatcaaaacaataacaaaaaatcagtaataatttaacaagaataaaacataaaaatacatcaaaagactgtattttctataaataaaatcataaaatgtgtaaaaacatttaaaattttgtacaaccgtatttttgtaaattttttattatttttatgtatttatagaataatccctaaataattaggaaattgctaagtattgtgagtgaggtgccatattggtgtgcccaaaagcaatgttgaatggtttttttgcgtgaaattgttggtgatagttgaaattcctatcttatccaataggttgctgtgttgggttcataattgatggttgttgtctacacctgaagtacacccaccacacatgg

SEQ ID NO: 98466 - DNA, 658 bp, Cannabis sativa
  modified_base (195)..(195): a, c, t, g, unknown or other
aagagttaattattgagcgcttcgccttgattacatacaatatggagattgggataattgactgcttcaactttatctgctggattatagtttgattggaacctgaaaaattacattctttgatagaaattaggaatgattgttgagggtggagaataacctttaactagtctctcatatcgtagtctcactttnaatttgttcttttctttaatttttattatcgctatttttattctaatcatcaaccccccttcctttttctaatttttgttactaaattgtgaataataaaataaatatagtcctcgtgggatcaacccttacttacgattatactaaaataattggaggtattggaattaaaatattagtaaatttgttgtggcttacgacacgcatcaaatttttggtgccgttatcggggactattgttttattttattaatcatatttagtttttggtatttttattttttttgtataaaaaaaattaattttaagaataatctttagagaaaaatttaaaaaaaaaatcaaaataaaagatagatatttagagaaaaagttcataaattttttttgaaaataaatttagattttagaaaaaaaattgttttattatttatatttaatttttgttactaacttgttcttc

SEQ ID NO: 98467 - DNA, 586 bp, Cannabis sativa
ccaagtttttgtcccagtttgggggcaaaattcctgggtctgggttccccatctatgttcagtacctaggtcccgatctcggtcaaagtttgtgttccagttcgggttcgagtctcgagtccaaatttgagtgcaggtcttggtttgggttcgggtccgagtttgggtcccaatcccattgtgggtccacatttcaggtcccaagttcgagtctggttcttaggaccttggtccagccctggtttttgggtttgggtctaggtctgggtccaaggcccggtcttagtttaggtcccaagtcataggtcagggtctgggtccaagtcccgatataggttctggtctgagtttgggtctaggtttgggtcctgttattgtcctaggtctgggttctagccttagacctggtcccaagtcataggtccaggtccgggatcgggtctggatcccggtctgggtctgggtacggatcctggtctgggtcctggattcaaacactgactacgggtcaggtcgaagcctcagttctagatttggatctcgatcttggttgtcggtcttattccaattcgggtcccgagtcttg

SEQ ID NO: 98468 - DNA, 516 bp, Cannabis sativa
aaaatataataaataagtaaatatatttgtagtacaaataaatttattatagaatcttttagtcaaaataattttttttaaaaaaagtttagttgtactagttttgcttttagcagtagcattttcataaattattcaataaattttttttttttttaactatttaccaaacactaaggggtaacaattcgtgtttgtaagtcgtattcgtgtcgtgtcgagatctatgtattaacaggtatatacttgacccgaacatgattcgcttaatgatcgtgccaaaaaatgaaactcgaacacgatccgtttattaacgagtctacacgacccgtgtaaccgtttataagcatattttccttaaacatatcaactaataacacgtttatgacttgttaaaatactagaataacgataaatatgtcattaacggctcactttcgtgttagccgtatcaacccaaacatgactcgtttattaacggctcactttcgggttagacaagtcaacttgaatacg

SEQ ID NO: 98469 - DNA, 722 bp, Cannabis sativa
  modified_base (412)..(438): a, c, t, g, unknown or other
  modified_base (584)..(591): a, c, t, g, unknown or other
caccatttgggaagaagggttcaaccattaacatggttatggttttcaagaggtacaaagctggtcatcatgatggcatagcagctgcagattggaagaatcctccagatgcaatcttttttaatggggatctctgtgtaatccctaatatcactcaattctagtacaagacacccctagtacaatatataaatatatatatactaggttgatgttacgtgcattacacgtataattaattttttttaattaggttcaattaagtgatgttaagtgcaatactacatatatttttttaatttttttttattaggtaatatattttttctaatatttaaatggggtttgagattttaatctttgagaaaaaaaaaattagctattgcacccattgggcccttacacccacggnnnnnnnnnnnnnnnnnnnnnnnnnnncactctggctgcttcttggattgacgactgaccctacagaccaatacgagtgtttctagcgtgctttgtcctcactcgcaggcttcttgggaaaacttcccaggatgtcaagcacgcttaaccatagagttctttcgtgatgggcnnnnnnnnaacaagatgcaccttattgatatatgtagtaccaatcaatccatttatgctctcttgaactttgtagcctcatacctacacagtctcagaatcatcgcacttgaccatccccaagcagtgtgggattgcac

SEQ ID NO: 98470 - DNA, 502 bp, Cannabis sativa
tacagaaattcatccaggatgttccacctcctctatagtttctcaatgatgctgatcgtgttgctcacaggttcaaccttgaatttgtggattgggaggtccaagatcaactccttgtttctcgacttctctcctccatgactgggagcgttctaactcgaatggtgggttgtaacttagctcgccaaatttggaaagctcttgagcaacactttacactaaaggtctcatctaaaattcttgaattcattgaattggacctctactttattcgtgagaagatccttcagctactagttcaagtaaaacatgttctagcttttgatcaaattgttgatggtttaattaagccaatctcaagttaactgatctcatctttttgacacaaacttaccattggtgatcctacctatgttaagtttgagggggcgtgttaggacaggttgttagataattagttaggatggtagttaattcggttaactacctaaccacctattgt

SEQ ID NO: 98471 - DNA, 1718 bp, Cannabis sativa
ggcttgctttcagtgtggatcagttgggcacctcaagaaagattgtcctcagttgaagaaagaggaacctaagccagaagctaaacctccaccagtgtgtgtatttgccatcactcagatagatgctgccgctagccctttagtggtcacagataagctctttattaacggttccacttatattgtattatttgattctagagctgcacactcttatgtcacaatgagagttcttaatcatcttggtaggcctagtgatgtttttgagatgggatttggaaccctgttgcataatggggaattaattatttcaagaaagtaggttagatttgtgttaatcagaattgaagacagagcactaagtgctgatcttatggagttaccattggccgagtttgatattatactcggaatggactttttgtctaaatactctgccaatattgattgtaagcgaaaaacggtaattttccaaccagaaaatgaagaaccattcatttttgttggttaagttcaaggttctcgtatcccaagaattttagcgtagaaagctagggatgtactacgcagtggatgtgtaggattcctagcggttgtaattgattctggtaagcctatgttactcagacctgaggaggccaaagtggttaaggaattcctggatgtgtttcgtgaggaattaccaagaataccacctcagcaggagatagatttcattattaaattgatacctgaagcagaacctatttcaaaatcaccttaccgcatggcagctgcagaattgaaagagctgaagatacaactttaagggatgtttgatctagttcacctgacctagtttgtcgccttgggagcttcggttttatttgtaaagaagaaggatgggactcttcgaatgtgtattgactaccaggaactaaacaagttaactattaaaaacaaataccctttgcctagaattgacgatctgtttgatcaactttagggtaagacggtattctctaagattgattagagatatggttatcatcagttgagaatccgggaagaacatattccaaagacacctttctgaactaggtatggccattatgagttcttggttatgtcattcggattgacaaatgctctggtagcctttatggatctcatgaatagggtattgaaggatttcctcgataactttgtaattgtgtttatcgatgatatccttgtgtactctccgttagaagcaaaacaagagcagcatctttgtatggttctgcaacggctcagagatcataaaactctatgcaaagttcaaaaagtgtgagttttggctatcacaagtatcttttctgggacacattttcagaaaagatgggattatggtagacctagggaaaattgaggcagtgaagaattggcctagaccgaaaatagttactgaagttcgaagtttcctcggtttagcgggttactatcgacgttttatggaagggttctccaagattgcaatgccattatctgaattaaccagaaagagtcaaaggtttgtgtcgtcagataaatgtgaagaaagttttcaagagttaaaacaacggttgattacagctccagtcttagccctaccgtctgatcaagagaaatttgtagtctattgtgatgcatatagacagtgtttgggttgtgtgctaatgcaagcagacaaggtcatagcttatgcctcacgacaacta

SEQ ID NO: 98472 - DNA, 530 bp, Cannabis sativa
attttctacggttaaatcaggatggcgtttgccttaccaaacattgagttcttatatacaaggagtagtattcaattatttcagaaaaaatagaggttatgagaagaatttcttatgcatctgcagtaagaagtttgatctatgaaatgttgtgtactagaacaaacatctgctacgcaatgggagtagtgagcaagtatcagtcaaacctattaacgcagattttcattaactattaaataagccttttagtaccgaaattaattaagtaataagttaataataatagcaataaatgacaagagggttttttttacatggttttaaagttaagtttttatcgtccatgagtccatcttattctgggttgataaattgtatacaaaatacaataaattattttacaaaatgaattctttcttttcccaaaaaatagtcgttccttgttccctggtttaattcctatttataagagtctaggatgacaattattcccttgagatcttatcacttgtaatcgttcatgaaac

SEQ ID NO: 98473 - DNA, 926 bp, Cannabis sativa
atgtctagttttataagtagcttattttttttcttttgtaagaccaatgttactagttttgttttgtatgaccaatatacgtagctaactttcttttgtatagtcaataaggttaattttaattttgtaagatcagtatgactagtttttatttgtaaggctagcatgctagttttgattttgtaaggcttgattagtttttagttttgtaaagcttgtatatgactagttttgatattgatagggaagtttaatctaataataacacatcagacatactgtagtcacctttgacaatggaagagaatatataagctctactctttacattagagaattctatgtgactatttatataaaatttgatattttaataaatatttattatatatatatatatatttgtaggtgttctattagtggggtaaaagtcgcaactctcaattttgaagttttcttttttgatattaaagttttattgtgtagtttgatctcctagggtatctctacatgtcattagaatagacaatgatctttatagatagaagaaaatcctccattagttgtgtaactttattacttatgttattttgtatcgatttctcctacaaaaataaaatttacctcttaaactaattattacatttctttttcaaagaaaaaagaaactaattattacatttatatatttatattaattaaaaatataaataatttatgtggggacatcatttctctaaatttatttattcaattatagtacttgagtagatgcaatataggatgtatcttatataaagagttaaatttattttttttaaaaaaaaccatatatactttattgctcataaaaaagcttgcatagaacctccatttaagaatactctttttaagaataacttctaatttgtcaaaaaaaaaaaaaa

SEQ ID NO: 98474 - DNA, 541 bp, Cannabis sativa
cctgatgtccatgttccagccatggctggaatttccatgaacactgcagatgtggtcaatccttccatcttgacagacactgcaatcgaatcactacaactagctaaggtgacacaaacaccctagtggatctgagaaatcgaccattgcctctaagggaggaccctccactggcacctcccacttaaggaaggacccatggggaataacccccaggaacaacaactagacctcgtccccaatactatgctggagagacaggactaggaattggcgagcctgctattggcaagtcccatgtagacttgggagaagatctcgagttagctagacttagagaggtcgtttgccaagctggccaaactaaagaaccacacacagctaattgcgatgtatttgatcaacaaagacacgaattcttgaaatggatagatgactaagagtacgtcctttattctctccaagcggagctggatcgctgcaatagagaagccaacaacttgataaggcggatcaatcaaaagactgcacgaatagatta

SEQ ID NO: 98475 - DNA, 1443 bp, Cannabis sativa
ctgtagctatatgtaaaatgaagataaaatgactcatctgatggaaggctatttttactcattctttattttattttaaagatataagtgttttgaagcagctgatggggatgctcttagatatccactctccaacttcaatagttttaagtttataaatctaatatattattaaaatattattgtaaacttctataagaaataatatattattctaaaaactatattaatttcataaataaatccccaaacaacttaagaaaattattactctcctccccattcttttattctacgtcaattattaacaagagcattcaacttcattctcattaaatgttgtattataattttataagctaattagaattcactcgaccacgaactttaacataaaccaaatcatacacctactttctaagccgctaaaaattctctcaaaactattaatattgtttaacgtaataattatccttaccaaattatttcccccgaattttaatatgtatcaaatcttatccttcaaactttgaccaaaacgtacccctaaattttcatccacattagaagtgaatttattgaatcaacgagaggccgctacgacaatcagattctcaatcaaacatcctactcagacgaaatagctagaattcataaattatcccaaaatttcaataatttatttatgggtttttgtctaaaaacgtgaagaaaaggatgagtctacccacgaggagtaatttcttcaccacaactaaagttttaaagagagtatataaaacaagtagttgaggtttaaaagaatgtatgtatataaaacaagtaattggtcaataaacacatttacttaagaataaaccaccctgatgagatgattgtaaagaataaaaatgatttatagaaatgaaaattaaacaatagaaaaagaaacgaatatacaattatacaaatatatttttaaaattgcataagctggatttgaagtcaaactagataggttgaagatttagagatgaaacaacaagaaggtttatggtagtttggccattaataaactctactttcatttaagaggaaaaacttgcgattcttgtattaacaaagaccttaaccacttgagactagctcaagtggccataggtgggtgtgtgagtcttggagatcttgagttcgagtcccagataaaacatgttgtaatatataaataaacgcttaaataaaaaaaaaaaaaaaaatattaacaaagaccttgcaaagctctttggcaacttttaaattgaaaattgaatcccaccctaaccctattcataggcagctaagcccctatttatacacaaaggctcccattagcataagcccaacacttcaaaaaggaaaaaaataaacactaacattattataatgggtaaataccattttgaaccctgtgttttgcaaaagtta

SEQ ID NO: 98476 - DNA, 787 bp, Cannabis sativa
aggctccctatgcgcgtactccatatacatcgcataaaaacctaaagctatgcggtagctatttggggtcagttgaaaaggggacacatcataccgcttgaggatagcggaaatgaatggatgaaaagggattgatactccacatcgaagaatgggaatggaaactacgatgtcctctgagggtatgatcgcggggtttatgaagggaaggtgcggtctttgagtggggtgaggacgcatggtgccgagtcgcaataagtttaacctcgaaaaggtgaacaagtcggatttagtgactcgtgagaccaattcctcgcatgagaaaggctcattcagttgggtgttgtccactgaatcagtcccactcccttcggcatctccctcctcatctgactcgcgatctggagcctcccagtcctcgtccatctcctcgacttcagtgtcaggagcatgcctagaatgaacaagatgttcacgagttgataccgtagactcgctatcacgaatctcgatggttcctggttcagcgagctcctgaaccatcctccccatatctacagaggatagcgggcccaactccgtgtctccggcagtggggatctcttcttctgagatcgaggttgggatgaagctatcttcctggtggtcctggtcgccatcgaaagcgttgcctccagagccaagcatttggctatccgacagatcgcccatctaaaagatagaagatcttttcagtgtggtgaatgtgcgaaaacaatataattgacctcacccgcataaaaaattc

SEQ ID NO: 98477 - DNA, 1755 bp, Cannabis sativa
gtttaaggtgctacttgaaattctccacagtagccgaagtggctccatactgctccattcaacaagtgtatatcatctgcttaccagatggtacattttgtgcttctagaagaagaaacaagttcctactcgaaaggagattttgtacttctccaaaatccaagcccagaatatgaggaaccacaaggagaaggtcagcttttataggttaaagaggcattccaaagactttgtgtgccccattattgttatgaattacacatacgacatctggaactactagttttacaccttcgactttccacaaacgagagttccaactctctgtctcaatttaaatatcgtaagtagtgtagcagtttacttgaatttttttatttctctttgttctcttctcactttgagtattgaacttattctgcctttttattctctccaggctctatccctcggtcccctttacctttagagttggggacgaggtgatctttctaccactttttaatagtataagagttacaagttggacaacttgtaaccaccaagaacctccaggaggcttctttgttagcttctcataagagcatagatgctctgactgtgaaggatcttataagagatcttctccatggcaatcctacaaaattgaaggaaaccattgcagttatcatcgttgaagaggccttgaaggctgttaaagcttataaaaggtagttggcagattggtatatctaatttctagaaagttaagtgaggttgaagagctctccattattctctttaaagatagtgtctgtaatgaaggtactcttggagcaagtactttcgaaagttgtaagacccaattttgtcttgttagggctctatctttggtgaagttagactatttcaaccaaggcgagtttgacccttacttctttcacttagatcgtcatagatatcctatcaatgattatatagatagagtagacaacatcgtcaagagtccaaaaaaatttattccactagcacatgatgtctgggtagataattttagcaagatgttgtatccaaggttcttccaatatgaaagtctctaacacagagaagatattgccaattatctagagggaaccccaaatatgctaaaataatttgtttgaatctcactcatgtactacttttattcatattgttctaatgcttcaatgcttatttttttgaattcgttttattttttacagagcaaccacctacactccaaatggcctggtagaaaagatttttactaccatctctcagagatcagacgaggtcagggaccttcgcaaaggtgtttgttgtaaaaggaaggctttacagtcttttgaccctacagctaagaagccatcaattctggccaaaggccagtcgactgtgcataaggttccagcttcagaagttgtttcctatcctttaaccacttccagtgcagtagattcttcttcttttggaagagaaaatgaaacttctttggctagtgttcttctttagaataggataattgatgtgcacaatgaagaggatgatgacaataattgacttgtatttacacagagaaagagagtttgctttgaacttggcagagatcgcaaaagatcaagtgctgaagctaaggataaacttcaacaacttactgtttcttggaagtatagtttggaatcctccaaaagaagaggaactgacgctcatagaagggatagaccacatagtcagagcactcgttcatgaaaagag

SEQ ID NO: 98478 - DNA, 510 bp, Cannabis sativa
aactgagtacacgtgtcctctaattaagagtatggtctcgagtttctaggtgagagaaatctcactataacagaagaaaattgaaaaaactgaagtaaaatcgtaaaaggactgttaactgccataaagcataaatattgggtagacgctcttaactaacttacatatttaattagctcatagatagtatcaaaaatggtgcccttttggggtctgtcgaagttaaggtttttaacggtttttttctcttttcaactattttattcatctttttttcaaaaccatctttcaagataactgttccctccactatttccttcatcatcctccatcgctggcttcttcctcttgcactaaattatccccttttcacctttatgaatactgtagtggacaatctccactctaccttatccctcactgatgaggaaagttctattcttacgctccctgaagttgctgcactacaatcaactgatctccaaccaggttttgcccttttggcaaggg

SEQ ID NO: 98479 - DNA, 694 bp, Cannabis sativa
atctcaaacatctattgagccatgggatctgcaatacaagagaagtgttagagacgtggtttaaaaaaaataaacatgtaaaagtttaatagaagttgttaaaatgaaaaatggttagaaaaagaggatagtccctacctcgacaccctatttcgtcttttacaaaggcataatcatacttctagaggcatcgtcctcgagagagctatcgaagggaagaaaccaactgaaataatgtgagaagtgacatccagagggattaggattagtggctctgattgcatatgggactggcctaatgaattccctaagtaaagtaaatatttgtttacccccaaacaggatcgcgacatgtgtagcttagggagtcactcatcaaatctagtagatctaacttagcatattccccaacgtggggtgcataaattatagataaaagagacttgctggtatcggtagcattggctttgggaccctccatgttaggtaagggaacaaccgagaccaggcggggagcacctaatttcttggccactttttaggcatccttacaatttgcaacacttcaaacatgagacacttgatcctcctcatcttaatgtctttgttaagctttgtacttcctctccaccttggcaatataggaattcatgtcatcatcttctttctctttgtccttaacattcagacagat

SEQ ID NO: 98480 - DNA, 802 bp, Cannabis sativa
ctctcgatttacttgggtagattttttaagagaaaagtcagacacttttgatgcttttaaaattctttgtttgagattaagagttgaaaaaggatgtaatattgaaaaaattgttcgaattcgaagtaatgaatgagctacacctcacattactaatactctaaagtataaaaaagttctgtaaatgtatggctacaaaaaaccttttattccaataaaaaacaaatcataaaactagtacagtctatagtatgatctcacttgtgaaagccagaaagattttatttgatgtattagtaaaggcttgaaattgaccttgcctaaactaagactaatagtgaaatttaataaaacttcatatatgtgatttgtgtgcattagattagcactacagttcatctttagaagaaccagttttggggtttgctgaggatttaaccgggtaagaagcatccattgctataccacacagcccttcttctgcatcaattcctcgttccatcctaatatagcctttctctccccattcggctccccaagagttcttcactatccaatattttgtcccatcaagagttgctccataccccactactgcaactccatgatttagctgtatactacattctcctgaatagactccctacataaacagaatcccattgcagaattttatcaagttttagctagttccaattgttttcttataggaaaagtttatgaaaactgaattattacctctgagtaaaactgaaaatccctatcaccagcatctatggaaacagatacaggttggtttgct

SEQ ID NO: 98481 - DNA, 720 bp, Cannabis sativa
tttgtgccatttattatgacttgtccttatttgtttagtgtagttttgtgttatggtcaatgggcaagagaagcgatccattttgtgctcatgatatcactttaacgacttttcacttataacagattagtatttcaaataaaattaacatatgtgacttgacacgtaacatctatctagtattccaataaaattaacaacgtgtaaagagtgtttttttcttctaagaaaccacaaacaacttattcaaaagacgaaaaaatattaatgagcacatggaaactcacctcccaaaattaaaaaactttatacatgagtgatctattccacatttaacaaagagtgttgtcacttatttgtacttaattgaaaattagtcgtagaataggaagtgggcataaggttgtcattattttcgttgaaaatcttcatatatgcaaatgtgaaggagaggaaaataacatgtgaatggttgttaagcaattcttccttataattacctcagcaaaaaaaaaaaaaataaataaaaattctaccatcttaaatagttataccaattttatttttggtgcaataattataataattcaaattaaatattacactaaataaatatatttaattttaaatttttcatattttatattatttatattaataatccaaaataattaatttataatataattatactatagtgataagatttaatataattta

SEQ ID NO: 98482 - DNA, 1102 bp, Cannabis sativa
agggctcccactatgtctgattttgagactgtcaatcaatatggatttgatccatatttcttgaatttagatcatcataagtattcatatagtaggtgtatagacagagtagattgtatcgtccggagtcccaaccatttcatttcacttttgcaccatgatgttagagtggatgcatttagtgaaatttacttcccaggcttcctccaatatgaaactaatttaggtcaagtggacatcgctcttttttctaggggaaaagtcaattacactagaattaatggtttggaccttcttaatgtcttgcatgatgatgtattgtaaaaaatcatatcttttattaaaatcttgtttgataaatattttgtttgctttgtgtagatcaatcagccactctggaaatggggctactgaacaaattcttgggcagcattaaaactcgatttgacgagatttaggagatcgcccaaggaggcaaagatggcagaaagaagaacaaagcttttgagagaggatctcaagagccaacacctccagcctcaaattcagaagctgctccgaaggcttcgggcacagaagctgcatctactgccatcatagacctaaccaagcctgccttatttgtggagcctttgaattaggttcctatggagagctccagaggggatagctcggactatgacagactcgtggtgatcaacaagaagcgggtcgattcatctgatggtggtgctagtaaaaaggaaagggtggagaccaaggagaaagtcatacaggtagctgcttcaaggaggcaggcaatagatactcagtcccgaaaggggtctaacgctcttgatggcagaagaccacctaggcaaagcacctggacatcaaagcataatcatgatcctcctatgccactttagcatctaaagttatttctgccacctctgcccaactgtctagggaaaggactgaactgcctccactgcctctggcacccttcactcttcctgtcatgcctttccggttgacgaaaggggataaagctcgcttggaagctgtggatcaattctaccagaagaggcatggtagtgattttgaggagatgaagatgttg

SEQ ID NO: 98483 - DNA, 792 bp, Cannabis sativa
agaagctgcgaaacttggatttttgatcgatgttaagaagtggcccagattgatagatagtcaacctgggcgttggggtacccgagcaccgggtgttcgggtggtcaaaaataaatcaaattttattttcgaggtattgattcgtgtattttcagctttcagagcctggacggtacagaatactaacttaaaattttactttaaatcaaattttagctcctagggcttggattaggttgctccatgttttcatgttatagaatactgaaagatagtgagttagatccaagttattgaagtacgaacttctatctcggagctcccgaggtcaaccaaggcacaaggctagggtcccctcctaggtcgactgctatgactcgggtctactcaactccgtgacgtcatccttcttgtcccatgtcaaacattgatgtccatgtcaccaggaaaaaatttcgggttaacaacaataaattttctatatttaaatatacatatggtataggctaataatacgtgtgtatatatactaaacagccattatcacaactctgtcctacttatctaattgttactttactttatattctatagtagaatttacataaaatatgggaaaaaatttagagtttacttttttatggcataaatttttaatccatagcttatgggttttttaatttctttacaatcttatgggctttcttataccatatttttgtaaatatatatttgcatttcaaaaattaaagtatttaagaatacaattaaatgctttaaaataaaataaaa

SEQ ID NO: 98484 - DNA, 520 bp, Cannabis sativa
agaagattgacaataatggtatgtaataattgaaaggggtaagtaatggtctataaaattgtgcttttacaaaggatatggatgtttaagcaaaaaaaaaaaaaaaagagagagagatttggatgagaataagacagttaacacttttattaggattataataaataattaaatatgtataattgatggatatataggacatgaaatgaaatggaaatgaatggtttttaagccatccaccatctaatttttatcatctattactctactctgccccttatgtaaggtacatattaaaaaaggagaaatgttaaagagcaccagtagtgtttagcagtctcctacatgtcaatatcgttattggtccaactaagtatcgggtctcatataatttaatataataatttttaagatgtatcgctaaccaattacaacgcgacatgtcgagaaagtgttggacactactaatgcctaatagcaatgctcattaaaaagagatgtagtttctagtttctaccct

SEQ ID NO: 98485 - DNA, 520 bp, Cannabis sativa
gtggacctccaatcaaactatcaaatgtctaagggttgttgatcaactcgtgaaagtcaaatgtcaacttattcatgtcgtagtttgaagtaaaggggcaaaaaagctggaattaaactgttcaagatcaaactcacttgagtttcttcatctatgatagcttcatggatcttaacttcctgggaataactagccatctggagaaggtgttcatgcacattctaatcaggtttcatccatgcattgataaagttcttagtcgcattaaaatgagcttgatctgatgccttcccaaatagtttagttaattggttcatgatcttgacagtcatgagagtgttggcaaaccttcttttcaaggtatcaaccatgctagacagcataaagaaacgagctttgttgttagcattctgcaaatgatcaaatttatctcttattgtcttggttacattttcacctggtcgttcaggagcttcctcagttaacataaacaaataattttcacctatgagagcaatat

SEQ ID NO: 98486 - DNA, 631 bp, Cannabis sativa
cacatgcccaagcctaggttgtacaacaccgtaggctgtccagcacttgagttctaccagacatcaattcatacattgtaatcctaagggtattatagtagatcccacctttagcgatctggagagtaattccctcagtataaggggagtaggtcattacccgctatcacaagggggccaaacctctataacaaatcccattgtctattgctttttattctttgttatgcacacacttggcaagcagatctccacgaccccgctgtcaattgatcacttttcaaggttaacaaatctcattacatatggagagtcctagagtggcactctttgctaggtgacaattctaggacgaatgcttaattcttacgaaggatgcatgaattacattacagatggggagtcctagagtggcactctttgctacgtggtaattctaggagtgatgcttaaatcctacgaaggatgcatgaatcccatcacggatggagagccctatagtgacactctttgctacatgacgattctagaaaagatgcttaagtcctatgaaggatgcatgaattccattacgaatggagagtcctagagtagcactctttgctacgtgataattctaggatggatgctt

SEQ ID NO: 98487 - DNA, 504 bp, Cannabis sativa
agaacagagattatattttttatcggcgaatgttaaatggaatagggacaggtaggggcggagacagaacttaattactaggaggccaactattaattttttttttcatcccttcactaaaaaaatctttttaatatatttcttatcaattttgacaactaggaaagtttttcagtccaatattttttattatcgtgtacatgacaattttcacagaccacttgtaactttttaaaaaaatctaaatagtttataatgctaaaaataaagttcacaaaattacttatcacgcgtatataaaaaaaataatcacacatacaattaaattttttaaccttaattttagtattataaacaaattagatttttctaaaagtttataaatgattccgaataactagaatgtacataataataaaaataatttggtgtaaaaaatctctcctagatggaagaaaaagttatagggtgtaccgaaaggaccctttaatagaatgtactata

SEQ ID NO: 98488 - DNA, 570 bp, Cannabis sativa
atggagtgtaattgtaatggggattacattggttttggtatgtaatcatcattacactcaatgtaataaccattacattgtaatagattatacaagttaaaaaggaaaacaatataatagacctattcattaccattacggtgaactaaacatcacctaagtcttttaaagtgtggtgtcttataacaattctcggtcttcacaagtgtgcacggttaacctagcccacatggctttcggcatagactttgctctaaagtctagacctccattaaagtactctaagagtgtatagtatcatatctatgtttcataggaaggttttttggtagggtatattttttgacactaccgtgaataaggtttttatttttggcacatagataaattatagtttaattttttatatgattgtacatattgtagttatttagattttcttacaattttttgcattttaatatcgattgatgaaaaaaaaactcatgaaaatatcgcttgtagtgttgttgttcatacaattttcgcaaattttttaatttttcgacttaattttaaattagagtttta

SEQ ID NO: 98489 - DNA, 712 bp, Cannabis sativa
ccactcatcttacctcagttgctaagaccacacttgctacctcgagcacctcaatgtgtttccttgttgagaacaagatctcaaatattcattaacacaacaatacattcaagtatgataatctaaactcatacagaaattcacgtaaaaatacgtaataagttaatatcacttgcatgtcacactatacataatcgtttatcattttgattcacacaaacacattgtatgtactcaaataaacatttttaacgtaaaacatgaattcatacaaatattttttacgtaaaattttactaaaatactatttattctaacaaaacccaattaaatagttaattaatcacaattaattataataaatacctacaacatctaataaattataaaacctatttcattttatatcatagacagcaaatagtattacaaaaatatattttactattttaacagcacttaactattttttataattaatttgggaatcaactaaataaatgcatgaaaaatataaaaataattgaaaaccaaatctaactattctaacacagtttatagtctgtactaagccataaataatttattttgaattttttaagcaatctaggtacttttcataattaaattaagaaatgacataaataattcatgaaaaatacaaaatcgcctgaaaattcaatctatcaattttatagtagtttatatcaca

SEQ ID NO: 98490 - DNA, 1307 bp, Cannabis sativa
attggcagatcataccaaagtcatatagtattataatttttctttttaaataaatgtggtattatttataatattagattaaattagtttcattcatgtattttgttgagccgtacgtaacatgagcgtaggaatagataactgatagtgatatgtttgctcactgacaagagagtcacagctttgacttggtctctctttagttaagagtgaagctttgactattggtcttttgtaacttaaaaggtttggtaaatgattttttttttttattgtttttattttaagcagtcaattagaagaattatcaattatatagataatgaattgatgatgcatgatcatgccgtacgttgtttgctaatcaatttggtaaattacgaaccaaaatatcatatataatatatccttttttctttttttgaaaattatataatatattctttaaattagcgtttgatcatcagttggcgtacgttgattatgtggcataatgttgtttattctctttctcctaatatgcaccgtgcacgtggaggaggtaaaagttaaaaggcttctctgaaaagctagctagctagcatatatgaaagaaaaagaataatgtgagaaaaaaataaaagagtttagtatctgaaaaattgagcataataatatatacactgtacacactgtatatttaaattatgataaggcatgttggggtctaccattttatcctaacttgaattccaagaaagaaaagtgaagttatgattggatgtgaaacaaccattttgacgttaaccgaaagcacttctcttttattatatatatatatattataaataattacagtatggtttaaagtagaacaacacttccatcttataatatcttattatagttaggaatttgaggagcgaggaaaaccactcatacattagtagcttatccacagtatacattttcaattatgcatgtaaactactacatcttttacatattaatactaaatatcttatggtaatcgactttaaagttggtacttgcacttggtacatccccatccctataatgtttctcatatctaattttcatttacctgtatgtcccctctatagattttctcgagatctttattaggagttttgtcgttaaatctgtttgtgcaattgcttcaatatttgtacaaatggccccggcccccaccaccgccaccaccaagttagatgaggtcaaattaaagatcccccgacacaaactctttctaaatttcaattattatatcatcccctccacatataatatatgtattctctaagaag

SEQ ID NO: 98491 - DNA, 1133 bp, Cannabis sativa
tatataaatatataattaattaatactttaatgtactaatcattcaattaattttttaaaaaaatgtactcattcaatttatatattcaatttatatatttgcaagtggcattaaattaaacatttccactaatcgtcgtacctctctttgtccataatctatatatagataaatatatatatcaaaataatatatataataccaaattagaaagtaaaaccctaattattaaggagtgtcattcttaccaaacatgagaaattccttattaagccacatccatttattcaatcactaccattgaaaaattattgtgatctaaaaaagttctacatatacaattatttatagtgatacttctctataggtaatcttttcttaattatatttaactccattattcattataaataaaatatattaatggtaaaaagtaatgagaacaattttgttaattaattaatggggtcttacaaaagttattactcatcaagtaaaaataagctaattaaacttttacaataattctaattaacaacttttttaattaaggattgttgtttggcgatatcataattttattattaaatttttggggatagtttctcgttctaagaattcaacggcgcacatgttttggcaaatgatatatgctttgcagttatacaatgaactatcttagcttgagaatattttagcgtcaattataaatgtctacgtaagaaattcatgaataattataatcactacttaaaaaagataaattgttacccaccatataaataaggtcacatttatagttatacatatatatattgtaatatagttattgttcaatgaatgatcactaaattttatggttataatatatttgtcacaactttttggcacacagatttgttaataactttcttttatatatatatatatatgcccattagcattcagtgcatgtgcgacttataatgtaaatgattaatataattatataattaattttgtagttaatatatatatttatatatttatagcaaccttttactcttgggatggcatctttcaaagaaatattgcagtgtatagagaggtaaactttgagtaagaggagtcaatattaatattaattaaaata

SEQ ID NO: 98492 - DNA, 540 bp, Cannabis sativa
aatgagttgttcggggaatctgtcaaaactagttaaccagttttacaggacctggcaaactggttaaccggtttgcaccaggtttccccaaacaactccaaatttgctcaaaacttctctaaatgccaccaaaccatccagagtacctaaacattcttcgacaacatattcaaagcaatagaactaagaaagatacttaaaatcaaaatataccattaaagatctaagtttgagtttcaaagctcaaacttgtgtaattccatctcaatacatttaaaccagcatccagaactcaaaatcaacctaaaatggacctaaaaatcggaccataaccttacagcccctattctctaaaatcacaagttaaaaccaactaaaaccttgagaaattcataaacaaagagtgtctagggcttaccttgattaaaaaatcctcaaattcttgctgaaaacataaagatcagcagcaaattccataggtccttgctggttagaagagagagaagtgaaaagagtgaaattcctatttcttgatttttt

SEQ ID NO: 98493 - DNA, 1040 bp, Cannabis sativa
tattataatgaacaagattataacattactattattattattattatataattttaacaattcacagcactttaaaatttataatttactaaacactcaattcagatttttttccacattttccctactattactatttttcacacacaactataactgcttttttccacaacgcaactatgtcaaattaatacttaattactttaattcatttttttaattataatatcacaattatttttaaataatatatttaatatattgattatcactaatgataattattgtttatgtcaatttatatcttaattttttattatgtattagagcacaattacaaaaagtatacaaatataatgttggataatacttcagtagagatattaaaaacgactttatatagagtatttttttaaatatgtgtcattacttcattttatgtccatatttaatgttatttttttataattatttataaaaaaaaatactaccattgtttttgtcacttctctctttttctttttctccccttctctctctctaaaagttcttaaaagttactccttaaaggacccaaaactgtaacaaaaaagtaagagctttgatattttttttttttctaaaaaaaaaataaattgagactcagaagttctctaataacgaaattaaagaacaatacaaaagagcttttttcttttgtggatatgatctcataggagagagaggtacaaaagtttttttgtgtattgttctttgacttcgccattagagaatttttgagtctcaaccactatttttcgtttgaaagaaaatatcaaaacccttaatattttggttatagttaggtcctttgaagagcaacttttaaaaatttttagagggagaaaagaaagaagtgacgagaagaatgatagtgtttttaacaaataattatgtataaaaaatatataaaaaaataatattaaatatggatataaaaaaaacaatgacacatattaagaaaaataactttacattttttaatacctctacataatcat

SEQ ID NO: 98494 - DNA, 539 bp, Cannabis sativa
aaatcctttaccatcctaggaagggcaatgtagtggccgatgcccttagtagaaagggtcccggacaagtgactagtatattcaagttttcacctcacgtagtagatgatatggtcaggaaaggtattgagtttatagtgggaaaacttaatactttgacattgcaatgagatctattagacaggattaaagctgctcaattagctaatccaaaactagtgaagattcaagaagaggttataactggtcaagctaaagattatacagtgtcgggtaatgtgatgctattgtttagaactagagtttatgttccatgtagtgcgggacttagaaaataaattctcaagtaagctcataccactacttattctttacatcctggcactaccaaaatgtatcaggatttaaaatctttctactagtggtgcaggatgaagaaagatgtggtagagtttgtatttcgatgtttaacctgccagcagattaaggcttaacatcagagacctataggattattgcagacacagacacttcctgag

SEQ ID NO: 98495 - DNA, 797 bp, Cannabis sativa
taatcattgcttgctttgaagtgaagtaaatagctagctcgaaaatcagtttacacaatgctttaattagtttttatcactatcgaaaataatgacgcgtgtccttttaatgttacaatacaacaaattaaataataatgtggccccacttgtgatattagtgcttactttaaacccattaatttcttctttaattacctttaattacgacattatgaaattccaatatagtaccttgatggtatataatatatataaagtttgttagatctacctttcatgattgatcatcttatctgaattaactacctttaataaagtttttttgttcattattgtaaaatgttttttaacaaatgaaaagttgcatgtagattcacgtgaatatactatattttacaagctaaggctaatataggaatgaataatgttattgagtacaatactctttagcactttctacatgtgtcttcttattactattagtaggctcgaatcttggtatagacggactaagcttaaagtccacttagctcagcaacttaaaaaaaactttcttgatattatatatatatatatattttttttctaaataagagtttaaaaatatttttttcttatttattatattttaggaccaatcctgactattagttagtaaaaattattatattaaattatataagattcgataattaattataccaatatcaataagacgctaaataaaatattagtgctatctatactttttaacatttatcggtaggaatgtcaatattttttttttttttttt

SEQ ID NO: 98496 - DNA, 525 bp, Cannabis sativa
atgttgatttgttatttcttaagcaatatgtgcactttggtgagcaattgctctattgaatgaagttgcattttttattcaaaaagaaaaagaaaaaaaaaaccttaaaacgatgtcgtattcaaaaaaagcgcttaggtttagttgagaaaacgactggtttattattcaaaaacagttggatccaagaaatggtcgttttctgaaacgatctttggttctgaccagtgaccaccttcctctcccaaaagtctttactctctttccgccatggcttccattcttggacctccttcttccttattcccattcaaacacccccatatacagcaatctcaatcaccccttcttctctctcaccacctaaaaccctacttctcaactacctcttcttccaacccatttcgctactctcccttgttctctccgtctaccgcaaattccatttccccacggagatctttttccgtcagggctgccagggggaaattcgagcgcaaaaagccgcacctcaacatcggaacg

SEQ ID NO: 98497 - DNA, 620 bp, Cannabis sativa
  modified_base (203)..(205): a, c, t, g, unknown or other
ttattagttttgaataccatattttatgtttttgtactatttctaagtcaaaccctaattctttcaaagttttttatctctaactcgctgcctctctcttttcttttctctcttcagcggttgattcttgctccgatcgttgttagctccggtagctgaagatagctccaactaaattagtaacaacttgtaactaaatactnnnttttagtcacaagtaacattttgctgtgactaaaagtcacatttattcacacaaaaattgtgttgtgattaaaaagttgtcactaaaaatagcaattttttgtagtgtcatagtaataacagaaaaacaacaactataatactaataaacaataaaaaaaatgaaaatgtcggacattgtaaacattaagaaaatcatttttttttcttgtagttctttcaaaaaaaaaaagaaccttttctcctgcgttggtctggagtaagaaacaaatctaactactcctttcacgacttcagcaacctcgatcacagatcttccaacagttttgataacaaattcgatgttgtggacaatgtccagacgagatataagcttttgccggagcttttatccacggactttttagtcacaacat

SEQ ID NO: 98498 - DNA, 616 bp, Cannabis sativa
aaattttttttttgggcccctggactaggtgggccctaggaacaagcctagcccgcctatgcccagggccggccctgatcccatacccaaatctgtatgcactctcaaattttgctgcatctacattaatcttgtaattatcacctaatggagcacaccattgctcatccctttccccaacctccatcgaaaaatgagaaggattaaaggagttattttgagcaaataacctttgttcaagatcacctttagcaaggcaacaatatttttaaaagtattactcttcccatttcacactttgttatatcgatcatgatatattgcccaacataacataacacccattttcctatcctccttactccaccgttgaaactgattttgaaaccagacaccaaatgaggaaaacacaacattcccaggaagcaaaccaacttcacactagcaagcagacgcaaaattgcacaaaactaggcaatggctaattgtttcagccgattggttacacctggggcaaatagaggagatatgaacatgcctttgaatgagctgagaacgagttggtcaacaattagacaacgctcgccaaagtatttcttttacctttgagggaacc

SEQ ID NO: 98499 - DNA, 860 bp, Cannabis sativa
tatttaatatataatatataatatgtttaattagttaaaaaaataatatttttatgatgtttgacaacgcatttgagattttgagaatattcatcatttatatacaatgactattattagtaatatatttgaagcaatattaggcagatctaggtaataaaatgtgtgtttattgagaaatattcaatggtcaaaattggttatgtttgactttgactcttcaataactaaagtgattattgcttactaattatttaaaacatatataacgcatataagataataaaatcaaacctaaaagaagacattatattataccgtatttttcccatgataaaatccaattaaagccttatttttttatatagttttgtggtgtaacacaatagtaatttatacctaataatgttgtccttattatgatttttcatttccatttattttttcatgtattataaataagtaataaaatggattcatatcattcactttttaactcctcaatagaagtaaaagttacatttaatttacattttagagtaggaagttacaaattaagggaaaacagtttattgttgcatatataccaaaaatgtctaggcccataataagcccatagcaaaagaaactttatgacacttttttcagtgatattttgaaaatactaaaatttaacttacaaaattcagatttctttaaaaaattgaaatcggattaaaaaattacattatttctttaaaaaaaatatatgaatttttatagtggaaaaccacactaaatttgaagattttattattctcacacataagggtgtgcaaaatatatccaattcaatactgccaaaaattgaatattcaatt

SEQ ID NO: 98500 - DNA, 525 bp, Cannabis sativa
tggctccctcggctcaggcaccatcggagaaggctctcgatcttgtcggcagtgacatttcagctggatccgatctaagtagatcgcaatcaatgtcagttcaatctatgacgaagaaggcagcttgaagaacaccgaaggcggagaagatcggcgtggcttcatcggatgttgtggattcttgatctacatcaacgaaggcagctcgaagaactccaatgccaaagaagacggagatggcactgaatactgcaacaacagggcacgacaccgtcgattggtggaggaaattgggcgtgttccagatcagagcacagataagagatgggaattgtggtcgcgcccgatagcagaagttcatcggacgagtgtggtcactgcttggcgaagggacgcgtgggcacgccgaatcgcagaaaataagttggaaaagagtcgacgacgtctctatgtttactggttttctaaaatatgtacatacatatatatcaagctagttactgctaagaagaatggtagtcaaag

SEQ ID NO: 98501 - DNA, 539 bp, Cannabis sativa
ctataatctagggttttgtggagagacttcttcacctaatcatcgtccatcaaacatttttaattattaaaaataaaaatcattaggagcttacgaatttgtctcacattatctctttcgttttagaaatatatattttttttttacaaaaaaataaattggttttcgtaagctttggtttattatttttttttttttggataaattttaataataactctctgtaggtggaagttaggaagaattataaagatacattgttttaggatacatgcacacgcatcataatatatagcccaaggcattagagaatactagcagctactttatagttgttgtaaatgaaatttgtagggtagatacactattttttatgagctcgtctaactgaacaactttagcgtacgtaatgttacataactgtaattattaataataagctataaagcaacatttgcattgacactactctagttagttgagaaatgattcttgctttgcctcctttgatttattctactttaccttgtttttattta

SEQ ID NO: 98502 - DNA, 2849 bp, Cannabis sativa
caaaaccacgtaaaaaaaccctatgcttagatattattttttatagcttttatttttctatgtggaattattaccatgaggctcaaattggttaatgaaaatatgcgttaacacttttttttttgaactaagaagaggatttatattaaaccaccacaaagcaaagacacgctgccaagcaactacaacagttcagaggctattgataatagccattacattgttatctctcaaattaggctttaaagagtgacattaataaattctagccttaagatagtatttcacttggttgttgatcgtttttaccgaacagcaagcaccatcgaacacacacctattgcggttacaccaaattaagtaaacaacaacagcaatgatagctgaagccaccactgccatcacactttccttcctagctgattcctgcaaccaatcactgagactaattggccaagcaattcctccaaaccaggtggaaatctcagccaacacccttcgcgaataaacgcaactaaagaacagatgaagatgagattcagggacaatctcataaaccgggcagatgctagagtccaaggtgatgaatcttgctaactgatctcgagtgagaagcttctcattgatagcttgccaaagaataaatcgatgcttcgaaaccttcaatttgtgccaaactgtcttcttgtgataataagtcactttcttctcagttgaaatgagcgagagataaaactttttagctttgaatttcccagaatacccagctgccattaacacatctttatcagttgtattcctcagtctcatgagttttttaaaatactagctaggatcagctcctgggttgaatgtccataagtctcgattgtttatatatatgcaattaatccatttgacccaaaggcaatcctatttggtagctatggcccatacgtacttagccatgagagcaacattccacttgttatcttccctataaccaatacctccatagtccttgggtaagcagacttgactccaagcggttaagtgcatcttacttctattacctatcttaccccacaaaaaatcctgacataacttgtcaattttaaaagtaatcttttgcggaaggataaagatgcccatccagtaattcctgattcccagtaaaactgattggaccaacagaggctctacatgcaaaggagagatggcaactcatccatccatgaatcttcttacgaatcttctccactatacctccacaatccgagtctttccacttggttggcctcaagttaacttcaaggtactttagcggaaaggaaccttcagtcaactttgaggtatctaacatcagcttcttacatctcatgtcaacaccaccaaagtaaatagaagactttgacatgttagccgctaagccagtagagcaacaaaaatcctcaaaagctttttgaacaatatttagagaagtaggattacctttgcaaaatataacaagatcatcagtgaagcaaagattgacaaggttcaaggacttacatagggggtgaaacccaaaacctttcactgtgaaagcctgtataagcagtctagtaagatactccatcaccagaacaaaaagtaaaggagatatagggtctccttgcctaagccctttttcgctcttgaaggagccatgaactcgaccattgagcatcaacgaatatgacgttcctctgaggcaaaccaagatccagttgattaatctagaagggaagcaaagacccttcagcaaatcagccacaaagtcccagtcaacagtatcataagccttgctgagatctatcttcattagacaccgagctgagatattcttcctggtataacctttgagtaagtcttgaaaaattaaaatattatgagccagcattctgttcttaatgaaagctccctaattatggtgcactaaccccagaaggacttcactcagtcttgagcaaagtaactttgagatacatttgtaaagcgtattgcaaaacgctattggtctatagtccaccgctgaagtaggagagtcagatttagggattagagaaatcagggtcttgttgagctctttaggaataattccatccttgaaaaaagacagaacgactgaggagatatccaagccaatatgtgaccataatcccttgaaaaaagctgctccataaccatccggaccggggctcttcgtggaatgaatactaaatagagcatctttgacatcttttgccgaaaaaggccttattaagttgagctactgctgtaagttcaacttagaaccaaaggacaagcaatccaaatttagattcttagaagcggtactctttttccccaggatgtttcgaaagtgatctaagtaatgggccacaactcttaagtaatcatcaaccactgtaccatcctccatgaaggtagtgattctattttgctcttttctctttttaatactcgcatgaaaaaaaatggcattttcatccccataacggagccaagttatcttactaatttgcaaaacatagctggcatacattttagtagcaacagaatagttgatactggcagccaactccttctcttgcaatctagtgttggaaggatcagtcgctaaaactgctcttcttcgaatggtagtccacagcaacatcccctacactcttggcattaaggttctttaggcagtatttgagtctatttaacttcccaagaattctgaacagaccatttcctgcaataggtcggttccagttattcatcacagtgtcggcaaagttctccacctctagccagtactgcgttaacactttttactctgtatttttataagtttcatactg

SEQ ID NO: 98503 - DNA, 658 bp, Cannabis sativa
tatatttagcgcatgacaaacctttcgttgcaagaataatggcccgcatttagtttaggtcattatatatatacaaaaatatatgatacaatgccttatatatctacttcatcaaggaaaaagaaatgaaaatttacatggtataataacttttgctatttttttacaaatatactgtcaagtggtatttttttacttttttactgtgtctatttataagtttcataccgtagtatactgtattaagttttcactggagttctactggtattttttagctgttctactattgttttgagttgttctgttttgtattttactggtattttataaaaatacagtatttttgaaaatttttacgtgtgacaatatttttgtaaaaattaacccaaatttcagtatttttgtaagtttctcaaaagaaattatatgtctaggcttttatttttcttatataaaataggtacaagttttaaattaattaaatatttttgcatatataacaattataaaaaattatcttcaaaagttcttttcaaaatatttagataatagtagtaataaaatatttatgttacataaaaatattatgtatattattctagttaaactctatttttataaatatatatataaattatataatatatagattgta

SEQ ID NO: 98504 - DNA, 517 bp, Cannabis sativa
ccctatacaataacctttaagccttaaaaaattccttgttcattctttttcacaccataatatatggatgatttatatatttgtaaaggtgtaagaattttgttgaaaaaaaataatggctatgtattatttaagaaaatactaatgatgattatgcataagtgatgatgagaaaaaattttcccaagaatgaatgtttgtaagttgtaagtatttcatatatgaaaaaaaaattgaatgaatagagaatgacataaaaaaaagtttaataagaaagataaatgaatacttggaacaatctaagtgtgggggaattagtaagttaatgctgaaaaaagatataagattgaattattgaggagagtaattggggatacaaatgggaattatttgtaaatgtgtgagagatgtgttgaggggaaaatattgatggttatgtataaatgatgatgaaaaaaaaaattcccctagaatgaatgtttgtaagttgcaggtatttgatatatgtaaaaaaaaa

SEQ ID NO: 98505 - DNA, 580 bp, Cannabis sativa
ttctagtctaaatgattttgattgctattggccactactaatatgctatgtaaattctaacgattgcggactaattttatgctaatttgttagattttttttttctctctaaacttgtaaaaatgttcttcaatattttggcttttttttttcaactgtggtgatatctccaaatgataatttttatttgttcttcaacttttgtttaattcacttcaacaagctttttttcttttttttagagaaaaattcccaaaaaagtaaaagagagaggcttctattgagattaaagaatttttttctctctatagaagctattttcactagaacccaaaagaaacatgaggatgataggtttattttttttaataaccaataagaagtttaattttttggtgttagtatgtttactttttggaaaaaataattgaaaaagaaaatataatttgctgcataaaactgcatattatataatgtggactttaaaaaatcatataaatgtatggttaagaaaatatctctatagtatagagacaaaaccaatgtcactattatagaattattctataatatatatcct

SEQ ID NO: 98506 - DNA, 573 bp, Cannabis sativa
cgccactcaagggtggtgctaccagtggtaacctgtagtgtcacctagctgatgttaggtttatggacaaaatttagacaatcagagtaagaaatgagaagttagtgctactagagccggaaacatgtcaatcacagtgcttgtcgaggtactgttgatggcgtcgtgacacaattattattcttttaaaattttaatagttgaaaagcatcataaaactgatacaaacgagattagtgtcgatttaaaactaatgtaaaagagcttaaaatttgtgtcagagtaataattactgatgctattaacttcaataggttaattacaaacctaagcaaaaattcttaaggaaattacattgtatacccactttatgttacttgttttaatttttacctttattttcatatttttttaaatatacccacttttatggatgatgtacccccgttaaaccccttaagttatgtaaattatatgctagacttaagtagagtgagagtatattagacaacccacttaaaaaagtatgtatattttaataaaaaaaataatataagaatatttttgattaat

SEQ ID NO: 98507 - DNA, 557 bp, Cannabis sativa
gaagacaagtgtcaatttttgattgttgggacatgcaattgggacagaaaagttcaatcctagaacaaaaatctgctgtcccattttatatgtgctaatcctgtctcaaccaataaaacattgacatgtcatttaattttgacacattagttaacgaaagtttgagtgaatacactctaaaattttctattaatatcattatttgtcttttcgtatcttttctatttttattttttaataaaaaaataatttctattttgcataaaaaaagtggtatcatccttcccagatttaaaatattatattataatttttgtttaatttattttattgaaggaaattctatttttctttttttttttaaaggaaaccataatttattaaatgaaaaaaaaccacattatagttcaggatggccggaattttcatttttttttttttgaagttaggatgatacttccattcaaacatcgtgatcgagctgaaacaaatattagataaaatggaaaattcacaccccttcaaatttaaaaaaaaaaaaagtttattcatttata

SEQ ID NO: 98508 - DNA, 757 bp, Cannabis sativa
aaggaagaacaatattggcaacaacgttggagagtggagtgattgcaatctaaggattgtaacaccaaatttttccatgctaacgcttcggcttgaaactttaacagcaaaatcaaggctatccacgatgatatttgatatatataatcacttcaaatgatggaataacaacaatggtctcatcttattttgaaaatctgttcttggcttctgaagaagatcattgggctttgtctcatgtcttatctacaatacctgcaacaattaaagctgagcaaaatgattttttactcaaaaaatttactgccttagatttattatcaacattaaggacgatggaatctgataaaagtctgagtatagatagaatgtcagctatgttttatcatcataattgggaaattgtaggtgagttagtcactaaagttgctttgaatgatttgaacaatggtattagtccaacatcttttaataagactttaatcacattgtccaaaagtaaaaaagccaaagacaatgaaagactttcgtccaattagtgcaatgtcatctacaagcttatctctaagatgttggtcattcgctttaaagaggttcttccaacggtcatttctaaaactcaaagtacttttctcctgaacagattgatcattgataatgttcttgttgcttttgaactgattcatagtttgaaagataggaatataggtaacaaaggttatgttgccctcaaacttgatatgagtaaagcttttga

SEQ ID NO: 98509 - DNA, 670 bp, Cannabis sativa
attaatattacaaataaaatcatgtaaacaaagattggtggtggatatatggtggacacggtccacaaggacttgacaatccgattcaatgttagagacaacaaataaatttttaagacaccactttagagactgctaaagagagagagagcttccattaacaaaggtgaaaagacaacaagccaaggtatggaggctaccgcgatgatatctcctttgcagttgcatattacaaagccaaggcccatcttgcatctgtttgtgtcttaagctacatcaatgttcaatttcaaaaggccagcaggtgggggtacccaattggaagcggatgagcgagctgcataggccaaggaagtgtaggaaggctcattatgcagctgatactaatgcaggtactgctctgccccttatagaaccaagctaggattggtgacatgcttatgatgtaatgtttcgttgctgcagtgccatattttccacaacaaacaaagaaaaaaccagaaatctcttttggaaaagttagtttaaataagatgcaatatatcaacaacaacccgtattttgaaagaaaaacatacaagtgggttagtttccataccttctacacagtagagcaaccaaaaagagcatgtactagggtctattcagtgcaatggcagcagcagcaaac

SEQ ID NO: 98510 - DNA, 1052 bp, Cannabis sativa
attttatccacctaacgtggcatgtccacgtacacgaaagactgaagacacgtggactacaaccttgtcaatagcagggaaaattctccttacaaggcatcgcataaccatcaagcaacaagcaaaaaaagttaagacatctgtcaagaagctgcacaatgttgtctagctcaccaaggggagtacataggccagccaggagaagcttgtatggcaagccagggatggagcataacttggccggccaaagggatattgacaaacaaaaaaagggcttgttcgatcaaggaagcctgacctttgcaaggaatgttgtacagaggttggccaacacttgccgaagctaccaggcacttggtgttgggctttgtgccataaataaaacttattttaaatgtaatcttcaatattcatttatcagtaaaaaaacagatttattttcataacttatttaatgtgttatttggttcatgtgatcatttatttctttatttaatttataaattcatccaaatccttataacattgatattcttatttattatattatttattatattgttaacacaatggaaagtaatcaacattatgtgattaaatgtattactatgatttatcagtacacagggtgttgacctcgcttttagccggcgacaattagtcaattattaagcgattagaaatataataaagacagagcaaaaactaataaacaataaaggacacgatatgttaaataagttcggcccctttagttcgggaatagtctactctccttagattgtattgacttgagaacaaagaataaagtgtttcttctctcaaagctctcacgaagaaatctctgagtgtttctcttagatctctctctaaagcaaatctgtcgattcctttacggtgaagctacatcactatttaaaggggcttaatgtgtgagggaatgtttcccttttgcttacaatatctataattggaaagaacatttattaattagaatacatgaaatgggtgattgagatagcttaccatatccttctaattcaatcccatta

SEQ ID NO: 98511 - DNA, 622 bp, Cannabis sativa
actggatatattaatgatatttagcattttataaatgtgtcactttataattggttagagatacactttgaaagtcattatattaaattatatacaatatttaattgcactaataataatattgatgtataggatagagtaatacattactggtaccttttaacatttctctaaattaagcattattatatgacactaaagtacatatcactactatgacatgatgtcgtataattggctaagagttataatctatattaaattaagataaataaaatctaatattaaattgagtgatattatatttattaattcttaaccctctagtatttatttaaatagtaaacactatccaattattataataataaatatcatatcttactagggtgttaagaaccatgatgccctttagcatattttatataaatatagtattctaattaaggagttgagcttattaatttactgaacaatatttagtgtataggagttattagacgattgattatataatttgtttttataattttaattttggttgtgtgtttaaccgagagatattctaattagattataatctgttattttaattaattattattagtaatattctataatt

SEQ ID NO: 98512 - DNA, 553 bp, Cannabis sativa
gtcattttgtaagaactcttaaattatattatttttttgttcggaatcaagaagagaaatataaaaagaaaaatgacaaaaaattaactttttttttttaataaaatttagtaattttattaactaacaatagttaataacaaaaaactaactttattaataactattttaactcaaattttgaaaaatttacatatattatttatcctttaaatgatatttacttaatacttttttgaaacatacttactaatactttttattcatattatattaatttgtatttttatatatgttataaaaataatatctaaatgaatgtagaaaaaaaaataaagacattgatgtatttatcatgtaataatataatagtttgaaaagtaaaaaaaaaataaaattttagtaaaatattttaaaaaataaaatttaaaaactattagagttctcaaatgaattttaaaacctaaattaattaactacaatatgcatatctcataatgatgtcatatatatatatatataggatatgtcaacaaaaaacacacatttgact

SEQ ID NO: 98513 - DNA, 741 bp, Cannabis sativa
ttttctgaaaattgtttttaaaaagcaaagccaaacaagccaaattgtttttaaaaacaattttttatttttaaaaacaaaacacagttttttagttatgatgccaaacatgcacttagtaattgatattttttatttttcatcacttagttttttatcataaaaaaactataaattagttaactcatcaatacaaataatcgtatttgtatttattaaaagatatacctattttataatttatctataaacattactattaataataaaaatttagtagaatattctaatttttttttgtataattataataatatgtttttaattacgaataattatatatctcctaatattcacatgataattcaatataaataattatattgatagatagaaataatatgcgtacattatatttaaatataaacattactaaactgaactgtgtggactgggttgatgctaggaacgagtttgttgtggctgctgaaagctgtgttgtgggtggtgttgataaatggacggcaccagactttccattcgttaaagtcaacgtggatggaggggaggtatggagtgggtttggggcgggggcgatttgtaacctcatatagtcgtatcaaagaagctttgtcatggagtaaaacgaatggatggacaagtgttatagttgagtctgattgtttaaaagtcattagtgatttacaaaagccaaaatatatggtctctccttatggccat

SEQ ID NO: 98514 - DNA, 688 bp, Cannabis sativa
taattattaaatagatagaattggcatttatagagttagaattaaaagatgacatttgtgaaaagaaagataagtttcaataaattagcaaaattgaaaatccaataggcccacatagggttcggccaaggtgaatttaataaaactatttttttattcaattttaattcaaaacttaaccctaaaagctgagaatatgttggctcttattttctgaccctaaccctagtttagactctctttgtcaaacaaaatagaaaataaataagagcactcttcatattcgaatttctctctttttttccttgaatttttcgaagcctatagagattgagtaattgtccacacaattcaaggcaatactcaagatagtatggaagattgtgtagtttttattaactgaaagagaatccaagttcagaccttgatcatattctgcaacagaaaggatcaagagttagatatctgaacggaaaaagttatatcattctgtttaaggttttttacaacttttatgtatttattttgttattttagagaattaatatttaagatgttaaattataagatattagattatagtattattataaataaaaaaaaatcaaaacctaaaaataaaattttcccttgttatttttgtaatttatttttaaatttttagtcatatatatatatacagtagaac

SEQ ID NO: 98515 - DNA, 631 bp, Cannabis sativa
atctgattattcgtaaaatatatataggtgaacacctcttccttgcccaaagttgtcagaaatattcgttataagatatttgtcaagaactatttctcgattaagaaattagtattcaacacaaaacctccaacttcaatccttattcttggaaagaaatacgaacggtagtaggactagcactcaagcatgttatgcctactactaacatctcaactacaaattctcgactctttttcaaaaaagaaaaactacaaattctcttgactcttgctcttggggttgcaatagacataacatctcgtggtggagctccctcttcaagtgcagcggcatgtgaaaagtgacttgaaccattataaatcgttgtagctgcctacagtatccactaatgtagttgatttatttaatgtgaggttgcttaatttctagagcacgttgtgttcctcatgcttaaaggttgtcttgagacctgcacaactaagaataccttacagggttgtcaccacctcaccatgagtgattttatacatcttccaacatacattaagaattccaaccactacattctaaatatggcatctaagctaaaaaggtgccaggatagaaatttgattaaggcaataacttc

SEQ ID NO: 98516 - DNA, 732 bp, Cannabis sativa
tttggtcgttatatgcaaaatcttataattttgttccatcaactagtccttttcaattatcgatccatcattaattaaggcatttttcttctaatttgaatgcatctcttggtagttggtataaatagttgagaaacgttaaaaagcactaatagtgcctagtacatatgtgaagtgtaatattattattattgtaatttaataccatgtctcatttattttattttattttatttttgtttttgagagagtgatctaaatcacactatgataatcgtcgacgcagaggaatttctagtcaacaagctaatttctagccaaagatatatagagtcagaatatgagtcactacaaacaaagcgacttatataagaccaagttatctcaaaaatttaagcaaaacaacttatatacagagtcagaatatgtctcacttattttaatttaataaaaaattttaaataatcacttataaattatgggaagtcatctctagtagtactaggcaccttagtgccttataacaatggtctaaataatttaaatccttaataattatcaatggatatgtgtgttttcttgtcttctcgtaaatgagtatttcttaatgaacctagttattttaagtcatgtttagcatagatatttgatatatttactttattttttttaaaaaaaaaattgattaactcgtcattttgaaaatggatatatatattcaatagttacatt

SEQ ID NO: 98517 - DNA, 503 bp, Cannabis sativa
gccctgggagacttgagggagaaactcaaccaaaaaacaactgtagagaagaaggtgccatcatcggcaacgcaccaccatagagaaggtccgagacgcacactgcaagaccttcgagaaaagttgaacaagaagagacaacaactttacagggagatggaagacctctaatgaaggatagccacagctacattagaggagggcagctgggatgaagatgagtttgatgatgagtcgccctttccaagagaaatccagtctgaacagctatccccaatttcaaagaacctaacatatcaccatacgatggaatcaccgatccaaagtatcacttagatgctttcaacaatattatgaaaatgaaaagggtcacgagtaaagcgaggtaccagtgcttcgtgacgacgctcaggatgtggcttacaaacgattcaagagattggcccctgggtcaataactttatggagacagttcactgatgagttcttgtcccaacatcgtg

SEQ ID NO: 98518 - DNA, 630 bp, Cannabis sativa
gaatatggtatataagaaataaataggtcaatgagaaagttgattaatttgaatgacactctcttgtttgattggagtaaggattatctggatcagttccattctgctaaaaaatgaaagaattccattgatatagagagtgtttagaaaccccatgatgtaaagtggtgcaaatcgtcatcaagtatggttaaaattaattgtgatgctggccttagcatttggactttgagcactagggttagtgctattattcgtgatgatacaggattggtcattgcttttggaacttggacttgacttggctattgttaaagctttgagcatttgttttggtatgcagttacaattactcttgtttattgtactaatttttgtgctatctctttcatgtattgtcttaagattatcaacagcattgctcattcgttggcaaaattagctcttttcttgatcgatcattatgtttggtggtttgattattctgattgtatttctactgccttgcaaccagactattattgattaatgaagttcttctatcactctttttcctcttgagatttttcatattggatttacactttaagttttactgaggcaatttttttaaaaaacaaaaacaaaatt

SEQ ID NO: 98519 - DNA, 510 bp, Cannabis sativa
cctttggatagacttgctatcacaggatacttggatgcagattggacatgttgtcctaatgatagaaatagtattgctggatattgtgtttaccttggaaatacacttgtatcctggtcatccaaaaacaagcagttttatctcgatccagtacaaaatcggagtacagggcccttgcacaagtagctgctgaaattgcatggatacaagctttactaaagagtttgatgtcccttttccatgtactcccatcacatggtgtgacaatatgggagctagtggattggcaactaatcttgtttatcatgctcgcacaaagtacattgaattagatgttcattttgtaagagacaaagtgattaacaagacacttgaagttagatatgttccctcaagtgatcaaacaactgactgcttaacaaaaagcttaacacaacaaagatttcatttcttggtggacaaacttggtgtggttgatggttgaaacaccctcaagtttgagatgggctg

SEQ ID NO: 98520 - DNA, 945 bp, Cannabis sativa
aaacgagtaccaaagctctccatttttctcttggttttttttgcttgtatgtattaggtttggaaattatgagacaattctctagctgtggtatttgtggttttcgtatgagattgaattgaatgaactacttatatttatatgaaactattaagagggtttaagctatagctaggtaattgagtgaaatttcaaatgtcacaaaacaacatctagaatggttgatgtgtatattttggcttacctttttggtcacggttagtgggaaccacaatttttgtaaattaattttcgtagggagaaaggtgagcctaattaatattccaattggttataaatagagcattgctattgcctaatacctctagacatgtcgcattgtgattggttagcgatcgatacgctctaaaaattattatattaaattatatggacccgatacttggttggaccaatagcgatagtaacacataagaggataatagtcaccactagttaccttttggcatttctcttataaataacagaaaaaacatgtagtgtgaaattgagacacgtggaaagaaactattggttcataagaaaaattctacacttagttatttattgatttatatcaatcaaagacagctcatatcattccttttcttccacaccctctaatcaaggaaaacaatttttttaatgttacctaacaaggaatgtttttaattttttttttcttttttcaccatatattcaagttaaaaggacacatgagccatgaccactcaactcaaatttcaatagaagatgactttgggtaaaagatatatgaagaattttatgtaagcatatgtcttttcatttttgaccagtgaccaataaataataacaatatactcatatttatatggtgggatgggatgaaatattattatatgaagaaagtaaatgaggtgggtt

SEQ ID NO: 98521 - DNA, 771 bp, Cannabis sativa
aattaataattagtaaattaattacattatcaaaggttggaatcaagttgccaatatttcgagccatgaatgcttctcctggttgaaaatttaagatatgcgaaggacaaactcgggaatccgaacatgcaaatactagaaactattcattaaatcaataattaatattaattaaatatagctagataacaaatattaatatatgtgtattattagtggggtactttcttctttcttttttcgtcacaaaaaatgcatgggtacgtatgcgtaccttgggatgttggctttctttaagctcattaaataagcatggatacttgctacaaaatcattccataaaataagttaagtaattaggtacaagtctttctttattttctctcaaaaaataagtctttctttattaaaatggaaataaatctaggtaccattaatgatgtgatataataactaaaagaaaaggtactaaaatatataattaatatgagaaatgctaaaatgcatcagtggtgtctaacgaatttttatgtattaatattgctattggtcaattaagtattagagtttaatataataacttttaaagagtatcgctaactaattgtaagaccacatgtcaagaagtgttaggtactactagtattttgcatacatatattcttaaaatagtacttttcgttggacttctgagatttggaacaggggcttagtattctgaattaaatacagattcatacttttgtttgcaaatcatgggtagatgaaaga

SEQ ID NO: 98522 - DNA, 810 bp, Cannabis sativa
aggagatcacccattggaataaaatactaagaaaattcttatctcttctctattttctttctctaaattataatattacataatactaatatttcataaaaaattataatattaagttttgacaaatcacttgtaatatatataattaattaacttgattacatacgtcttttttcaaaaataagtaattaaataatctaatctctagtggttaaataattagaaatttgattatatattttaatatataacaagtaaatttttagctaaagtgaatttattaagaaaaagaaaaaagaaatgatggataggtaaagaaacgaatgaagaaggtaatatcttacatatataatatataataattaaaaagatgcccccacatagttaatgcaacatctgaaaagatgcttcaagtggtccaaaaccccttgttcagtttcagacaacaatgatatcataacccatcaagcttttaatttaaggagttcaaagagctatccttataatgacagttaagatcagtctttacaaagcaaaaaaagccaactccatcatgctcatagacttatccccatctatatgtgtacatcacattatattaaatatatcaaatttgcatggtagtgttttttcacaatgtgtgtctcatggtgctatatatgtgtgtatatatatacatatatgagaaagagagagctagagagagagagagagagtgagaagttgcttttatcctcactaataaatgcatggtgggctctcatgttttaggttaccacttgcttctgggttttctggcatccacaataa

SEQ ID NO: 98523 - DNA, 1013 bp, Cannabis sativa
cagggggagagatgcggacgtctccctcatgttccacattcgtgaggactacgctcgcggagctctgtgagggctggtccatagagttaaagtctttaccctccgggatcacggagtgagacccgtaggtagcttaatgacttctcgttttttcgtaatcattcctcgcgggttaggcaggtgaaaatacaaataacaccaactaattatttatatatatttttgattatttgaatttagtttgattacttttggtttaattaagtattttttttgaatggttatatttatttacatttataaatttactttcataatggtcattaatttttttaggtaaagatcaatttttgattagtttttttaaataattatttttaattattattacatcaagtacatcgacttggatataaagataacacaataagggatgactcattttatgagtgagagaagaatcacaacaatgtagaagtaaggtctaaaggaatcagaaagactatttaacttttttttttttcaattatatatacttttggctcttcacttattgattaatgtgtaaaaatatatatttattttgtaaaaaatgttagaatatcttaagtcataattagtatttttattattttagttagatatatttttaagattgaaaatatttaattgtgacttgatttattttattgtgtagataaatgtgagaaaaattacaatcaattgaagtaagcttgatttaaagaagaattggaagtcgccgttacttttctcaagtttactacccaaagttctatataccattttggattagtcaatatttccatttggccaagtttaattttctcactttgcaagcccaataattaattgtccatgtaattcgactcaattactgtccaagaatgaaagccagcgtaaaagcttttccagtgtacaacaaaggtggaacacggtccccttcaatagccaaactacccatcatgtcccacgtacctgacgctggcaacaga

SEQ ID NO: 98524 - DNA, 667 bp, Cannabis sativa
agccagagaagaagtgagagcaagagcagtagcaaaatcctgaataactaacatggaaactccatgttgacggaagcaacactgaccaattgttcggtgcaggcattgcccttattaacacctgggggcagcacctgaacggaacaattaaattcaggttcaaagcctcaaacaatgaggccaactacgaagccttaatagcctgcctcaagttggcacatgaagtacggactgaccacctggacatattcagcgattccaactagttgtgaatcaagtcctaggcgaatacacagctcgaggtaaaaaaatggtggcctacttgagcaaaatcaaagacttactaagtcagctcaaaggttacataatctggtagatccctaagagcataacggtacagtaaatgcacttgcccgcctgacaagtaacaccattgctgacaaggcaaatttgatgccaatacagttcctagaggaacccagcattaccatcccagaagaagtcgacatgttggatggcacctattccagcttgcctccaaactggagccttactagaaggcaagattaaagcaaaaaagataagaagaaaagttgctaggtacctaatcctagacggagtaatgtacagacggagcttctccatgccactcttaagatgtgtcacc

SEQ ID NO: 98525 - DNA, 721 bp, Cannabis sativa
aaaattagataattagttttttttatataaatcttaatttaaatttgaattaaatgtgaatttaattaattaattaaattttaagtataagaaatttataagttacattgtttaaaatatctaaattgtttacttattttattatttaataaaatgagttagatattttttatatataaatttaaaattagattaaattttatatatttaaaaatataattaattgtattagatttaatttttaatattactatttaaattaatgattaggtaatagtaacttctttttttttgaaagcaagggaatagcaactctaagcaaacaagtattattgcatgcatgttaccaactagtactataattttttttacttttagttacaataaatctagtgattaaaagtgaaaaagttatgactaattataaaatttttatttatatgttttgattaaaaaattcgtagttaaggtattaataaaaaaaattctaattttttgttactaaatgtgtttttagtcacaatacttgttgtgactaaaaataaaatagtggtaacttatcaaaatactatgttttaattaatcgtaagtaattttttattatgactaaaaattacatttaactacaaaaaattaatgttgtgataactaaaaaaattatcaataaaagtacatgaagagtattactatatatgtatagttaggggtgggcatccgatcc

SEQ ID NO: 98526 - DNA, 1091 bp, Cannabis sativa
atgatagattttaaaaaagaaggtaaaaataaaagaagacaatataaaaagggtatagagtgtaattttctcaaatatataaattgtcaaataggtttttattaaatggactagctcgtctttctaaatggctcaactagttttttataggggtatattgagaaatacctcttttatttatcaattaaccaaaactacttctaattttatatttaattgaaacatacctctttttatatgtatggtacccaaaataccctgatataagggagtcacatggagagcatattgatgtgacaggggtaaaatcggtaaagtgtttagaaaaagagataaaaatgataggttttaaaaaagagagtacaaatgaaagagaacaatataaaaagagtatagagtctaattttttcttttttatatgggccataatgggtaatgccaaaaaaaaaagtaattttttttcctattttcaaactttttttttattatttttgaaacataaataataatattattataatgtaatattttttgaataattttgaaagagtatatataaataacaaattaaaaaaaaattatggatttaatttcatatttttatttcgtagttaggtgtcttattttcttgttaatatgtatgtgctttcgtgttgtgtttccagactttccatgtcttgtagtacttcaagcttatatattttatattgtgtccaagttcatatttttctcatgcaaagttgggccaaaacccataaattttagtatcgtgttgtactcgtgccagtttcacaatatattaaaaagcccgatctaaatatacaactctactcgtcattaaagcagcgccaccaccatcgcacaccaccaaccctattcccacattgtcgtcaacactattgaaggcaacatcaacattagctttagcgattccaacagccagtttaatctagaggagaggagcagggccgtctcaaggtgttgagaaccctagggcgaattttgaaatgaggcttttttttttacaaaaatttaaaataaatattatttaaattttgacacaatatcgattttaactattttatctccat

SEQ ID NO: 98527 - DNA, 2007 bp, Cannabis sativa
  modified_base (384)..(384): a, c, t, g, unknown or other
aaaacagataagaaagatctaaatttttataaaaaataatctcgtaagagatgaggagaataaaagcattggtattagacaccttagagcaattccaatgataatattttaaaaaatatttgatgacatgaatatatttttagtatttttttaataaatgcttactattagagtaaaaaagaatactagtaataatgcctaaatatgacatcattaattatctttctttccttttttttattattattttatcataaaataaaaaatcaatcatttaatatatattgaataacagtattattttaataattttaaatatgcttatcattagaacattttataacaaaaaagtgtcaaaaataatttaaaataaaaataaaatanaatattatatttttaggtgatgtgaaaatttttaacaatcttaaagagtgtcactattagagatgttgtaacgacgcgttgtgagtggttagcagttttttatattatttgttaaatgaaaaaatattagacctaatatatattgaattgcactaataattttttgtcaccttttatagtaattagcacattaaggtgtctcctaatatattccttagagaataaaattatctactataaaaatatgaaactctactaataaaataaattaaaacccctaaaaagttccaaataaataaataaaatgtatttataccccaaattcaaacttagtaatagtaagtaggtaaaggaaaattaaagtatttgtcaaaaaaaatattaaattaatgtaatggacgttcaaatgaattacatatattacatgaccaattaaaactaagatttatacttttacaattcaaacactaagtttattttatccaacaaaaaatatatattaataaaaaaatatgttttaattattatttttttacagtctagtcttaaatttgtttttgaaattttaaaataacaagttgtaaatttattgatgatatccttaccaaaaaaagtattgatgatatgttattacaataaaataaagtatttaagtgctgaatcgtaatttggtattttgttggcgaaagaaattactgtggttcataaagactttttcttatttattcaagttatataaagattttattttccagcaatcgatatagcatcgatactatgctttagcatgtttttaatttgtttacttgtcaaaattttgaaaaaaaaaatagtttcaaattgattttagaaaatgtgttttgactaaggattagggacacatgacatgaggcaatggaacatcagtattcagtagaaaactcccttaaagtgggaataaagtgaagaatatatgggtaaatattattttaaattttgtgttttgtaaaaattatagattggactcttattttgttaaatgataaaaaaaactctgtattttttaaaattgtacaaataggactgtgagttcaattttcgacaattttcttttaatacaatcagcatgaagacaattcttaacacaaataaatgtataaaatttaataagttttgtcataacatatttaggtcgaattattattaagttttattttgataaaaaaattagttcacggtcatatttatactatttttaaaaataaaatatttattttattatttaataaaagagagaatctaatttataatttttataaaatataaagttcaaaatagaaagataaaatgaattcatattttttcattaattggtttttctaagaacattcattaatcagtcacatcaagcaataatatatataataccatttaaacagttatttatttatcaacattttgcataatttatagaaaagacaaagctgttatatgaagaagaaaaaaatttgtattataaaggtgtttgataaacaattaaaaatcaatttattaaagagcttataaaaagggattagttcacaaatacataaaaataataaaaaaaaattataaaaatatagttttatggaattttaaatattt

SEQ ID NO: 98528 - DNA, 2609 bp, Cannabis sativa
aaaggaaagtctacctattagtaatctgctattacaggtcaaagaaaaatgtaatatggttacaataaaaaagtaatcattgaatagtcacccatatatatatatatatataactaagcaaacaaatagtgataataaggctgcttcaaataattattacatggtttagaaaacattggggatcgaagtctttctttcaattgataatctctctagctagctcgctataatgtgtagtgcgtgaaataattatagtaggtcattttcaaaaaaaaaaaaaaaaagggagaaataattatagtaggttagtgatgaaacgcaagtacatacatcgttaaaaataatagctagacattaataattcaacaaataaataaaaaattaacagttcaataatgttgacaatttacaaatcatttttccctttcgttttcatttttattagatccatgacctaaaacacagtagctactacatttatcttttggtcccaatatatattattgtaggctattacatatagcattattaataagagtttggccagctaggtagctagaacttaataagggaccatgtgaagtggctcccctctggattaattcttgaagttggataaattaccatcactacccctcatcgttatcatgatatataatacattataccaatggttattgtggtgatgatgatgatcatgatggagaagaagaattagatgaagaagaagaagaagcagccaaaatggggttcattttccaaatcaatgagcatggttttggtactcaattacatggagaagaaaatagacaaaaaggaggacctaataacatggactattcctctcttcatttcatatatatcccataaattgtacaatataaaatatacattatatccccttcatagttcattcccctagtaatatagtaatatagtagtggcccataacataatttctgctgcacgtgtctttcacgtgaaccccatgtaaatgtctgtgatctagatttgaccttggattaattgggatatgaatcgtgatcatatgcgattgagagaattattaattaataatatagataaactgtaaagtaaaaatttatttttcacaccttgaaattttattttacttgtgcgaaatacattacggagtgtgataaattaaaaaaaactttaaaaataaacatatgcaaaatcttaaaatcaaaatctttaaaaacaaaaccaaatcaaacaaaattctcaatcatccaataaaaaaaaatctgtaatttttaaaattttaacatccaaaattttaaaatcacacaaataataatgataaaatattagataaaataatataaatattttaatttttcaactacaactacaatgaaatccttcttaaaaataattaatatttttagagaaaaaaataattaattaatctttaaaaaattaatagcataacaaggattaatagtcgccactatctaaattaatctctaaggtcatcgctcaaattcgttcacaatgttactgctgcccaaatctactagcaaggtcgttgcaatagcccactgagatctctcccttctcaattgtgatgtcgttgccaccaagcttgtacccggatttttatatccggataatttttgcatctcagatatgaaaaaattgaaaaagagaataaagaaagaagcttactaaaattaaataaaaagacttattattataaatttagaacaaaaagaacaaataaaagaaaaaagcaacagagttttcttgactctaattacgtgtccctataatatatttattctgacacaccccaccgataagtcctttttaggaggttctgtagtaaaaaattccattaattaataagccatttattacaaagtcaaactcaagggctgtctgttattatgttatttggaaactcaacacagtaaaatcttctgatcttggatataaaatatttttctttttggtgatatttttcaaactagtgcataagtattaatgattaagtttaatattatttgagaaagtaaatctgaatttggatgtttgaactcaggcgaatgaatttattactcttgtgtaattggccaagagtagaggatgtgttcaaacacagaccttacgccaaagttttgttgaatgttgaatactaagaacatggccctatgctttcatatgtacaatataattttattttttcttggaacaaatatacaatattttcttttttcaaatgaaacagtagttaccaacttttttgaccatatttatacatacaatacaacttctatgtattgccctgaaaaaaagaaaactagactagacaatgatagttaaaatttagttagaattttacaaaattgtaggaactttgcttcattaagattaattatgtaataaataaaaaatatttatttttttttctatatcaaataaagtgacatcacaccagtcatatatatacaccgaagtgttctactaagggtatggagaaattcaaatttattgttaaatcaacattaaaaaattactatttcaacattaattttttttttaattccaaccacaacactaaaaattacaccaaatattatatt

SEQ ID NO: 98529 - DNA, 1817 bp, Cannabis sativa
ttgaagatgattttatttcagaagtgagcaactaatttgcaatgacacacctctaattgactactacaatcacctttttaacttctttgagtgttttgtaaacacactaaaactcaaacgaccataaacttacactgttcgatcacaatggtcgcatataataaattcaatatggttatttgtaaattttacactttgatgttgttagtttgggaaattctccaatctaaaattatgtgaaatactaaaatttgcaaaataacctaacttaactatggtcgttttgcgattataatggtcgcaacatgtaattcatggtcatttaatgattgtaaaaactatacaaacaatagtaaattcagaattaacaaaaaactaattgagaacagcacctgaacatggagactagatttggtatcaatggagaattgactattagagtcattcaaacaaagaacaggtgttccttcagagtcaacggcaaaccgaaccccaatacccaaaggccaaccctcttgagtaatcgccgaaagggtcccaacagaacccaattccataattgttctcgaaacctcagctggaaatggcttatgggttttcaattccaaatgggtcggttcagaaacagtcgaaatcgagcatttgagagttttgaatcgaattttacgaaaagggtttgtttttgagacattgaatttggatttggagacgggaatagagcaatggagtgagagagagaagtgggttgttgttgttgtgagagattgggtttggagaagcattttaaaaatacagtctttgaaattttggattgttcagatgaaattttttgttctcgaatattttgattgaataggttcttggggttgatgattgatgacaaaaagagaggaagagtgttgttgaaatgaagactgtgttagtttgtacgaggaaaagggttaaaggttgagtcttggtgaagatgatgatgatgataatgataacaatagcagaccgaactgaacagaaacaattgattgaaaacgacatgggactttcaaaaacgacataaaattagaaaaacaacaataattggagaagacgacataaattgataaaagcgacatgatacattcctgaacgacatatttctcaaaaaactaggaaaacgacatcaaatgcataaaacaacgataaacgtgaaaaacgacaataatgaagagctcatcaaagaattaagaaaacgacacatttctgaaaaaataaaactaagaaacgacatcaattgcataaaacgacgatgaacatgaaaacgacaataataaagagctcaataataaattcagaaaacgacatatttctgaagaaacaaaactaagaaaacgacatttgcataaaacgacgatgaacatgaaaaacgataataaattttgatataacgacaataatgaagagctcatcaatggaataagaaaacgacatcgattgattgaaacgacaatatacatgaaaaacgacaataaatctcgtaaaacgacaataataaagaggtcatcaatgaataaagaaaacgacatatatctcaaaaaagaaaactaagaaaacgacattaaaactcgtaaaacgacaataataaagagctcatcaatgaattacgaaaacgacatctttctcaaaaaagaaaactaaaaacgacatcgattggataaaacgacataaaacttgtaacaacgacaatattaaagagctcatcaatgaattaaagaaagagtaatttgcggcaaaaccccctcaactatcaatttacttacaaaaaaccatccaacctcatattt

SEQ ID NO: 98530 - DNA, 856 bp, Cannabis sativa
gaaaggctggattctaatttcaaattaaaacattatatatttagtactagttgttgtctcttgttgttggccttattatcaatgtaaattttcttctaattttgctcttattctcacaatattctttaaggtacgttatctctacgactactaaaaaagtaggaaaaagtagatttaatcatgggtttgtgatttcatttttttagctcgcgtgatatcaatatgaacaacctccattattgtaaccccatactggtatactcgtatacgcttctaattagcaaaaaaactttacattttctctacccaatgttaagattcatggacttcatcatatgaagagtgaagttccatctaaacataaattgtatacctgataccatttcttttttcaagtattttttgagataattaacaatcttaagctgctcaaaagttcataacatttgctagtaattaatttttaaattttaagttttgagggcaaaatccttaaaatcggtattctgttagcagttagtcatttttatttgtcaactaacagggtgacacaatttatacctagcataattttattagtagtaagtaaaaataaatttaatataaaaaatgaattattttaaaactaataaaaataaaatataaaaaatattattttaaatcacttttactttcttgagcttcttttttttctctctctagatctattctctagagccaactaaggtggtgtatgctttaatgtaatgtaaagtaacatgattgataattgtaatatgaatgtaatgtaatagaataagaattataacaggaatgatattataatgtttgatttaactctgtagtgaacattgta

SEQ ID NO: 98531 - DNA, 539 bp, Cannabis sativa
ttgtaccaacacttttggttaataaatatctcattaatttaatttcaatcattattttggtgcaattttgaaatcttttgagttttatacacatcttattaaaggtgtcaaacacataatattgaactataagctgatttgtgcaatttttaaatgaataggcattttaaggtgtctaatatcacaccgatatgaaactttataattagttagcagtttcacatataattgtttaaattaaaataagtaaaattcgatattaaaatatactaatagcagtatatcatatgtttgatacattaaaatacttcttatcatccctctttttaaatgggtcctatttataaaaagtacatcatatataccacacctataatagaccacataatgtaatattatcaatgttcttattaagtatacatactttgattatctcatctcacatataaaaatcatggtcataaatgtgcccacattgattaagattaaaaagagttttctcaataaactccgcttcttgctaaggtttaattcataat

SEQ ID NO: 98532 - DNA, 2087 bp, Cannabis sativa
aggctttgtttgaaattcgtggtgctatatttgagtctttctcttctactctaataattacttccagaatcaaacctattttctgggaactaaacatcttatgaatcatggtttcaattgattttgttttttctttttggttatcctctgtacttaaaattcatctttaaaatattaagtttttatacaatttcatcataatcatctttcataggaaagatcaccttgtaaacaaatggataggtccggactggttaatataactggtctccttctctcttttatgtttgagttgctttggatcagtgagtttcaacagaatgtctgttgtgctgtattgttgctttagcctgtatcaacccttaattcgttcccaatttttattgttcatattttgtttccaagttcaatgcaactaaaaggaaggcagactaccatagatcttgatgtataattctcacatttattcacttaaaatcaatacaaaacaaactatggaattaatagagaggagtcacttttccatcttgttgatctgtatgagggaaagagatagagatatatgtatatatgtatgtatataataaaataatatagctatgtacatttagacctttattggtgttgaacaattcctattgtggaattggtacaagacaatgaaaagtgtacaaaaatagctctagtagtgctccttgtgaaatacgaatctggtagtggtcttggtagagaatttggtacataatccctctaactcttttgctaaagcagatggaccacagtaaaatacccctgcaaagttgggatgaagcactagataatcaacaactagactcttatataacaattaactgaggtgtttttgagtgttgaaatctttaccaatcctggctcctctatgtctccaagctagttttgaaaagatgttgaaccaatttggtctagaaaaatgtgtgcgtacctgaaaatagcttaattttagtgttaaagatgttctaattttaaacacactggtttagtccaagactttagttatgtagtatttgtgcttactggagtcctggagactatatctatgccatgtttggcatgatgaagggcctgaatagcacttattaaggttgatcgtacatctccttcctgatatatgctagtcaggaaattatgtacctctacaacggactgtagagtcaccaaaagggttcatctcatcaaaattttggcaaaccttaatgaaagtagaatatttattgttggtgtgtcatttacctgattctggtcagagtttgatatctccttcaatacatctctaaaccaatcaaatgagctttgttctcttgtaacccaataaagataggctttaactggtctaccctttcttaagttccaaccattctattcaagaacacggttaactttaattatacataagaaaatcaatagtaaaaattacacaagtatgaaaagatttaaagcttttattttttatgacattttttaatgcatttatgttatgagtttttacaagtatttacatttttatggtttaaaaatatgccatatttttgtaatatatttttatatgggtaaatattattttagaccatgtattttacaaaagttattaattggaccctctgtttcgttaaatgacaaaatagaccctgtattttctaaaattatacaaataggaccctaaattgattttttgtcaaaataaaacttaataataaagatgttatgacaaatgattactttttttttttttttgtacatgttcgtgttagaaataatcttaaagttagttatattaaaaaataaaattcttaaaaattgagcttagggttttatttttaccattttagaaaatataggatccattttgtcatttaacaaaacagagggtctaatttataacttttgtaaaacaaacacaagatccaaaatagtatttaccctttttatattcccatattttttttttgtagatttgtcattttatttttctcaaaaaaatgtagatttaagtaaaataacattttttttagtttaatttctaaatatttttttaaataatttatattttt

SEQ ID NO: 98533 - DNA, 1008 bp, Cannabis sativa
aaaaaaaaaaaaagaatataaaatataatatatagtcaatccaaatatagatcctatatatatttaaataaattatcacaatattatccagcatattttaatctaattctaatatatgaaataattatatgaataatcctacacaccaaacacatcattagggaacaaatcacatggttcagtacttttttaagtaaccgaaaagtatatataattttatatatttttattccaaaaagaccagaaataaaaagttctctctttagttcatgtacatgcatgtggttaattttccaataataagattaatattaataatgattataagttaattatttcaataatataaaaaaattaaaacaccaaaaaatattaatggaacaagaatcaataaacaatctttaatactatattataataaaattattttatttaagtaaatataatttttatgcatgtattacaatttgaaataaaattgttaattttacacaaataaattccctttataaactatactataattttttttacttttaatcacatgtatgtatatatattttatcaagatatacttattcttatataaataaaggtataccttcttaataaagtatataaaaaatgtgtaactatttataatttagatgttatttttatgacttatattaattttttttttttataataaattagtaattattcttaaatagtgacatataaaattatctaaaaacttatgataaaatccaaaaattacttaccaagttaaatgaatatgtacatgtaaatatatacatatcatgtaatttgtaaataaataataataatagcgaataattatttctactaatgattgaaaatctatacggccagtttatattcccttggagtatactacaatatttatatataaacatatataaacatatattgctgtgaacttttaattgttgaaagaaatgagcacaaaaaattaattaaagagattatatatgtttagtaaac

SEQ ID NO: 98534 - DNA, 501 bp, Cannabis sativa
tggtaaaatatatccaacacatggttcaccagagagcaccctttgttgatcacctgcacatgacatggttagaagaaaaatgtcagaatgcatctctgaaacaattacttcaaaacgacacttgttactccaaaattctcccattttttttttattaaggtcttaggattaacagaatttgaaaacatctggccacaaaaaaaaaaaaattaaggagtggttaagatcatggagatcagattcggagagagtatgcactgttctctctttcttcgacaagctaagtgttgaattcatgtcgttaataatggattccatacgagaccaagaaaacgaaaaggaaaaaagaaaacgcaggaataaatcgtaaagactacgatgatatatatgggtttaggacacaacagggagatcatggaattggtaagaacaaggtacaaggtaggatgagagtggtaaagtgggcggttaacgattgtcatggatggaatggagaagaag

SEQ ID NO: 98535 - DNA, 1141 bp, Cannabis sativa
atattattttagtatttttgtcaaacgatataagaattagggaacagattatttgatccgtaactttaaattctaattatagttgtatctttaataaaaaaatatctttattagcttctagattattattttaattctaattatctaactactataatactttaatttttaaaaaaatatggttttggaattatcattgtcccttgactctcaaatattaaaaacaaatagaaaagaaaaaagaaaaaaaaaacttgtaaaagatggggtccccttctacttctagtctagctatatgccacaccacacccgaaagtgtagtggactcgaacctgttgaattatatgagcaatatttaaaagggtaattgagattatatattctttatttcctaattgtgtccaagtagtgtataatgaaaagcagaaggctgtggaggtgaatggtgtgtagtgccaaccacagagcataactattaattaagattggacaagtgggaattggtaggaatatgggttgttaggatttataaaatactttagaaatatatatatcacaaatttaaatatatttctaaaagtattttaataatcattaaaacatttgctaaattaaagaagaagatgataaaagattaacggaagcactaacctaaagtcattgttggagattgcagagaaagtgaggatcttccaggaatacactatatttctaaaatattttctttgatagggaaggagagaatacagaaactctaatgtttcttagggaccactacctatttataaagggaaatttgaaaaaatatgcataaaataccctaaaattttatacctaaactaatacattttaaaatttaaaaaatatgaccactttttaataaacccaaaaataccctactcattttcaaacctcaactctctctcttcctctatctctctcggttctctctcaacatctcaccctcaccaaaaccgaacctacccctcaccgcctacatagaccacctacacagacgaccaccgtgagacccaactacctccgagatgttagaggtaagcattcaacccattttttttttatttttgtcatttgtttttttttttgggtgatttacgatgggcaatgttgtcaaaggaat

SEQ ID NO: 98536 - DNA, 778 bp, Cannabis sativa
ctttctaactttataggttagtgtcatgcaaccttctaacctacgagatcccatgtctacatagtggacacaagtaagtttatcttgactgggatgtgcacaacctagcaaggtcctagccggacctacagttggctgaccagggtggaaaggttccatgcactgggcaaccttcaataggttttgttggccaagtgtatagaatcactctagcacttgttcttttcttgcaagctttccaccttgccttcaacattcccatgactttggagtagttcaaactgccacaaagatagggactctccatcaacaaataacaaccctattctttaggaattatttactttgtatttcaaatatatgttgtaacttgcctatatccaaggatatccctctgtacaacttgtaagccctacaacaatataaagggcaagatacacgcggaactaagttatacacacacgttttaagtctgaatcagaatgcaattatgctcaaaagcactatagctatacgtcctctctcttttcatacctctcacctagaaaactcaatgtaatactgaagggagcctatctagaaatgacatggtcttagcttgcaatttgattggtattatctcaagagtaaatacaactaaaaggggagtaggtcattacataaacaaaaggggtcaaacctctataaatctatgtgtgtcttttagtcgggttttatgccctaaataaaagtccatttcaatgtaatctattttattcaacatcaataaagaaacaga

SEQ ID NO: 98537 - DNA, 783 bp, Cannabis sativa
  modified_base (243)..(246): a, c, t, g, unknown or other
  modified_base (751)..(752): a, c, t, g, unknown or other
caactttgtaagtaaaaatgtaataataggcgtgtgtgagtaattttgtaataaattgtgtaaaatagatttttcatgtaaaaatttctaaaagttatatgtaacattttttttaatactaaatcacacattttttgtacatacaaatagttgcaactacttaacatcgatctagctatatgccgggttaatactcgcttgagaccataagatacatttaaatatttatatctattctatatnnnntgtgcctatataactgaatttttagtttatgagaaattcataggtgactttttatttatatttaataaaatgataaaatattatttatatataataaaataataaaataaaaataaaacaaatctcattaatatttaattatcaaaacaatcgtgcatataagagcaataactgcgatagattcgagctttctctattctacgccaccacacgaagtcgttcccactcccaatcgatagtaagccctactaacacacccgaaattgtaatccaattcattggtggatgcccatgaagccactcgaacaacaatggcctcttctagaacgtctcaaaatcccaatcgatccacttgaacaacaatggcctcttccagaacatctcaaaatcccatggtatgtcattaagtttattgggttatttttacaaattcttggatttatatacatatttaacttttaagtatcagtcgatatatataccaaatgtaaagcccgcttagttnntttggaaattagcagttatttatgttaatca

SEQ ID NO: 98538 - DNA, 711 bp, Cannabis sativa
gcatcaaaaataaaggaaagattaaaaaaaagaaaaacaaaagaagaaactttttgaaatttggatttcagcgacatgtgcttgtggtgcaattatatggtttgatgatcagtagagtgcaaacatagtagtaatatattaatattcttctagctcaataatcagaaagttttaccttctcataacatcaaaattcaaaagaaccttcactcaacaataactgccaaaaattaaaatagaataggaaactcatgtaaaatagttatatactcgtatacatggcaagattggatgtgaaatttatttatttatttttatttaaattatatttttttcttaattaatattgatatttataaacctaattaaataaaatggactaaaaataaaatttatacggttagttcaagattttttaataaaatattagaaaatagaagttggtagtcttaattcaatttttttaataaaatataaagaaaaataataaaataaaatttaaattataaaaaaaaagagaattaaggagaaaatagaaaaacctatttgaagtgattttagacagcaatgtcactgctacattcttctcctttatatatatagatcctttatatatatatttataggtgcactcttaattggtaaaattagaaaattttgagtttttatgcttaatttttctgtttaattaaaaaaaaatctctcattttt

SEQ ID NO: 98539 - DNA, 632 bp, Cannabis sativa
acccgatttgtagcaacagttgttacattatgaggcacaagttgaagaggacaatgatcagaactagaagcttccaaattaaacagtttggccgtgggaaacaaaaaaatttaaattttatggataaaatccccaaaactcgtatttcgttagcagtttactatttctatccatattcacgtgttaaatattatgttggattgtcatgtgtacaaaatgtattgtctatgtagacacagagtacacattacacaattttattagtacacgtaaataaatattaaaaaataaaagaaaatttatagcaaattaatttaaaataaaaactaaaataaaataaacttaattaataaaaatgaaaataaatgataacaattaaaaatataatttttttcttttccaattttcttctttatttttcttcaaaattatcatcacacccaccaccaccataaccatcaacaagaactgccagcctaaaacacaaccaccaaccaccaccaccaccacctatccaaaataaataccaccacctccagccccacgaccaccaagaccacgaccacgacaccaccacctccaaaatcacatagaaaaaagtaaataaaaatgaaactaaagttagatctaac

SEQ ID NO: 98540 - DNA, 515 bp, Cannabis sativa
attttattttatttttgcttgaaactgaatatttatactacacaaacactcaagaaataatgacacatttcatgaggttacttcaagtaaaagagaagaacaatttgaagcttttctgttaattttctcctatatatatcaacatcttttccactcactacaccttctaaatttgtattgtcttaaagcattatgcatcacttacaataaaataaaataaataaactcaccaaactttataactaaatggtacatttttcacaaaataattttttacttttattttttgtttttatttttaaaaaatatatcaaaattctttattcaaaaaatagaattacaaaagattaaatgagtctcgctgcattgcaagactcgcacaaggggttaacctcaaccacattgtaataattttgttaattaaaacttgattgattaagggaaatttacatggtatattaatttttgtcatttttttacaaaaatactgctaggcggaattttttactttttta

SEQ ID NO: 98541 - DNA, 504 bp, Cannabis sativa
agacatgacaatgccaagctcaccactaacaccacaaccattagtaatctacctgtaggaggtaatagccgttgatctaacatatctttcagtagcatattctctgatgatattttcgattgagatgatgataaagattccaataattctcctggatgctttcccatcataatttctaaagctaccactccaaaactatacacatcacacttttcagtcacacgcatggtcaaagcaagctctgtacaacaaaataaaagttcatgtaagcactaattagtaagagaaatgttaaagggtacagtagtgcccaacactatcacgaggcatcatacttctattgttgtaattaaatattaggtgaaaccgagttaaatatcataaaacaccgctaactagggaggggtgtgcataaatcgatctaatccaataagaaccgaccgatccaattacaaccgaccgcaaaacattggatatccaattgtgatcggatcggattggatg

SEQ ID NO: 98542 - DNA, 609 bp, Cannabis sativa
gattttaatagagcaaaatgtttaccttgttcctgaactgcatgccaacgtactggttcgaaatattattgtgaaactttgatgaaaagatatcagcagcaaaaacctgtacaattgattgtaatgtgataaacattattattaggaagaaattatattgttcatgataatagaggataatgttgggtccaaagtatgtatatgaaaataatatttgagttagttgaggaagagtcaaacctcactccatatatgactgtaacaagcagattcataaccaataacactacaagggaaacgagaggctggatttgtcccttccaaaactggcaaacctaacaaaatctgaatagacacagaaagtgggaaaatataataagaagatgagagataaagttgtaatctacacacaaagagagaatttacttgtacctttggatgaagatgcttgaataactcaacaatgtcgacattgtccgcagaatgtataatttgatcaaaaagacctaaatttaagataactatgagtcgtgactcatgtatgcggtagagaagaaaagaaaagaaaagaaaaaatagatcacacacagcaagaagaatgactaaact

SEQ ID NO: 98543 - DNA, 668 bp, Cannabis sativa
tgtattaaaatttataaatttattgatcaaagttgtaaataaaaagtaatttaaagtcaaactgttcctatctcattcatgataactgaaaagatttaatgggataaattaaaataaattgagagtgtatttgaaattggtaaatttattttatattactgaaaaatacagatggtactggataatgccttccataaaatggttgagtaggctctatgattggaagcttataatctcagttattccttaagttgctaacaatgttattttgtcatctttctactctttttttcttcttttgaacaacttttaactgagcttttttatgctattttcctctttgagtatcatatgctgtttttgtaaatactgaaaatccaatgcagaatcatgcaagtggatgtctgtccaaagttgtttgaactggcttgtggaagtgactccaagtaccgaccgcgttgggccattggcagttaccggtcttctaaatgattccttgccatctagagcatggaaagtcccgcatcacttaaattatcaggtttgtttgtcttttgattttctgtgtttgtttcccagttggagcataaatatgatgatgttatgctgtaacaaactattgataatgaaggttgttcatgttttgattagttcatttgattattgcc

SEQ ID NO: 98544 - DNA, 1481 bp, Cannabis sativa
tgtaattaatggactaaatttgtacaaattaaggaagggtataaattttgatatggcttgtattattaaggccaaaaattgaaatttccctaatcaaattcgtgtgggaggactgttgctcgtcctcgtgtgttaagctgatgtgttaagcattattctttttttttctttaaatcattgtaaaaaaaagaatcattgtctattattaatattatattaagttagtaactggttgttctaaatttataggatcggctaataaataaatttttttatatattttattatatttttataataataatttatttatttaaggtacaattttttggtaaagttgactaaagacttttgtctaattttatttaattttactgtttcagtgattgtttatgtactaaactatgttccttagattttgatatctaccaaattatgcacctcaaactttgatatgtactaaattatgtcccttgaactttcatccatttcagaatatttttactaaaattagacaaaagtccttaaatttaacaatcttaatagttcggggagaatttttaacagccaaaaaaattcagaagacatgatttgatacatgtcaaagtttgggggaggaaaaattactaattagccttattaaataaacttacacatctaagattcatgtatctaataattttttttaattaaaaaaatacatataatatcttttttaaaaaaataattatataattatattttgaatttttttaaataagaatgatgaagagttttaattatatcaatcataataaagaaaatatatatcacaaaacattcaatttgattctattatatcaattatattgacaattattgatttcagtaggattgatattaattgaattatttgtgatttttttcattttaatataaattatttttggtggttttttacgtgaagttttcaaaatacctttttatgttttatttacaatttcatcacctataatttttatttaccaaaatacactttcaaagtacaaaaatacatcttgctcagtaaaaagtaagaaaataactaaaaaacaaccagaaatcaaccttacgacaattataaatcaactataaataaattataaaaccaccagaaaaataacctcatgacaactttaatacaactataaacaaatttattattttttactgaagatgtatttttgtaagtaaaaaaattcaaaaagtaaaaataaagttttttctgtgttttgaaatattttcgtaattttttttttcaaatttttgacctttttaaattttttttttttatttgtggattttatttattattattttttgtcaataatattatttgtggacttaatatcaagtatattaatattttaatttttttgaccatgaaattgatttattttgatcaaagggtataatgaaaatgggatgtgattcatgatgttattagtattatgcatgcatat

SEQ ID NO: 98545 - DNA, 514 bp, Cannabis sativa
gccgttgttcaagctattcctacgtatacgatgagttgttttcgattaccaaagaaaacaattaatagtatacatagtatggctgcaaggttttggtggggctcgtcggagaaggatgctaagatccattggtgtaaatggtccattctgtgcaaacataaggagaaaggtggtttaggatttcgcgatttgggtctctttaatcaagcgctcctagctaaacaaatttggaggtgcttacggtttccaaactccttgtgtagcaaggtgttgaaagctagttactatcctcatggtggggtgttggaggcaaaatgtgggaatcatgcttcctttgtatggcgaagtttggtttgggggaaaaagattattcaaaagggatatcgttggcgaattggtaatgggaactctgttcgggttcttgaggatccttggctacctcggcctgttacttttaaaatttatgacaaaccgcctttaccggatcaactgtatgtcatagatttaaagaaaa

SEQ ID NO: 98546 - DNA, 574 bp, Cannabis sativa
caggaatttgctgagtagtagtagggtgctgattttcagcatgaaatggtggagttgcagcaggtattttttgatgtgcaacgtgagattgtggacctgcatttttattatttgagttcacagcctgaattggctgatggacagcaggagttggctggtttgtggcagggatttcagtcccagtttgttgagttattggtttggaggaaggtaattgcttagttaaggcagctgtcaatctcagaatgaatattgagagttgagaatgaaaatatgtgttcataaaacacaacatctctagagatgtagatttgtttggattcgatatcaaggagtaaatatgctttcattcccgaaggatatccaatgaatatagatgccctactacgaggggagaacttgtgtcgtttggatgtgagagtagagccataggcaaggcatccaaaggaccttagattgtcatatagaggtggtttgatgtgtagtaattcaaaggaagtggtgcctttgaaaagagcagatggggttctattaaggagataagtggctatttgaacaagataaggccagtaga

SEQ ID NO: 98547 - DNA, 705 bp, Cannabis sativa
atatatatatatatataaaagaatctgtaaaaaatcttttaaagagatgaggtggccatgtcacgagctttatgtataaaggtcgcactttgactcgtgtagaagataaaacttataaatgatcctttaatttatattacaaaatactaatttaaaagtaatggattaactcctatattaattactaatttaaaagtaatggattaactcctatattaataagaaaatattagtaacaaaatcaggatcattcatcaatataaaagaacaataatatttctatataattatataatcaccaaatagataaatgttaacttaataaaataccaaaataatatctagcatctatcattcctcatttctaactagtacatacttaatttaagtcatccaggtcatctatttcagcttaaatacagtttcattagaaggttaaagagtagaataagactaaactaataacgactttcttactcaatggtaccgtaccatcctcatctacaagcatcaaactgagttcctgaaatgagagaaaatagggggtgagcttataaagcccagtaggaaaacaactaatatatatcaacagacccttggtttgataaaattctcgcatggttagctttgtaaaaataaaatatctcattaccagtatcaaaatgtataaataaagtagagagaccacaaataatcacaaatcaa

SEQ ID NO: 98548 - DNA, 527 bp, Cannabis sativa
tagctatgggaaagaaccattctttcattccacaaagagtgttttgttgtttgtttcgagaactcattctcgagcaacaatacaagagtgttcgcggtgcgagtggtacggattgtagtcattttttcaaactaaactgcatatgcaatttttgtaatttctcaagccgcaactacactgcgacatcttaaaaccgcaaaaatcacactgtgaaaatatagtgtggtgcggtacaatttaagtgatttacactatcataattatcaaacattacaatgaaaaattaaaacttaaactaataaagctttaacaatacaaagcaattttttttttattaaaattttaacatcataacatgtataataattattaagttattatattgtattttctctaaaaaaataaagtaatatatacatatattatatatatttgtttttatatgaaaaaaagaataaaaatcatactgtaaaaatttgtaactttgtaatatatagtgcggtgcagtttaaaccacaattattaaa

SEQ ID NO: 98549 - DNA, 551 bp, Cannabis sativa
aaaaattaactcaaacttaacttttttttttctaataccacatacaaatctcttgcgtcaagtgattttattttctgcatttatttttatttttgttggttctagtttatttcttcaaaactattttctacagtaacagaattacattctgctgctgcagacaattacatttaaatatttattatttttctgtaataattattgacatttgcgaaaacttgatttttcaattggtatcagagcgggacactaaactcttagtgtgatccttttaatgttttcgtatatttttgtgtaaaatatcatttttgtagaaggaagttcgatttctagaccaccattgctcaatgattctaattatccttattggaaagttataatgatgaatttaatcaaatctcaagatgagaaagcttggaggatggttctatcaggatagtcttctcctattgagacagatttcgaaggtaattctaaaataaaatctgaattgaaatggtctattgaagatgataaactttttgcttacaatagcaaagctttacatgcta

SEQ ID NO: 98550 - DNA, 528 bp, Cannabis sativa
atatatatatttataggaatgtgccactccaattgtcataatgttgaactgcagtgagagtcatggatgtgaaagaatagtattacaagatatcgaactacaactacaagctttgtgcactcatattggacatgctactctttgtgtattagtcattaatttcatttatttattagttaatatcttagtttttttattaagcagatgatcacttttaaataatgttaatttactacataaactttgcatttttcccatgtgggactatataactcatacactttacttcttatttttgtaaaatttcacaaaattctaatagtaaatgatcactttcaactaatgtgtcatgtgtcatattttactgcataaactttgaatttttcccaccagaaggaattcacattattgtataattctatagaaatataaacaaactttcttgtgtgattttacatatacgagttcctcatgaacaatcaatgtaacaccaagattcttgttaactgaggaatttaagaaaatgtt

SEQ ID NO: 98551 - DNA, 533 bp, Cannabis sativa
taagattcaataaaagaatgtattattcgaattattgtcacatgtaggaaaaccccaattaagccaatgccacaagctatggaaatgtaccaatgtgaatttctagatacttacagtcgcagcaacaaatattacagcattgggattttttggtattggaaagcgggtgacatctgtgtgagacaaaacatttcgcattcgttctttgacctcctcgagagtcattgcagcatgctgtgctgcaagttcctctctcagtgcttcccatgcagttgcatgctttagtattccctcacagaatgccacaacagcagagtgtggagagagaaaaggaagggttgcaacaggtgtagggtgcagtgatccaaccattgcagcatgaactcctcctagtgtttataaatattaaatttaacgcaaaagaaaaatgtccctctctggggtgaccatcacaagaatagtttcacaagttcgaaatagtatccgtttacaccaacttgataagcttgacttttaatggaggttaagtttta

SEQ ID NO: 98552 - DNA, 1040 bp, Cannabis sativa
gatttgattgctaaaaccgaccgtgcaaaggcagttttaatcggagacggccggttttttcgattttgcagtttttttggtattggtttttttagtgttcgaacggtctgtgtactcggtttggtcagtttcttagattttttgctcaaccctatctgcaaccaagcatgggaatctattggccatgctcttttcggttgcaaatatgcaagaacagtttggcgacactcgaatcgagttcttgactggtccaatttgttcacgatgcgcaagctatctagttcatttgtctacaatgtacacacgtgttaaaatagaacaaatctcttgcaccctttggtcgatctggacggggagaaaccgagtgatacgtggatagaaagctaaacctgccaaggacttggccatatttgcagaaaactacttgcataattttcgatcagcacaagcaaaatacaactctaaaaccaacgctccaacccagccactctcttcagctgctaaaccagtcccgtggtcacctccaatgcttggaaacctcaagttaaatgctgatgcagcagtcgattcaacaaaaaaaagtaattggcgtgggggctgttattcgtgagtccttcggcaacgtaaaggcacagctcacgaaatggaggccttggcgatgtttcatagcttaaattgggcacttcaactccatttgccaattgctcaagtggaaacggatgctcttcgagtctccaatgctttatgcaaaccttcatctgctttatccaagatttaattgtcattagtcttctatccttttgcctaatgtgaatgttactcatgtcaaacgtacaactaatatagctgctcatgagttggtaaaattttctttaattaggggtggatgaaacttgattttgatcggattgtattcctccccctataaacttttttgttgtaaatgatgtactaaattataacaaattttattcttaaaaaaaaaaaaagccttcctatatgtattaatgcttcatctttgatattataaagcatgaaaa

SEQ ID NO: 98553 - DNA, 7664 bp, Cannabis sativa
  modified_base (34)..(40): a, c, t, g, unknown or other
tgaaaactgaacacaatacacagtataaaacttnnnnnnnatttttgaaaaaaattctatcccacagtaaaaaaaataaaaaagttaaaaatttcagtatgtggtgtaaataattctaaattttaatacaatacaaagttatatttaaaatttcaaacaaagtacaagtgtgatgcatatacatatttgagtccatcttttatagtgaattccaataataatgtttaaactagtaatccaaatttaatatatgctaaaaattgtataaaatttaacacataatataatataaataaaattttacacaataaatatcacttttttttatttatatactcttttatcatttattacttattagtataattaacaatttttacattttatatatttaataatgtttttatatatattcagttaaaatttaatacttttgttaatttttacacatttttataaaaaaaaattataattttaccctaaaagcatttgaacatatcactattataaaattttggaacaaaccgaacattaattaaattaaaaaattgtgattagcaaaatacgctcaactttccacaagtgccaccggtaataccaaattataaaaaataaaaaatattatattacattaaaataataataataattaagaaaaaaaaagcagcctagcaaaaagctaaaagtgaaaaataatattcccaagatatgctccccatcacatattttattattattatattaatattattgttaataataataataattaaatctaaaaagacagaaaaatctaaacatatgagtcaaaaaaataatgaattataaaaaatgaatttatttaaaaggcagtctggtttttcatctctccacagaattgagaatgattcataagtagtagatttggacctctccttcttacttggccacctctgagtctgaaacttgaaaaggcttcaattttaagattccagattcgtgctgaagatcattacgcctttttcgttttcattcattgcttctttccctattccctgctttataatcccgtaattccaattccctgtttttttttttttttgggttgaaaagaaagatctgttttgctttgtgggccagccagccagtcagccaaacatcatcgccattcctagccagctcgatcccatccctgatttctgtctccttcttttctgaacgtttcgctcttcgaaacgtttttattgcgtttctcttttctcttcactcgtttctctctttcggggtcttcgttcgttgatggtcatctaaatctcttctggcacagacctcgtccagaattcactccggtaatgcgacttttttttttgtttggtattatcatgtgtgtgtatgtgtgtgtgtgcatgtttatgtatttttgaactcgtgctttgtttggatgccaagaatttctggaagaaaatggatggatgagcttatttgaatgcgaaactccctggattttactttctagattgataataagaagtggctgagtgagtgatttatcagtttcttgtttttctcggcaaacaaacaaacagagtactattgaattgagaatctgtaacgtttttcttggttgaattcaaatctgccgaattttcttgtgaagttcgtattagttattgtgcttatcttttatcaaaattaaggtgttattattttcttttggatgagaacatgacgagttcaatttgtgatgaaccctgtgaattcgagtgatggctcgtttgggtggacttagtcaaattgagtggttttgtgttatgttgatttgattgggaatctaatttgtacggtcattgctttttcctagaattatcctgtagtttttaagtctaaaagtgtgcctaggaagtaagattgtagaagctgatacgtattgaaatcagataaataatttatcaaaagtctaaagaggaaaagataatgattctgtacggttttacaaaagtgatgttaaatttgttctcgtggaatttacttgtcacctgttattatctttccccatggagtaaatgtactttttctctttgtgggttgagtgttttggttttgtactaatctgatattaatcattcagcaaaaaaaaaaaaaatctgatattaatcatcaaagtaagctacatactttttctcttttcgggttgagtgtttaaggtttgtactaattaacttgatactaattatcaaattaagctggcataagtgtgagctgcatttctcagcgtgatataaaatttggatttcaaaatctgtttggcttttatttactaaaaattcatttatgtttctattccaacaatggtattcccatctgagtttgatatgtgagattgtgtgcaaatacaataccaaattacagcaagtatgggcagtctttctaatgttttttttttttgaataacttactaatgttttttttatttgtttgtttaatcattattgttagtatagtcattttctctcttttggcatgcaagacaacgttgttctatcatgcatgatatgcttttagtttccaatctgcatctctcttggatttcagttttttcttggcatttttcttatgtaaatccaaactaattggatttgtttagtttcacatatagaaaatcctcctcttttgtttgtgtttttgcgatatctttcacttatcttcgggctcttattaagcttttgttctgctgcatatagtgaaagatggttgcattcgggaagaagttgaagcaaagacaaaatgatgaatggcaacggtatggttataatttattgctcatttaatatccattgctaaagtgttcttttttaaacagagaagcacttcattgacaagtgacaacaatcagcgtctaatacatcaataagaaaagttggatccattgttaagtgttagatacactaacatttagtagtatacatgaaaaagattcagtctaacaaatgttggaaattttctgtttttatagaataataggcataaccaagttctgttggtagaatatgtttctggatatccttatctgtgaattacagtgcaaatctctggacggtatccattgagtattgatacaacatatgtttatacccttgtgtgtagatattacattaactataagttaatgaagaaacgagtaaaacaatatgctcaccaaattgaaattggtgcacaagatcgtcgacatgttctcaaggatttttcaagaatgctggataatcaggtgtgtataaggccatggtttgttttttttatcaagacatgattagaaacacaaggaataaagtatatttgcagaaataggcacaattaatgtgcatccatatattgggttttgcatggtggtgtttaaattacatatacaatttatgagattgcatctgtttcatatacagaatcgggaactggctgcttaaatatgtaagcacttatagcacacataatgtttatagattgacagcaattaacatgcatgtaatccttcatatataggattccgaacacttgcacaatttgattcattctaacttctgtcaacttctactattttagattgagaagattgtcctatttcttctggaagaacaaggtcgcctggcaagcaggatagccaagcttggagaaaggcataatgctcttcttgagcagcctgagatatctcaaatatctgaactaagagaatcttatagagaagtagggcaagacctgttaaagcttctattttttgtcgagataaatgccattggtctccgtaagatattgaagaagttcgacaaacgctttggctacagattcactgattattatgtcagaactcgtgccaatcatccatactcacaactgcagcaagtgtttaagcatgtggtaacaacttatctactgacttgctctttttttcctcctttttgcccctactttcatcattttctaatatccttctatattgagtattgttttttcattcttatgttttataagtgctactttaagaggtaactcatatagcaccatctttatcaaaaaaaaaaaaataataaaaaaaacaaagaaaaaaataaaaaaagaaaacaactcatatagcatcctaaattattctgtgtcaatgatcttaccttatatattattaattggcaggggttaggggctgttgtgggtgccttgtctcgcaatcttcatgaacttcaggaccgtcaaggaagctacttatcaatatatgatgagactgctcttccactccaggtttccttctctcttttgctggaatctatccaaaatattggttttacttattaacctttacaagggatcaatgtgcaggatcctgttgtcgatgcaataaatgcagctgtagacaggttaacctattcaacaaactttcttaccttcttggcacaacatgcattcattatgcaagaagatttgcctactcccaccggggaacaacctgatgacgggagatatcattttatgtcacttctcctgaacctagtaaacacatttctctatatggtaaacacatacattattgtccctacagcagatgactactccatgagccttggagctgccgcaacagtttgtggggttgttattggagctatggctgttgcacaggtgttttcctctgtatatttcagtgcatggtcaaatagatcatactttaaacctcttgtattcagcagtattgttctgtttatgggaaaccttatgtatgctatggcttatgacgttcgttcaatttgggttcttttgattggtcgtcttttctgtgggtaagttttgtttttccttgtagtttctttcctatgcttttctgattaatttaacatgaatttctgtctaattttcatcatttatgaaaataatgaactatattttaagaaatgaatgggagactggaactatacgatcctgataactcttattttctgaatttcagattgggttctgctagagcagttaataggcgctatattagtgattgtgtgccattaaaaatccgcatgcaagcatcggctggttttgtcagtgctagtgcacttggaatggcttgtggtcctgctcttgctggcttacttcaaactaattttaagatttacaagcttacattcaatcaagacactttgcctgggtgggtgatggctattgcatggcttgtgtatttagtttggttgtggatctcatttagagagcctgcacgtgaatatgatgatattcctactgctgagacatctaatgctgctgctggttagtgattagaaaatagtactactatataatacagatcaaacttgatttacaattagttgagtttattcatttaccacgaaatatttaatgtgatgttgaactctttaaatggcagaaaccgtagaaaccaatgggcttgaggaaggtcttaaacagccattgctaatcactttagaagacaaacaaggtgaagatgaagatggtgaccaagaatttgatggaagtgaagaagctgcagaggaatctcgtcaacctgtcacttcaattggggcagcatatagattactaacaccctcggtgaaggtattgtgtgaacctcttattatgtgctgatgtcattttaaacatgaaatacttgagccaacagaaatactaaaaatttggtcatacatcaatggattttctgtgttctcgtgtctggcaagaaatgcggaaaacatgtagttgtatgtgtattaatcatattacctagttgtaattttctgattggattttaatccgttcaaacttttgtatcatttttcaggttcaattgttgatatatttcatgctcaagtatgtaatggagattttactctcagaatccagtgttgttacgacatattacttcggttggtctacaagcagcgtagcgattttccttgcatgtcttgggctgacagttcttccagtaaacattctggttggaagttacattagcaacatgtttgaggacaggtactaatttgtcattttatgtttttgtttgatggtcagtttagtaccacacatgtttgtgctgattacaaatgcaactctttccatttttctgatgcaggcaaattttattggcatccgaaattctggtttgcctagggatacttctaagcttccacataataataccatacactgttgttcagtatgtctgctcgggtctcatcttgtttgtatttgccgaagtacttgaaggtaagatatcagacagtttaatttgactatcattttaggaaatcaaaatgatcactatgatgccaaaaaaaaaaaaaaaaagtagcctacgcattttgctccatgaactaaatgaagattacgaactgtcatatatgtgtatgtatattgtactattgcattgccaattccagccattgatttttttcccacctaattctaccctaacaggaaatctatgtaggaattagcgaaatacaaacccgaattttttgattgagctatccctttactatttgaaatgataaagtggagattaacatagctatctatctgatctgtatgtgttcttgcaggtgttaatttgtcacttctgtctagagtcatgtcatcccggctttcccgcggaacctacaatggtggtttactgtcgacagaagcaggtacacttgctcgagtaattgcagatgctacaataaccctggctggatttttgggggagagtaggctcttgaacatcacccttctaccgtctcttgtcatatgcataggttcaatcgttgcaacatgttgtacctacaactctctatattgacccttattcatatatcatgtatcaaagatggtctctcattggcaatgccttgtcattttatttgttagattttcagtttgatattatcatcatcattccattgtgtatatggtcattttattggtaagaaatctagttcatgagtatctttctccaattggtttcttaattattttcctagtaatgtagacaactaaaataattaagttaatagaatgaaaccattttcggaggagttaccaaatgcattttcttcgagggttgaaccgtatataatttcattgattgattgattgattgatgagaatgcaacatgctattattgctttaagctatttccaactaagaatgaaatatttagtgttgcaccaatacagaaaatgtaatactttagcaccatagtattttaaattcgaaccatacaattacaaagtttcatgaacatcaaatttgctgtgagattttcgtttgaatcattatgagggaatatttaccaaatttgatgccttgcggttgcattgagcttgctcttagaccaacctctacaccaaaataacgcacataataatgtaatttgaaaaaaaaaattatgactatatcctacactaataatcttcatttttttgggtttgaatttttctttttatatgtataaggggtttgaaaatgtttttcatttttcatttttttattatttattttcttattttttatttagtccaagaacttcccttaatccacatctcaaaacacaataatgatgttagagagttttagaaagagccaagatgcaaaatgaccctaaatttaacaattaagttaataaatgtccatttttttaaaaaaattaataaaatgtccttttagt

SEQ ID NO: 98554 - DNA, 682 bp, Cannabis sativa
  modified_base (632)..(643): a, c, t, g, unknown or other
tccacgtatattgggcgattttaggagcaacactcttgttcatggttataatatcttggagtttgacactgaaataatcatcaataacaaaattaataatcctttactactactttgttcgttaatgtacttataattagtagaatgacaataattaggaggagattcacataaatagatagaaatagtgttaggtgtatatatatgtatatatgttatgtattaatgggggaatgagataagtggtaaattgatcccttgcacgcaatatataataacaaattgaaaactttttgcttcatttaaagcaattagtattggcgtggattggaattctcaaaaagtgagcacacaatatatatcctaacacacaaacacatttgtttctttcttttatttccaatcacaaaagagagcacactttccactcattacaactatttaataactaatcttacgcaaagaaatctcaattcaacatatttatggcaagcaaacaatgttaggcaatgtaaatatgaaaacaaatgtacatttatgtatgtacatactaaactaatgttaaagagaatcatagtgcttaattattgattaatattgaataaagatattgttggaaattattttatcannnnnnnnnnnntactcacaagtatgtttattaataccctaaatatgaact

SEQ ID NO: 98555 - DNA, 1043 bp, Cannabis sativa
aaagtggcaacaactagagtattggagagttatattgacaccaaaatagaacaagaaatacttttagggctactttggtacaccgtgttttattatattgtattggattatattatactagtattatttagagataatttcaaaaaaaaaaaaaaaaaaaaaccacacacaaaaaaaaaaaaaaaaactacctatacaaagttttcaatattttatggttttttttttataatttatttacataaaataccattttttggtgtatctttatattgtattcttttgattttattattaattttttgttatttgtatattattttttatattgtgttgttattattttgatattattttgtgtttttatagaatattgttaaaatgtaagaaaaaaaatgaacgtaaaaatgtaaaaattttacaaaaatttgtgttatatgtaattatccctattatttaatacaagattatttgtattagtgttgtattaaataatacaagactaataccagccccgggcttgagtctaagtcgaggctaggtccgaggtcacaaggtctgattttgggtccaagtcctggactgggtccagggtccgagtctaaggtctgaggtccgagtcttgatttgagcccgagtcttggtctgaatttggagtcagggtccgaatccgagtttggggtcccgatcggggttcggggtcagggtttgggtctgtggtccggagttagggtcaagattcgagtcagggttttgagtccgaggtccagggtccaggttcaagttcgaggtttgggtctagttactgagtctagggttaggtctagggcaggggtccggggcagggtcctgatttggagtacgagtctacggtctggtccaaggctagttcctagtctaaggtcaggatctaggtcaggtctggagttcaagtctaggcccccatccttaaacccgaaccctttctaaatattataatacaagctaatatgaatcatttgttagatattaaataatacaagttgcattgtattaaaatttat

SEQ ID NO: 98556 - DNA, 1031 bp, Cannabis sativa
catttagtctttcaaggagggtctatagccaaagcttgaaacaattgaaaaaaatattttaaaatgaaaagtattgctataaaagaaaagatatatacagaatataaatatatattatatacactaataataaggattcaataaattgaaaagcactgctataaagaacatatataaaaatgtaaatgtatataaaacaatgtaaactgcatatctctgcaaatctctgcacatccaaataattttatttttaaattttggatgcaacatgcagataatataaataaaacaaaataaacatgaaagaaaagaacataacttaactcgtccaaaccagatgagctcctggtagagctaatggtgtacccttcactgcatttcctttctcttgaacccttaatttcatttatattatgatatcttgaagtttagttctacttgcaagattgtttgcaagttgtatgtgttaatttgccgaattggtcatcgactattgagtataacttggagctttaattgcaagtttatcaaggatataatcatagtataccaatgatcatagtatacaaatgacatagtataacgatgattcatagtaagataaattagagcatagtataccaatagtcatgacattagtaataacaaatatatttgtacctattagagcaattataatatttattctattaagtatatagcagcgtaaaataagttagaacctatgagataacttgcattgtactcgtacccttcatccaacttaaaatttcctgcatcttaacctgaaaaaaaaaaagaaaagaaagaaagaagaagacaagtaggtgtatgaatcaattatcaaaccttaaaatgttgtgtttatgacctgatctttttccatatatataaccagtataactatgtttgcatctttttcatcaatgaatcattatacagcgctaccactccatatccatatatcatattgacttaaaaatcgttacatatattagctcttcatgccaatcctctctctctctctctct

SEQ ID NO: 98557 - DNA, 519 bp, Cannabis sativa
gctatacatgcttagtgatggttctgtcaagtccaactcagccttacaatgtcttttaactactactccagattctgttcaatgttcttgttgtaatatgaccaatacagaacaattttctactgtccaaagtcatgtatctgattgtactccattgaatatcaataaagaacaattttctagctcatctgtgcctattgcctgtgttgcttctaaatgttttgatgttaatacttggcattgcaagcttggtcacccatctttagccacattgtccaaattgcttccacatttacctcatactgggtctattaagaccctacagttttgcacagcctgtcaacagggcaagaatcacaggttgccctttcctctgtctcaaaccagatccagtcaaccccttgaacttgtgcataccgacctttggggtccatcccatataccatctaaagatggcttcaaatactatattcactttattgatgactatagtaggtttacctggatctatcccctctc

SEQ ID NO: 98558 - DNA, 4856 bp, Cannabis sativa
tttttttttttttttatctaatagtaaatcgactagtaagtattattgataataatcaccacatattacatccatccattcattctaattttagctttttttttttttttttgcttccttcctttactcttgtattttgttctattatataaagtagaagataatctattttgatgttttatctcatcccaattgaaaaaggaaattcccttttagtatgaaatcaaatctcacttccatattattctactcttatattttgttgtctttgctctcaattttgaggccatgtttcttttttcttttttttttttttaaaaaaaaaaaaaacttgcattatcatattatttacattgtattgtattgttgtgggagggtggaggtttctgaaagaaaaaagttgcatattaccataaacaaaactaattgaaacaaactaagagatatatatcttaaagaagactctttacaattcaattattattggaagtgtatgattgaacaaaatacaaaatgttctgagaaaaactaaaaaaatattaaagagcttttctacttccttagccaccaagttgcttgttagttgcatcatccacaaaaatgactgaaaaatgtttcaaaataccaaaaaatctctttttggtcatcaaaattaatcactaagcctataggaccttcccctaaaagccccacttgtactcctttctggttcggcttgagttcgggcacggacaatcggttgagctcctattctccatcttgccaccagtctatttctgtttgctaacagtcaaggaaattttacagtgacaaaccaccttcaaatatgtaggctagcaatgaaaatcagttttgtacaaatcaaatacaccgcaattagactgaagataaaccttgtaagcagttaattacgataaagaacatgagaatgggaataagaatgatgatgatattgtattatatttttttttgtcctgtttcaataggaaaaggatacacccatattggtgtcttcaatacgttctttccaccagctagtggatgtagcacagtcagaaagtaatacagatgcccagcaatgattccaagcagatctggcataattccagaaccaaagattacatccaaagcaagcatggcccatggtagataaaatgcctgcaatcaccattgttttgacaattatacgtcatccttaaccaatccgcagctttatactatggaaagtaaagcttgtcgttactaaccttgagtgtcacaagtccatagatgttgataatggcatttggaaattctcgactccacacataaacaagcatgaatacaagagacacccctaagaaaggggtccaaaatccaggaatgagagacaaaacctataattgaaacaatcgttgtcaaaaattcggatcagatgttcgcgaaaagttcaattaaaaatagatttagcaagggtaaaacataaggtatattgcaacaactgactgacaacgaaaatgaagatacaaactataatgagaaaatgaaaaggtaaaattgagcttcctaatttttttcaagaagtctactcaatgctaatctatatgaagataaactgcccaatgacaattataaattttggcacaaaccagtaatgttaacgctccaaatatcatcatccacaagaaatctgctgtcctccgatcaaatggacccttttctagttgaactccatatcttgctctaaacaaacagcatggagaaagtattaaaacatgagaaacttcctcttgtttcagtggtaagcagatttcctacttattttttctcccaaaaaataaagtgtggcacccactaggcagcataaacagaaaaaaaaaaacatatacacttcccagattacagcatttaatgacaaatctgggagattgttactcacatcatgagaagacggatcccaaaattaatagaaaatccgccaaggaaaaataagttcgtaattaacctccacacctacaaataatggtaaatcagaacttagaagacaagaatcaaatattttcttaaggaaattaatcaaacacatcattaatttctacagaaattgatccaaacctgataatcatagaagatagaaccataatctaatgcaatacttcttttgtcataaagttgcaattgagcgcccagggttgccaaaaaacacaaagtcccataagccttactaatgggtgggagtgacttgtaaaacctgaagaaaggaacaataaaggatttgaaaacaaaactagaaagcaacagagcatgaattcatcaaaaagagagcagatagatacacattgcagtctgaaactaatggaacaaaaccaaataattccactttggacacatcaggctaaaaattacagaaaatattgtcttaataacattgcaaaagttatgagaaaaaagatcaaatgacagtagaaaccgtaggcattccatttattaaccacgtgaaagcctcagtcccatgccatgttttgaactaaatttgtcttcactctgaagtctattgaaaattcgattaaattctaaatgaaaaactcaagcaggctagtatacaaacagaaatgaccttaacaacaatctattcaccaaaactgaatcttgcctaaccggagtccatactccttccccctctcgataaagaaaaataaacaaagaaataaaagagcaatatcttccaatgaaaatgaagatttgttgaaacaatggagctgatatagcaatagtaatatcataaagaaaagaagtcactagtcaataacacaaatcatattcctgaaatttatgactgtatgcatgtttttaaaaaatgatttgggtttaacaagttgtgcaaaattacatcacacttaaccgagctcatatataactataaaaacaagtacaaacttatttccattaccgaaattcaagcaaatcattcttataattaagaaaatttcgtgacaaatttgggttactcaactagcatataattcaattccttctgaattcaaaaacattaaaccaaaaattaacgcgatttggtgctcttcgaaactaacagaaataataaaagaaacattgccaaaaaaaaaaatgaatctgatataggcttaaactaagaaaaaaaaaataaagtgaaagaggtcattactcgccaggagaagacattttggaaggatgaagctgattggaaccctaaacgcccaaaattgagaattcctttgtaccttttcttgcgctaacgaaagatcttggaaacgaagaaaacgacgatcaaagttaccgcgcaagaaagttcatacgatacgagtaaattactatccaatacggtccagaagattccgatcttcacacgcctcattgtcaccgcacgtgcctaacatttttttgtatgggcttacctaaagtaccaaaccaatgaacaatattagaaatctacctcttcttgtgtttactattacagttttcctctttttatatttatttgatttgtacacgtttttacaacactttttttacgttcgttttttaaatttcatattaggttacctactttgagctttagactaagaaatgtgaataataaaaaagtaacgtataataaattaaaaaatgacaatgacttaatttatggctttattgcaatgatcaagcttgcatggtgtacttgaacgagctctgctagaatttagagaatttagaataaggtgaatgggttctatcttaaaattaattggcaatagaaagagtagttgattcttcctgcatattctataatcgttccacacattaggagattctctaataaattttaataatataatgtgagtcacgtatcgtgtcaatgagaatacgttgatgataatgtggcataaggactactcaaagttcaaaaccttcaattttgaattcggcaacccaaagccgcaaccatgagtgattggtacttgtgtacttctaacttaatttaggaattgttttaaaaatacataaaaataataaaaaaaaattacaaaaatatcattatatgaaattttaaatatttttattgttttaagattttatttattaaaaatacgatgttttgatgttttgatattattttttgtacttttattattttgttgttgatttttttattatttatatgtgattttcttattattttcgtattgtttttatatcaccgtataaatattaaaaaaatatttgaacataaaagtaaaatttttattaaaaataatactttatataaatttctcgtattattatgggagaagttaaagaatactcattttctaaggattttttttttttcaattttaattaaaaaaagtaacaatattacaaaaatatttttcagctagccaaataaacaaatgtacagtccaaataaaaaaatttatacaaaaaccacttacacacaccttcaacccaggatccatgcttcttgggtaaccatcgcggaaccacgcagcaactcaacgcaaccgaaacaaaaattcaaccagaaagagaaccaccattaattctggcaatatcccctgagaagacgaccagaatcaatcaaaatagggctgtttcaaattcatgaaaaaaaagtgtagaaaaactactacgaaactaaaattcaaccggaaatccagtttaatttgcataaaactaatatcctgacttgaattttcagatccatgaaatgcaaatctcaaaaaattgaattggagttcccaaacaatctaactcaagtgtaatccaaaagaaaattatatcaatactatagtaaaatatttatcctggtgtattttcgttgttttttaaatttttaatggtaaatttattcatat

SEQ ID NO: 98559 - DNA, 541 bp, Cannabis sativa
ttccgtctagtatggattggaggaagaagggagttgtcactccagtcaaagaccagggtcaatgtggtaacgatacacaaacatgttttattaaatgaatataggggtgtccttagctaataagtatattatggatataatatttgctaatgttaatttgatatgaattatattatacatatattttacaggatgttgctgggcgttctctgcagtggctgccacggaaggaattacgcaattgtccacgggaaagttgatatccttatctgaacaagaattggtagattgtgatgtaagtggcactgaccaaggctgcgaggggggactcatggatgatgccttcaagttcatcattgccaatggaggcctaaacacagaggccaagtatccttacaagggagttgatgccacttgtaacaagaagtcatcatgttctgatgctgccaaaataaccggctacgaagatgtgccagccaatagtgagaagtcattgttaaaagccgttgccaaccaaccaatctcagtggcaattgatgct

SEQ ID NO: 98560 - DNA, 2032 bp, Cannabis sativa
tccaaaccattacaaaaattgacattaagtaatggaccagatctttgattttgagcatttttccaactgtcaagattagttctagccaatttaaccacttcaaaagcttttgtactttttttattccataggatatcatttcgggccatccaaatacgccaagctatcattgctgcatcttccatcactgctgtccgagcttcagttaacatttttccaaaccagtttgcaaagtttgtgatttcatcacctggtgcattaacacttgagatattccagcgagcttttacaaatctacattgcatcaacacatgtgagatagtctcaacctcaatgttgcataatgggcaagtaagatccacatgaacatgtttagtagagagttgcaccttagtaggtagacaacctgtcatagctcgccacaccagatgctggactttggttggaacttgcattttccacaggttttgccactgtgattccgcaccagagatcggccaatcaccactgctttgttgcagcagtttgtaagcgctcttaaccgaataaaatccagaggtttcctcagcccaataccagggatcaaagcataatgaatcaggtaactgtattgacaagattttgtctctatcctgatcattgaacatatcttgcagcagctccacatcccaggctttactctccatttgcagtaaactatccactgtccttccaaccaggtttggatgataagaagtaacaaagttattctctacacctggtaaccaaggatcttctaagataagagtagattttccatcaccaatagctctcctagtccccattctaaccaagcttttagcctcccaaatactatgccaaataaaacttgggttcggacccaactcatcattgaagaaatttccttttgggaagtatctagctttatacaccttagccacaagagagttttcattagtaattagcctccatccttgttttcccaaaaaagccatgttatagtcccttagattttgaaatccaagacccccagcatctttatgacgacttagttttctccaactcatccaactcactccttttgtcctagagttagactgagatttccaccagagctttgccattaaaccttcaagttgagaacaagtttccttggtaagaagaaaaacgctcatagcgtagctaggcaaagcttgagcaacagacttcaaaagaacttcttttccagctttagagagaaaccttgtctcccaactctgaattctcctctgcatcttgtcttttaggaagcctaaaatagcattcttactcctccccatggtacacggcagcccaagataagtactattttcggatgcagcaaccattcctaagagattacagatatcagtacgaacagcctggttggtattgttgttgaaaaaaatagatgacttattcaggttgaccttctgtctcgaagcacgctcaaagatagctaagagattgaggatattagcagcttcaacaccattagctttacaataaatgtaactgtcgtcggcaaacaacatgtgtgaaataactggagctcctcttgccacacgacatcctgtaagccatttactttgtacaaattgtttaaccaacgatgagaacccctcagcacaaataaggaaaagataaggggataatggatccccttgacgaatgcctctgctaggtatgataggacccattacatggctggcatgagttatttgatatctcaccgaagatacacaatgcataattaaagagactaacttactgtggaatcccatttgtaacatcattttctctagaaaaatccattccaccctatcataagctttacttaagtcaagcttaagtgccatataaccatccttgcccatcctcttccgttttaggtagtgcattatctcaaaagatatcattatgttgtcagagattaagtgccctgagagaaaagcactttgacattcagaaatgactagaggaaggacttctttaagtctgtttgccaagactt

SEQ ID NO: 98561 - DNA, 625 bp, Cannabis sativa
acatactgtaacaaaccataaaaataaaaatgaaaaataatcatcaaagggaagattaagtacattctattttgaacacaacaatcaaatcaagaacaaagtatagtagagaacatatgtataaaactacatgtgaaccattccaatcccaatttttgtagtcttaatttaatgcaaataaataaaaattaaaaacaaacctgagtttatggaaagatgcagacggagccggagctgttcttgtgtctcgccgggagaggaggcagagcgagatgggctagtcagggtttggggtgtttttgggattttgggatgcaactgtctgtttgagatttttgagcttggacgactgagaacggcaagcgtcaggcctggccatggctgctcgacggagaagagagatcgcggctgggaaggggtctcggggttgggtttctggtgcggatgggtttgtgtggggaggtcctatccgacctggtgtggctggagtagctccgtccgacgtggagctgggctgctcgaaacagaagacagagaaagaaaggaatggaaggaagaagggaaaattaataaccttatttcaaaaactaccaaattaacattcttataaaattattttaatttt

SEQ ID NO: 98562 - DNA, 654 bp, Cannabis sativa
  modified_base (316)..(337): a, c, t, g, unknown or other
gatgtaggcaaggtgattcaccattaccttgttcgaacctcgttaaatttgtgtgttctttatgcatgtttaaagttcttgctactagtttatacttgttgcattattgtgcttgctgttgtttggtttcattgatcaatttctcttatttattgtgttcttgccgaggtgttttttcacaacaatcggcgtcaaagctcaggtttcttggagcaagaacaggatcaagaaagtgatttatggctttcgcacgctttgaagtagacaagttcaatggagccaatgattttggattatgaaggatcaagatgaaggnnnnnnnnnnnnnnnnnnnnnntaaagaagagttgaaggaggtgggagatgacaagaagaagattaaagaaattgaaacaaaagctcatagtgccatcttgttaagtttgggagatgaagtgttgagagaagtatcaaatgaagaaactgctctaggattatgggagaaactagcctcgatttatttgaagaaaacccttgctaattaacaagttatacttgaagaagtaactatacgctcttaagatggaagattcaaaaaaactcagaaagcaccttgatgagttcaatcgaattattctggatctcagcaacataggagtgaaaatagaagatgaa

SEQ ID NO: 98563 - DNA, 595 bp, Cannabis sativa
ttacatgtacaacaatacaattgccatccaagcaggtatatatatatatacaatataccaattttactgtaataaatatttgtaaaattagaattattgaacttattaattattttgttatatataatagggaatacaatagatttaaacaatctagtttatataccaccaagaaacggtccaaccgtatgggaaattggcattcctgaccgaactgcctcagagttctatgtgcctgacccattgcctaatctcacaaatcgattgttcattaatgaatctgaaaataggtaaactaaaaaaaatgtatttatagtgttttttaattttaatatttttagggttaaataattttagtttgcaattgtatgtggtatatgacatttatagtgaccaacgtgtaagcaaccaaatcagtcaaccatatactatttttttaatttttttttttaaatttatggtttaagtttctaaagtagttgtagttgcaataagggtttttatacaattttttattacaatttaagttgcaacgctagttgcaatagggctttatatatatgtagaatttcgttaaaataaaaaaaaaaaaaaa

SEQ ID NO: 98564 - DNA, 536 bp, Cannabis sativa
taggcttcttgatatttagtcttcctattcaagactaaccctatataaatagcttgttgtatcatttcattacttactttttcacaataataaaaacacagtacagaggattcactctgttttcttcttctaccttctttgagttctttatttctcatatggtatcagcagaccaccttgaccatccttccatggcgaggccttccacacgctcccaggatggtgttcctccacctgcaaatgagcaaacccaatcggcttctcatcccgattcgacttccgcacctctcgccagcatccccatggcttctcaacgaattcccccttccagatccagatccagatcgcagaatgaggaagaaatccttgaacctgtccactcttctccagctcctcccaatgacaacatctcccaacctgttcgtcgatcccttcaagatcgattagctcatgaagatgttaccagtccattttttctcagcacagccgatcatccagggctagttcttgtctctaccattctcaatggcgccaac

SEQ ID NO: 98565 - DNA, 758 bp, Cannabis sativa
tctctctctctctctctccattcccaagcgcctcccacatcatctctctctagctttttctcacatcccttcttctccccttcagatctgtaataaagcagccacctccattgaagacgatgaccttcaaggccaaggagagctccatcgacaaacgacgggcgcttccaaacgccgagcccaagccatctccctctgctgtaccgcggtatgtctacagtcgacatctccgccgcccatatgcttccaaacaacgggcgcttaatcggtatatttatttttttgtccacctaattatctttctctttccctctctttgtctttgatctgtgcaggtggaagatgtttgaaggtcctcgggggtcttgcctttaatgtttttgtggttctgggtacacgattgacattcgtgttcgaaggggttgggttcggcagtgtgtgggatttgagttcaaacatggatttgggattatttcattctaaagccatgtttgacagtgtgttgttgatagtgtagactttagatatgagtttgtttttgttgttcaagtttactttgttcaaagtgtacattgtgttattttgaaagtgatttgggataatttcattctaaatgaacaccggaaaaataatctgatctgggttttgtttcatgtttttgtatgctttaatagaaacagatatgagtttgtattaagtttcatatcagttgtaatttgagtgtaaaattgtgtgtaaagattgtattattttagtta

SEQ ID NO: 98566 - DNA, 569 bp, Cannabis sativa
tttttatggaaataatatatttgatttttttttattctttctgataaaccatatatttgaatgctgatataaaatgaatgattgtggggttgttaggttggagcaagagtcagggtttttcttcaacatgaggtattttgaagacatggtaacaggtggcgagtgggaagaggtagaaaagtatcaatctggttttacaaaggttgacaataatagatactctatgaagatctttttcgagattaggaagcagaagcatatggaagctttagacaagtatgtgttttaaggttttattgaatcaggaatgttggattttattcattttcttgattgtattgttggttacacatagtagctctttttgctgattggtccttttggggttggtaagaattaaattctcttctttcatttaactacatgattatcatttaattattttcttaacgtagttttcatttcattatccaaagtaaagcttatgttaagtgatttagtgaactgaaatatgttttgtcatgcaatagaaatagttatgctacaatagaaatatgttggctgtgttt

SEQ ID NO: 98567 - DNA, 563 bp, Cannabis sativa
aattcatcaaccgatctactaattcattaacttttctcttcgaacaactacactattgggagaatttgatgatcaagttttgacaaatgcttagactgggtaattaattaggttttaatgagatttaagcttgaagactgcattggcttctttcccagtagatattaattctaaacatattgattagagatacctacaaatctaatttttgtatgtagtttttacatattgttatcaatgtgcttcccctgtttgctttcttggtgtttcttcatggttcattcttatgtcttcattatattctttacctatttatgtatatgttgacagagtgggatgtgaaagaagaaggaaaagaaaccacacagcaatgggaagatgactgggatgatgatgatgtcaatgatgacttttcacagcagctaaagaaagagttggagagcaatgttgcaaagagctgaacatttgaaaaatttatgttgccttggtactttcccttttccttgatattagtcacaccttgatggtagcttgaaatgtatcatactattgcctcctttata

SEQ ID NO: 98568 - DNA, 819 bp, Cannabis sativa
aaaaaaaaaaaaatacaatatatatttgggtataaaagtcttaggatagttagaaaaagtcttatcatgtctatctagaaaattcaatgtagtgggaactaggatatacaaagatttttatattcaagcaataaagacaatttttataggtatatatataatatataatatataatatatatagcatttatataagctcaacctacactttaattaattagatttgattcatgtattttgtttttaattagtttgatttttattttgtcattttcagtactttcatgatttatcataattataaaattaaaatttaaaatacaactactatcaattaatttcacaatcttatttttctaatcactaaaaaaatattatctaaaagatgttaccatttttatttttatttttcaaaatcattacatcattttttataaaattcttgatattttaatttataatgtaaaatatattttcaagacagtaaattatttataatattttaaaaaaatttattaaaataatattatatctataacaaatatcatcatataaaaatattctaatatatgtattttcaatcaaaaaattaaggaaaaaattgtaataaaaaattataattagcatataaatcacctttatttactcaccaaagcttttatctctacatatttttaaaaaataaaaaatcaaacatacataaatcactcacacacgaaaaatatgagacgaaaatagagacatacaattttttttttttcacactaattatcaaaacatatactaattacagataaaaatatagccgtttatttaatt

SEQ ID NO: 98569 - DNA, 694 bp, Cannabis sativa
tgaaaaaacataaataaaataccaaaattataccaatttgggtaagaacaaaacaaggactactcactactcaataagaagtgataaggattgtctaattttaatattattaattaattaactaataaaagttaaacataaaataataatattaatattaataataatagcaatgccatgcaataattactcaatcaaattcaaaaccaaaaccaaactctcaacaataattttttggctatggcttcctctcttgctcgatctctcaagaaaatctcttctcatgcttcatctccatggagatacttctcaacatcatcatcttcttcattgaatctttactctgcaatcaaccaagctctccacatagccatggattcagatcctcggtaacactacaactatttctttttccattttcctttctgggattttcatttcataaattaattttcagtttatatatatgaaaacagtacttatgtgtttggagaagatgtggggtttggtggggtttttcgttgcacaactggtttagctgatcgatttggtaaagatagagtctttaatacccctctttgtgaacaagtatgattttttctaaaaccccaacaatttatttcttataatattcatcataaagttctaatctttatctctacttgtgttttattttcagggcattgttggattt

SEQ ID NO: 98570 - DNA, 2172 bp, Cannabis sativa
taatgtggtagaattgacaaaagggaatatagtttcatgaaaagtaacatcccttgaataaaaagttctgtttgtgttgagatctaaaagcttataggctttcatactaatagggtaacctaagaaaacacaaggggcagcccttggtgaaaacttagacctagaggtaagtaaagtggaagcataagcaaggcagccaaaagctcttaagtgatcataaacagacactttggatttcagaagctcaaatggtattttaaactttagattaggcgtaggagttctattaattaagtaggcagcagtactaacacattcatcccaataagctagaggtatgtaagattggaaaagcaaagccctagcaacattaagtgttgatgtttcctttccacaactgaattttgttgtggcctttggacacaaaaatggtagtgtataatgcctaaggagctgaacagttcaggaaattgtaattctttggcatcatcagacctaacccctttcattcgaacaccatattgagttttgacaagctgtaaaaacttaggaatagctgtttgtgcctcaaatttagctttgataaaagaaacccaagtgtacctagagtgatcatcaacaatggtgataaaatacgtaaaaccagcaagagtaagagtgttaaaagacccccatatatcaatatgaataaggtcaaaaggatgaacaacaatgttatgatgagatataaaaggtaaccttttttgtttggcatagtgacatactaagcagagaaaattgggagaatgatcgttgtaaaattgtaaatttttattcaatcaatgatttttgatacaagcatgatggcccattttgtagtgccaaactgtttcattggttattttggaatcaagaaaaagaaaaagtaaaaggtacagtgtttgcaaaatcagaatgtaagtagtaaagctttccaatcttttcacccgtactaatcgtttgcttcttcaaattgtctttggatatcacagtgtttagcatgaaagaaaaaagaataaacaccagtttctgttagtgtagagacagataacagattgtgttgaaaagtttgaacataaagaacattatgaagagacagatttgggaaaaattgcactataccaaaaccttttactttggcactaccaccatgtggcaatttgacataagtgatagaactatcaacatatgtgttatgaaataaagaaaaatcaaagtaaacatggtgtgtggcaccagtatcaatgatccacttagagttagaaaaggatagatcctcgccagaaaaatgagagacaagaggtgcctctttggaaggagtagatggcacattcgatgttctttgagacaacaatgccataagtctttgacactgcacaaaagataagctcaacaccaggtcttaatctcccttctcccttaatagcatctccactgtgattatcattcccttctaaattagtttcaatatttgctgcagaaggcttcatgcgttatttacagtaggattagcatttcgattagggaactttccatacaatttatgtcctggaggatatccatgtagcctataacacttggacatggtatgactagtaataccacaatgattacacaccattttaggttgaaaaggttaaacactcctaataatttgaccaaaattagattcaaatgcggacttatcagcatcaggagaaggcagaggacttggagcattggttaagcatatctgtctttcttcttgaataacagatgcataggccttgttgatattaggaagaggatcctgcatcaagatttgtgatcgagttccattataagactcatttaaaccaatcaagaattatagaacacgatcttcctcttaatattcttggatgattttcatagcaccacaagtgcaagttggttgacgtcgatactaggggtgagcaaaaaatccaaaaaatcgaccaaatcgaatacaccgaccatttgaacaccgaaaaaatcgcattcgattaaaaccgccttaacacagtcggttttagtgtcaatggcaaaccgaccgattgaaccgagaatttaccgaacatatatattatacactatacatatataatataattatttttgtacatacttaatatacaattttattaaactagtttt

SEQ ID NO: 98571 - DNA, 728 bp, Cannabis sativa
agataatcattaaaatcatcaaatttgatttatacattcaagtgaacaccatgaaaagtgttccaagaacatgtttatctctttttgttcttcacatttttgtattttctttgcttccattgaagattgctccctcatcaagaacacaagcagaggctcttataagatggaagaacaccttggtaatagaatcatcttctcttgattcatggtccaacaaaaacatcaacaatctttgcaattggactaatgttgtgtgtgatagttccaatagagaaatctcacaaatagatctctccaacttgaagcttaatggaaaattggacaagttcaacttcactccattccttaacatcactgtcttcaacctcaacaattgtaagctctctggtttcataccaacagccattgctaatctcaccaagatcactttgttggacttgagtgacaatcacatcgaaggagaaattccagtggagataagccaattgttagagcttcaatatttgagtctcttcaacaattctcttgaggggtcaataccttaccagctcaccaatctaccaaaggtatggtatttatcacttggaggtaacaatttggagaattctgagtggtctaaattttcaagcatgccttccttaacttaccttgatatttatttgaatatgtttaattcaacattcccagatttcatatcaaagtgtaggaacttgaccttccttgac

SEQ ID NO: 98572 - DNA, 601 bp, Cannabis sativa
gaaaaataattgaatagacatgacaaatgagcaagaggacctcacctcgcttgatgatccgggtaacactcatgaaacgcaggtgaacatcgaaaatgttaacaatgaagcgttgcaccaaggcccaccatggtgtgagattctggaaaggttaaagcaacaggaggacaaaatgacaacacaaggaactaaaattgctctctaaaaggaacacatacagaggctcgagaatgaagacggacagatgaaggtagttcttgaaggatatcagcgtcccccacatgcggaagaaatgaacaacaaacaagtgggtgaaaccgctgaaaaaggaaacaacgacatcaacaatcacaccggcaaccacactcagtgcatgcatgaaggatctgggaggaaagaaaacccagcagcactaggagccatagcgcacccataggaccaatcaagaagaactagggaggaagtggaggagataacagaagcagaagcactttgcatagcaccccagaagcggatcaccaaaccaatagttgctggaaacctttcagtggtgaataaagaagtagagaggctacatgaaatgatgttgaataagctgcta

SEQ ID NO: 98573 - DNA, 591 bp, Cannabis sativa
caaaacagataattacaatacagggcctcagaaaggcaatccttcaagaagtcctgggacagagaaaatggaaggtgacattcgaaatgaggcagtaaaagggagcaccattgaggacaacattgatgagatagaggctacccttgctcagttaaaaaaagaattgggtttgtaaagtattagaaattttattatttgccacttttataacatccaagaaagtgaattctcagctctaaacaacacaatcgattgctgttttggccataatagaaggaaacgttactacatctacaaaatctgtttgattagctcattgttgtagcaaaatcagaaaaataagcattaaaactgtatcgagccagtcagctgtctaatctgtttgattagctaattgttgtaacaaaatcagaaaataagcgttgaaactgtatcgagccattcagctgtctatgtaaattggggacaataacattctagaacagcaaaatcttatgtggcctcaaaaaaaaaaagctagtccctgatgaagattaaaaagtcaagcaaatttattaagaaaatttctcattccatttgaatcatgtctag

SEQ ID NO: 98574 - DNA, 1284 bp, Cannabis sativa
caagtgcttgatttttagttttcagcaaaaatatccaaacttttctagagtaatcatctacaatagacatgaaataagagttacctccatgagttgggattttttctggaccccatagatcagaatgcacataatctaaaattcctttagatgtgtgtttacctactttgaagctcaatctatgatgtttacccaaaatacagctttcacaaaagtctaccttgctgattttgtcctttcctagcagcccttgatcatagatgactttcaagcccttctcacttatgtgtcctaatctcctatgccaaaggactgtcttctcatcttctttatttgttgctacagctgcctctccatgcatattgtttccaatcaagtaatacagcccattaatcttttctcctttgatgacaaccatagaacctttgttgattttcatgattccatgttcaattttgtttgtataccctgcatcatctagagttccaacagatatcaaattctttgtgagtttagggacataccttacatctttgagtgttctgatgatgccatcaaacatttttatgctaacatctccaattccttctatgttgcaggtattgctgtctccaagaattacttttccacctgttgtaggtctgaaattctttaaccatggtttctggtatgtcatgtggaaagtgcagcctgagtctaatagccatttgtcattagagcacttagatgccaccattagaacctctcctgagtcatagtcatctgtaaagtttgctgagtcatgatcttcatgcttgtttccacttttaccatctttcttaaacctgttattgtttttatatttattgaaataacagtctctcttgtagtggcctgtcttcccacacgtatagcacttattatcttctttagagccatctctacttgaatcttttgaagtagatcttcctttcttcttgtaccctgagttgctgtagtttctgttttgactattggatctttgtgtgttccttcctcttgtgaagtgaacttccccattggttcttgaaagctttccactattctttaatgacatttcttttgaatagattgccccaatgatttcctccaacaccaaactatcttttgcatacagaattgtatccctaaattgatcatattgttgtggtagagagttgaggagatatatggcttgatcctcttcctcaatagtaacatttaagctgcaaagatcagataacaacttagtaaattcatttaaattttcatcaatcgatttacctt

SEQ ID NO: 98575 - DNA, 549 bp, Cannabis sativa
tatgcaacaaaatcacactttcccagctctttactccagtatgatgccaaggaacaatgtgcactccctgtaacaggatcctgaaaccaagttttgactaacttaggtagcgtttaattaggaagaatgaaaatataggaatatgaatgggaatgagaataaaaataagaatagaataaaatttaaaatacataaaaaattattaaatattttctcagcatgcattggaatagtctttctttctattttaaaatagaatagtcattttactgggatgacattccaatactttaatatgcaactataatggaatgaaaattgtttcttttccattccattccatttcattacttccaaccaaacgtcaccttaattccggacagccatgggcaaatcgaatcaaacctgccttttagttccagtatttaattctaactaggacattaaagagggaaaccaaggctcaacttcaaatctaaggattatcagtagctcaaagaaacaacctaatgctaaaaaatgaagggcaaactgatattacctcattga

SEQ ID NO: 98576 - DNA, 518 bp, Cannabis sativa
ttttctattccacattactcttaaaaatgaagagggccaacataactatggcagcctccctcttcttgtttttggaggctaattatgaaatttattagacttatttaacacatggtaggccagccacacatacaattataaatagtcattcatgagttattatctttctccacaactgtatttatagctttctgatatagagtcttatgacttcaaaaaaacaataaaatcttcaccaaaatatttagctaaacgaactaaatgcatttctataaagaactaaaatctaataactcacaccgacatacctgaaacttttcagctgctttagggtctccatgatttttatcagggtgtactatccttgcctggaaagaagacatagatagagatattaatcactaagctcaatgtataaattggaaaacagtacactaaaatttagagaaagacttgaagactttatcctaagtgagctttaaatacagactcaatttgcaaaaggcctaatgaacttg

SEQ ID NO: 98577 - DNA, 866 bp, Cannabis sativa
tatatatatattgcatctattattgctaaaaactaacttcaggttagttacattaaaaaagaataaaaattaaacttggggtattattttataccatttttaaaacacatgttctaatttattatttaaaaaaaaatagaaatccattcagttttataaaataaattgatcaaaatagtatttactcttaattttactacaaacctattgagaccaaatttaaaaacttttaaaaaaatcactattatcaactagactatatataaaagaaaaattttgacatataaaaaaattaattatgaataattagtatttttctctattaaagttttcacaccaccatgattgtgctccttaaaatattctaacttgataaaaaaaaattcaaaatatattaattatataattatactcctactataaattacatttattttattattaataattaatatttttaggttatgaattttgaccaacaataaattttatccttttttattgaagaattaattttaaaaattataatttgtattaattcttacaattatattaaaaatctgataaatttattaaattaataaaaataataaataaaagtaaagttagaaaagttaaatttacttaaacaaacctaaattattcctaaaaaataacatattcaagttttattatatttacacatacatataaaaatcaaacaaaaattattaaaatctagtaaaaagcttaatcattttcgtcaacaaagaaaaaaatagattcaagttctatagttaaacactcatatatcttaaacataaagaaatattattaaaaatccaataaaaagtgtaaaattatattaaaaaaatttaaaaaaatta

SEQ ID NO: 98578 - DNA, 1616 bp, Cannabis sativa
tttttagaatatgccaaataaaaagttcttttttatttgccaaataaaaaaaaaactaatcttaagatttgttttcatcttatgctccctttttctttaatatttgattaataaaattaaatatatatatacacaatatacattatttttttttagaaaagtattaaaacaaaaatgaaagaaaaaagaaaatatttaaaattaacataaaaaataaattaaggaagttaaaagtataaaagttaacaaaactatcactatttaataataggacttaaaattcttacaaaaataaataaataaataaactaataggacttaaaattacaaacaaataaaaattcaggggccaatttaccaaaaataatatcagggatgaacttgtcaaagcttacctatttggagactaatttgcaaaaaaaagaagtttgggagccaacttatatatatttatatagttcagggacttactttacaaataaatagaattatatttattctatttttttctttataaagttaaagtcaataaatccactaacgtagtagtccatcgtaaatgggacaaaatccagaaatggcagaaggaaagaattaggtcgatgtgaactcttattaattcttaatcgtatacaacttactagttagaactactaacaattacttcttcttttttttttttttttgggtagaacttgaaatagaactaactaactaccttgtgtttactccttttagttttaaatttatttgcaactaaagacaactatagaaactatagaaaagacctggtgatactctcagagatggttggcttccacgctgtgccagctttgttcttctagcaagagcttttttcagggaccaaaaagaaaagaaaaaaaaaagcatgtggggtcttaaattatatatcaaaaccatttgaaaagggaaagagagactatcatcattaataaccaaaaaaagagagagaaggcattgaaagtgagaattatgataaaatccagcacttgctagacaaatgggtcatccttgttactaaaatcatcattaattattttcttgctttggagaaaaaaaaaaaaccaagttcacattaagaaggaaaatttgtgatagtctcttaagtgacaacatcatgcatgtcaaagctaagcctctcaaaacataaaacattctattagtactaaaaagcagcaatccccaacttcattagaaaaaaaaactaattaaatgtcaattgattaaacaattctgtatatattattatatagtatttataaaaatgcaatgagaagttcttttcttggtgctgttttggctggttggtactaatgatggaagaaaagtcatttattatactattctttgttctcttctattttcgtagctgaatgtactccaatctttatcctctagaattttataaacgagactttatagctcttctatttcttggtttatttatctttacacccccacagccaactccatatattattattattattatcattattttttttttattttctgttatcaactttagaaagaaaggaaaccacactctcacatccaaagagtccaaaagaaagaaaaagagaaagagagagaga

SEQ ID NO: 98579 - DNA, 588 bp, Cannabis sativa
taataaaatttcaagagttttgtaggaatcatatctttgtgtgtgacaaattatgttcatattcactggatgttgtttttgttggttcaattttttttggctatctttcatgcatttttggtttatttattgatcataattttatagggggagattgtaagaatcatgtttttatgtttgtcaaagtatgagttttctgctatctcaacaatcagtagttccatctgagtatgtctgttactggtttatgagttagctttgataaatcaacattttcatgttatgtcaatgagttgttagtgcgttgtcaaagtcgattttgtatgagttaatgctatatatagttgattcttgaatactctaaccaactctcacttatttaattctttgatagagatttttctctgctaggaaagaaatctatttcttcttcttcttctttgttttttgtaggtttctccattattgaagagttcaagcttatatgatgatgataatgggggttgtttcacttgaagagagttcagattcttaactgaaaagatctcagctcaattgaagcaagggatcttgtcttcgaatctaaga

SEQ ID NO: 98580 - DNA, 508 bp, Cannabis sativa
ttagtgatataaaaacaaatttctccatgtcttcataaacataaggtaataaaatctgcaggggtcatatgcatgcaaatacatagactccttcccttctcttttggatgaatggggtggtttagaaggtgctttccgatcttgacatcttaaagtaaaaaaaaatataatcaagtttacttctacactaaattttcatatatatgtatatatatacctttggtccgagaaatttgaatttttatgcttaattagttacttaattaaggaaaacatcaaaaaaatacttctttttacactatatcaaaaatatgtttatataaaaaatatttaagtcaaagtcaacttttttttttatcacttttcttgtcgaaaagctttttctttattaatttttttttcaactgatgaattaatcccaatcccaacccatataatgtaaaaatgaaaaaaaaaatctaattaaatagaaaacttaattataaaaactcaattttttttaatatta

SEQ ID NO: 98581 - DNA, 524 bp, Cannabis sativa
ctccgatgtctttaggaatctctttttcagaatggagagacacggatttatcagaagaatcaatagagggatcctccatgggttcttcttctttagagcttgaagaaaccgaagggagattcatcttaagcttcttggttggagtagctggtttgtcatggctttgtttcgagcaaagttccttctcgatagatgcttactgggcacgagtgcgagtggaaggacctgttggagttgatgcagcaactcccttctctgttgcagtaggaggtgatacagtagcaggtggaagagatccttttgaagatgaagacgatgaggtccaccatttgtagggtcgcacagattttcgaaccagttgtttaggaattctcttcggcttgggcttcacgggctgagattcacgttgaggaagcgatgaatctcctagattcgacgcagttgcagcaacaggcagcacagttggaggagcagaaggtgcattcgagggggcttgttcggattccaccattgttcttggatgc

SEQ ID NO: 98582 - DNA, 714 bp, Cannabis sativa
aacaataattaaaactcacaacatatgagaacataaaattttaatatagtcaagaattaaacccaatctatttttccactcgaacaatgtatatatggctctagatttaagatttattttatatgatggtgtttattatagttgttggttattgtatgttaaattttttttaaaatttagtatatcgaaaacaaaaattcataattttataatacctttaatcaactaaatacacgcgttgcggtgttcccgaacgaatccaactacttaaaattagctcaagtgcctataaatggtattgtgtgtgtgtcgaatctcaactaaataactcaaaaaatgtaatgttaaagcatttttaaagaaagaaaaaaagaataattaaagtaatttgcggtataaatacttaagttttaactctcagttgtaaataaatacttaagtttaatttttaatggtaataatatctaagttataattctgaaatttctgtaggtacttagctcttaagtgttaagtaaattaccacatgacaattcatgattggtccaaatcattattttttttttttttaaaaaaaaacttagtttaaatataccaataaaaaatgacatgtggataataacaatatttaatggtcaaatacttacagagtttcaaaaatataatttaagtattattaccacaaaaaattaaacttaagtatttatttaccac

SEQ ID NO: 98583 - DNA, 688 bp, Cannabis sativa
attactttgtgtcaaaaaaaaaaaaaagtgctctggagattatctttaagtttggagttattttgagaaagaaatgagatttggtgtgtttctgtatcaaaaaatggcagaccgttttaccgtttttgctggcagtgacctagaaaaatggtttatatcaaaccacacaggtactctgccctacatcaaaatttgttcctatttcactataacataattgatactcacttctcagatttcatatcaaaatcataaacagttaattgatgattagagaattaaaaaaaataaatacgaatgaaatagaacacatagaaaattggaaagaatcaaatcatattaaaaccataaatagatgtcaaacaatattcatcaataccctaataactatctagctactcatagttattgtgaacaattgataacaactaattaagaacattaaaataaagtaaaagaaagaactcgtggaaaacaataatgttgaaagtctccagagccgccttctgcctcaaatttttgtactcacaaagttgtcttaattaagagtttttgagttttttgagctctgaaaaatccctaaaaacattaataataatgtgtttatataggctaacaaagctacataaaagatactaaaaagatttaaaatttaaacttaaaaaaaataaaaatcgcaactctactt

SEQ ID NO: 98584 - DNA, 1833 bp, Cannabis sativa
tgaaggtaaaaattaaaacaaataaagtaaagtgggtatacaatacaattttctcacttttatctctctctaacttaaatttaattatttttttatttctctctgagcttggcttttttttttatgaagagctgcaagaataaacaatacaaacaacagcaaggagaaaaggaacactgaatgttccccttagttgtccctcctttgcctgagcgcttcctttgtagagttatgggcttcggtattgaattgtcgtgatagatggtgcaaggaggctgcagggaagttggaaaaggactgtctgatctttgaaacaagacttaagagagcagagttgtcctgccactggccattaactttcgtgacgaggttaagacaatcggttatgatgaaattaggctgcatctggagggaaaggcaccaagaaagaccttccaataaagcttgaccttcagcaaatatagaagtaggagcacttgatttttggatggatgcagaagctaaaacttggttagagcctctctttatgacaaaacccaaacctgtgacacaattagtatgttccagtgctgcatccacaaataaactgatactgtcatttgaaataatgtgtagtgaactaggcttggaattggagggctgttgacttgtgtcagccgaaggtgtatctgctccattgatcctttgagcctcctgatattcctgcaaataattcataacaaactcttccacattttcaatactataagactttttaaacagtgctgtattttgagtgttccaaatatgccaaagtatactaatgagcaggagaagttcatctttagtcaaagtggcaaggccttggagataatagtcttgaatgtcctggcctctattagttgtaaagaaatctttgaactttgaatgcttccaaacagtacgggctctgttgcaatcaataagtgcatgggttacagtttccattctgcctccacagaagtgacaaaaggggtctttgaggactttcttatgaaacaggttaagtgcacaggggagaatgtgatggaaagctttccaagtaaaatgtttgatttttggtgggatgggaaggttccataaagttgtccaccaatgcttaaagacgttgggatcagatgaggatggggaattgacattgatagaggaggaagcaaggtgatatgtagagttaaccataacgatgccagattggtgatgtccccaaatgaggttatcttggggattcggataaagaggaatttggaggacagcctttgcttggtaatttgcgagataatgcaaaagtttttccatattccaggtgttatttgggttgatgaagaaagacactatagattgggaagggtcaaggggatgaagaaaagttgggtgagatatgttgggaattcagttagaagcagaaataggaatgttattgccactaccgattttccaaacaagaccttttttaaggagttctcgtccccaaaggaggcttctccaggtgaaagagatgttatacccattgggagcagacaaaaaatccgagtttttgaaatatctggctttaagaattgagtgaagacgagaatcttgattagaccaaattctccaagcttgcttggcgagaagcgcttgattgtgatggacaagatatataaagccaagacctccaaaaaattttgaagtggagatggcagaccatttcttccagtgaatttttctttcattagaagtcgagccccaccagaatttagatattaaccgttgaatagcctggaaaatggatttagggatcttaatgttggaaattatgttaccaggatcttagat

SEQ ID NO: 98585 - DNA, 930 bp, Cannabis sativa
ataattagagtaaaatttatatgttgaattgacgtgataccatactaaaaatatatatataagatagttcacatgttatacatgcatatgttattattttatatgttacattaatatatgaccaatgtgttgactatttataattaaagagtcacatgtacgtgtttattaatatatatatatgaataaaatttgatggtggctaacgacactgacaggtactatacgacgttcacggtggttttactgatcactcagactgtggtcgtttacatccaagacaaccttagttgggtaataggttttgggattccgacagttttcatggccggctccatagtatttttcttcgttggggctcctctttacaatcacgtgaaaccagaaggcagcatattttccggtattgctcaggttttcgttgctgctttcaagaagcgtcgcctaatgattccggcacccactgataatgttgacggagatggctccctcttattttatgatcctccactcaatggaaatgtcttgtcaaaactccctcgaaccaatcagtttaggtaagtacatatatatatatataaattaataaaagttatatagcttatagcctaaccacaattttacgatattatatcaaataagtttgaataataagttcagttataaaagcaacattttttcaactcatcctaatcagtatatgtaagtatgggtatggaatgaggacaaattaatgggcatagctttcttggtttgaaaggcaagaccccaagttaccgggcattatagttattgtttgacgtgatacagttcgaatatcatattataaaatttggtataagatttttatagctctttagaaataattatttatattttataataattattaaattatattgtgcagtgcagtgaaacccatatttataa

SEQ ID NO: 98586 - DNA, 866 bp, Cannabis sativa
ttacggatcacaggattactgactgtcacaattcttgattcatctaataatatccagcataaaatgaaattctatttactataaaaattcccttggtggataattattaagataaaatgtttacccaaaaactgactctggtgagtatttgacacgtggcaagaaagaatacatactagagttgagtagtcctgagcagtcgaccagggaggagtccctagccctgagcccaggttgactctcagaactcttgaatgggtatttggatctcaccaagttatttttaactcaccatctttcaattttctgaataaagaagacaagaagaatcaagtccaaggccttgaaactgaaaaaagatgaaacgacacccaagaaatcaacccgagcccccaaattgacctccgtactagggtttcagttcaaaaaataaaattacgaaaaataaatttttgaaagcaaatgttttatatttcaaaaataatagcttttttgtcaatattgtttttacactgtctttcacatcatttttttcttcactattttctcacatcatttttccttcctcatcactttctctctccttatttctcttctcactcattgtctcatatcaatttttccactcggagtccaagatttgggtccgcgtctgcatcgaggtcaaggtcgagggaggggccgaatctgggtctggcatctgccttggtctagggttgattcaaattttggataaagatatgaaatattgaagtgttttttttcttaaaattttttgaaaaacattaaacaaacacctcttccattttgaaaactataataattgtattttattctcgattctgaaagcacaattttgaaaataa

SEQ ID NO: 98587 - DNA, 3298 bp, Cannabis sativa
tattccctctgtgtggtgcgataaccagagcacagttcttcttgctgctaatcatgttcttcatgctcgtctaaagcacatagaggttgatctatactttgttcgagataaagttctacaacagcatattcatgtcaaacatgttccagctactgctcaaattcttgactgcctaactaagtcaatctcgagcaccaagttttcagagcttagaaccaaactgtgtgttgtttctaaaaccacactcagttggaaaggggctatcaagggagtagattagttacaacagttagttagttaacactgttaactaacctacactttgttttctgttagagttagttgagttattgttgattgttcgttgtatatatatacctctttctaactcaacttgattaatcaataataacagaacactctattctttcttgtctttctcttcttgaaacatcacaggagaataactccataaaatgcatgaaattaagatgtaacattatagatgaacacttttgttagcgagctagttgaaataatactgtatggcagtcctcgtttgattatattttatgtatgaatatatatatatatatatacaaagttaaaatgctgatctcaatctgctagttttctttttcattcttcttcttttataaggaaatacgctttggaaagtggttatcaatttagtatatatttacattataggttgtccctttttcttatcttttcaattacaccaaattattggttgacaaatcatatacatcttctagtggaccatccttttggcgtggtcagtaatccagaactctaactaataataactatggggtgtttggtaggcagcatggaggtttgggttcgtaaaaatgggtgtgtaaaatcaaatataggttcgatatacattttatagactatgattaagtgagacccccattttttaatttatttttgaggtaatctcaatcgttttgaatacttcaatttgagattgtcataatttcaaatcctctcaactaaaactcaagtaatattcttacaccaaatactttattataattgtataatagacgtgtaagattaatccatcatccatcaaatacattatctgtgaaaaaaatccaaaaagtaaaacaaaatgaagaatcaagttaggttgtgctgagtagtcgcctagaaccatcttcttcttctcatatatttttttttccaaaatcctacgtgtcccactagttacagtattttatataattttatgatcatggattgaaaaaaataaatcaaaaaagaaaaaaggaaaagtaataagaggtaatctagttgtagtggggaccttttttataggtttggtgaaaccgaagatgatcatcttaggcactgacatctgacaccgtatcattatggaattagctctgaaatcaagatcaggtgctttggttcgaatgatcttcaatttttggccttggtggtacaatctctcagatcacaaagtagccatgtgggtacactacaccttttatgtaactggggtcacttattaaaacgtgtcactcccttttatattattgaagagccaaattttttatattgaattcataaatgggaccccattgaatctttataaccatcttctttttgtacttctttttttttttttcttgtttctcctttccctattaaactgcgattgaacagttgtacagtctcgttgtgtcgcaatttgtaattagaagcacttatctttacagcaaatattaattgacgcatcttttatatgtgtacatatatatcaaaatataaattgatagtgttagtttttttgaaatgaaaattggtaaagattaagaaaaagatattgtttaggcttgtagttgatagaaattacttgatataattatcatggcccattggccctgttatattagctagtgcaccatcgaatgtagaagtgattagtggcaacaaacgtgtacaaatgtgatcgtctctttttcatgtcacatactaataagagtggaatgggtccatatataataatagaataacaatagacttttaattaagacgttagtggacacaaaatgttaacacatttagtcatcaatatgtcatagctaactagataggaacccaatataatataatgtatacagtacatattaatgttccataccataaattttcactcattttatctttttgcaataaggtgaattccccaaaatccgaattagaacaattttcttttttcttttcgttacaacaacaacaaaattattaaaggtaacaaaaagtactaaaaaagttagatccactccacatctttatccacataaaagaaagaaagttcgatacgaattccgattagattgatcattaacaagataaaattgagaaagaaaagttcattcacgaacaattgatgatcaaataaaacaagtccccccaatataagaactttttttctttaataattgggtacaaaatttctcttcttctattttgaatctcgatcttattatcccatgatcccttaacatctacaatttgttttttttcttcttttttttttaccataaagctagaacagccaacaatccactaccaatcaaaactggtaaccttgccttaattaaactaatactcttaccagcatcattggtgtagtccggatcgattggataaagctctcctggaggaccagttatgtacagcaacgaagccggcggtggaggacagtatggggttgccggagagggcggcttctttggcgacggtggtggtgatggaggaggaggggacggtggaggtggcggcgggtattgagtgcagggcgtgcacttttcatcccctgctggaacagtagttggggtttcatcaagcttccgtgattccaatccattgatcatatgaagagctgaaacagctgatattactagcataattttaatgagacgatccatttttttgatgggtttttgggcaaaggacttttggttttggttttgcttttttcaaagtgaggactttttttttctgttttgtggggtgagagctatatagctttgaatataatgaaagaaaactatggaaagtgtttatattgatgagtgcggttcttctacgttatttaggtgcatgggaactgtaaatgactaaaaagggtttgtgggttcgggtgattttaggcagcttgatgagttgtaatggaaaaatatttttgagtgaaagagtaaggagacgtattcttatggtcttttgtgtggtagtataggtaaagtagtacttgtgt

SEQ ID NO: 98588 - DNA, 1106 bp, Cannabis sativa
  modified_base (806)..(808): a, c, t, g, unknown or other
ctttggctttcacccaaactaaagcacttggttgcagcctagcctatcttctaaattattttctaccattcattcttctctcagtccgtacgatgacacgtgtttctcctattatccattttaattttcaattatgaaaagtgtcaatcaatacattcatgtttctttaaaataccaaaatcaatacattcatgtttctttgaaaataccaaccatattttatgcaaattcaacttattttaaggtaattcatatccatttttaggctaagttccatcacttatctcattttgatcatgatagaccatcttcacttggaaaaatataaatgtggacaagtctatattacatctctcttaagaaacattttagtctaatgtttttttataattatgtattttatatttattgtaacaggatataatattgtattaaaacatttgacataaattttaacaggagttgaatttgacataagatttaatatactatagaagaataaatttaaaaaaaaatatatattaaaatataacattattataccactatattaacactattaaaaataatcttaaattctactaaaatctaagtaatacaattttgtaatctttacactaataaattatggtggaataaactcggaataagtaaggacaccatgatttatcacttttgtctatttaagtattatattattactaagagaaatgctaaagggcaccagcggtgcttagtacccttttatgtgtcaatatcgctattggttcaactaagtatcgagtcccacataatttaatataatnnnttttaaggagtatcgctagttaatcgccgcaacacgacatgatgtcgagaatgtgctaggcaccactggtacctaataacaatgctctattactaattataagatatttaggcttaaaaaatgggcatggtataacaaataataccacacaactcatttaattatacaacgacatgacattaaaaaaaattacatatagtgacaatcttttagtcataactttaatttttgtgactaaatgtgactttgagtcacaacaaaaaattacatatgactaaaatatttgtattttttttaa

SEQ ID NO: 98589 - DNA, 670 bp, Cannabis sativa
atttttggcacaaaaatccaaaaaggggcattttcatcatcacttcacaccttgattctaaaatgtattaaatgctaagatacgtttggattgttggactccccgatcgttggatggaaagtgtgtctttagagaaaaaattgtggccgttaccactttacatcttctcacgtggattgcctttttgccttaaatacccctagtgacttccagttaccacttttacttctttttcaaatttttagtccttcaaagcgcataagtctccctacaatctccaaaacttcaaatcgtcttcaaagaaaatccttctttattgacctaaaaaatactatggacttttgtcttcgtctactgctaaggattagggtatgagaatccccacatcttccttctttggtgatcaagacagttacaacataggaaatcatgaacctggatttcgaagcaaaaatcaattcactgatcgctcttgcatctctgcttcatgattggtacgatcaacttccccacgtttccagtgatgaccagctcaacgtctccactttcaatattaggtatgtgtctctttactcgtcgtttgtatttttaaaatttatttgtaatatcccagaaaatatagtgatattttaattatacatattttattaaatatgtgattaagtggata

SEQ ID NO: 98590 - DNA, 940 bp, Cannabis sativa
ggcttgaagcgggggcgttacacagggtcaacgcaagtttttgagagatttttttggggggcttttttacaactaaggaagaagactttgatcatgtaatagtcatagatgatgatcaagtaaagtatttataggagaaatcaacaaataaatgggagaaaatgtagaggaaaaattataatttaaaaacaacaacaacaacaaaaattgtataaatttgatttaagtaaccaccaaaaaccgcccttaacacaagaactggatgtgtttttttttttaaagaaaaagaacacaagaagaagacgattaaaaattaaatggggtaatgggtaaaaatcaccaaaatgtggtgtgaaagagtgagtaattaagatgaactaatgatctgtttcaaagaaaaaaaattgaaatgatgatcacattggattaaaagaaaaaaaaaaggactgtcacaatgtgatcagtcatgagttcaagggttaggtggtgtattatacatgttcgggccatattagaccacgcgagttgggtctaccagttgatgtattttgtattctcggttttcatcacttaggtcggcgtgtaaaaatagtttgtaatatttcttgaaaatttttatgggatcccgaaacatgtctaatcttttagaatggtttgtatattaaatagttacaagttatattttcactctgtacttgatttagagtttaaatttctgctcttatttctaggactgttcaaaaaaattaacaaactacccaacccgaataaaccactcaaaccaaaccaaataacccaacaaaaaatataacctgaataactttaaaaaaaattcaaaccgcccaatgaatatattgggcgggttaaatattattctaacccgcccaaataacccgaataaactgatttacatatgttttactaaaattatttataatat

SEQ ID NO: 98591 - DNA, 718 bp, Cannabis sativa
gagtttgattttagcttttacgaaccaaattgttgcttttaattggtttgattatgatgtaattttgaattctctatttatcatgttatttagagtgcatgttattagaattgaatcgtctcgtcatctctaggattaatgtattagaatgttataaatttaattaagtgaatacctggttcgcacgaacatttagtcaactttccacgaacattgacacttttgagttgaggttcttttttccttaaatgtttgacgacggttgtatgaatacgatgatgctttttgtagtcagtttccttagtgagagagacagatttgattgttgttactcctaatttctctaaaatagtgttctttgcctcctccatcttcaacttcaaatattttttgactctataggaaatactaaacataataaagcaaataaaagcatcacatacagaattttaatagagagacaaataaataaaaacaagtagttgttaattaatttcttaccgcatcctgtcaatgatacctccttcaattctttctaattgaagcattccagtcttgtcttcgtaaaacctcaagtccttataagagaagaagtgggcatgtgaatctagacaaaggacttctaattctcccgcgtaaaagtaaaacttcagaccataatattctatatcattataggatacttccacatacgaaccagctttgatttcatcacata

SEQ ID NO: 98592 - DNA, 579 bp, Cannabis sativa
attcacaaataataataaaataatgaaaattagtgctaattgcctttactaatccaaattactaaagcggtcattacaaaactacattcaaccagtgcgaatggatgatggtaatggggagaggaatcctaatagcattgccaatttgttcattgaaagattcaacaacacttacatagacaaaaaaacggctgctctccctgcactaagatgcctagaggaatgttgtatttcagtccaagacaatgaacacctgaaagctttcccaacgaaaaaggaaattgagatgtgtgttcaatctatgggacaggaaagagctcctgcacctgatggaatgtccacgggtttccatctacagcattgggccacagtcaaaagagatgtattcgatatggtcactcacttctttagaaattttgaactgctacagtgtattaataacactagcattgtgttaataccgaagaaggagtgcccaagtggtgttaatgattataggtcgattactctatgtaatgtcgcctataaatgcatctaaaaaatcttagcgcttctattgagaatcctactgccttgtat

SEQ ID NO: 98593 - DNA, 613 bp, Cannabis sativa
gttcggactgaggaggtggtggagaagcgggcggagctactgatcgattttttgttctataggaccgcgatgttgacgctaacgacgacaaaattggtctcggcggcggaggcggaggcggaggaactgagtgaattctcttgcttttaattccctttcggaacagattatggaaaacggagtacggcggtggagaggtggaggtggtggcggaggcggggaaggcggcggtacttttgtgtgatgagactgtagctgttcagttggagaagactgagtggcaaaatcgtaattattgttcgcaattctcagcttcttcttcctctttctctgattatacagcgaagttatagccatggttatttctcttttcacattgctcttttttctttctagtttcttctgattcagctgaattctcgccggtgacggcgaaggtctgggaggaggaggtagcggcgtaggtggtggagatcgagttttagtgaattctatatcagcgtcaccattttcgtctcgcttctccaccttctctctccgctcaactgatcgatacgttcttctcgatttcagatgattctttggtgctgcaggcggaggcggcggaggagga

SEQ ID NO: 98594 - DNA, 3313 bp, Cannabis sativa
tttgaatctatgattattgctattaatgattaatgattattgctattgttctttgtacatttttcgaagtgcagcctaattaatgagttgattcttgcatcttcagattacagagaacataaaatttgtgaatgatgttaagagtttgattctgcaattgggatgtgtcagtggtgctcttttgtctgataactatttggtgaagaattctgctgagaaaatgggaatttctggtcatgccggactgttgtcgcatacaggtccgtcaggaatacacaagatggtaaactcttctggctatctggctgactgcaccagtcaacagagatactctttcaatgtttcaaaccttattggtcaatcacctgcatctcttcagaaagaagttgggaataatcatgaaaaaactgctctaagatatgaaactgctacagcaaatcagttgcctacttcccaaggtaacccttgtcaacccaacttttctccggtgataaaatcaaattcttctttcacggatcatttgaagggtagagtcgcaggtgctgaagtgatctcttcaaattcctgtgagcggtccaatcatcaggtttcctcatacaaaggaaggtctgtactcaataatcaatgtgggtttagccaatctagaaataagatcctacctggtgttagcatccacaatcaatttgatgacaataaacttgtgtcgaatagcaccagtacatctcatctgggaacaagtggaagcctacttattgatcacaacctaaattctgtaaatattccattgtctgatgaaagccaaataaatggtagaataaataattcttctgggtcagtatctggtacttgttcttacccaaacgtgaaggtaacagcagacgtcaaccattctatcacttgtcagtctttgattgagcttcaaaaggctgaaacattaaaaacagaggaggtttcttcttctgtgccagatcaattagttattggtcacaagtctaaaggctttgagagtgggcaactttccaaagatgtgaagattactggaaatagtttggctcgaaatgaacaaaagatggatatggattatgaactcttacaagcccttagaatcccatatttcaatgcaaatgagcatcccttttctagtgaccatttccctgattttgttcatgactgccagaatctaaatattaataatcagtctgcaggttctgggaatgccaaacttgaagaacaatatactcaaccttcatcaggagatgacttgtttgatattttgggtatggatttaaaaaacaagctacttaatggccatgggttggacaaagttatggaagatattcatcagtccacttcaacatttacaggctcaaaggatttgggttctagtttatttttggcaaaagatggactatcagacagtggtttatattctggttcgggtactgaccatcttcttgatgctgtggtatctagggcacagtcttctgccaagcaaatatcagaagataatttttcttgcaaaacatctttgacaaagatcagtagctcttcagtacctagtagttcactttcctatgggcgtggaaacttgtctaatcatatgccaggagaaaaatttcagcttcctgagcctctgaataaaccagggatggtaaaaacaagttcttttaaatctgggtgtagcagggatgacacaggaaactgttcccagacttctggttatggatcacaaatcagttcctgggttgaacaaggcagttctatgaaacatgatagtagcgtttcaactgcctattctaagaggcctgatgaaattggaaaatccagccgcaaaaggcttaagcctggagagaaccctagacccagacccaaagatcgccagatgatccaagatcgtgtgaaagagttgcgagagattgtaccaaatggggcaaaagtaaattttattttcttttactctactttattcatctttattataatttattttgagtgtgctaattttttcatttcgatcaattatgtgattttgcagtgtagcatagatgcattgcttgaacgcactatcaagcatatgctcttcctgcaaagtgtcacaaaacatgctgacaagctaaagcaaactggggagtctaaggttagcactatatatatatttatacttgttttcccttctaatgctgtgcttattttactggggtactttctttatttgtgggagcatgcttgtacttgttgtttattgggcttttgggaagagtggcaactaataagctgtttgctcaatcatctttgatgcctaatgaaattgagaaatagctttgcttgagcagactaggttcatcagacaaaataacaaaaatatgaatattgttagcagaaaaatatcatgctccttctacacatatctgaaagttgaaacattctgcaaatatgtaaatgttgacctggttgtgcagattattaacaaggagggaggattggttctaaaagacaactttgaaggaggagcaacatgggcttttgaagttggctcacaatctatggtctgcccaatcatagtcgaggatctaaatccccctcgtcagatgcttgtagaggtggtgatttttttatttggtttaatattaaaattgtatcttgtatcttcattttttcttaaatctttttaccgtgtcgtgtcctggcagatgctttgtgaagagcgaggtttctttctagaaatagctgatttaatcagagggatgggtttgaccatcttgaaaggggtaatggaagcacgcaatgataaaatatgggctcgatttgcaatagaggtaaaatttcccagttgatgaagatctttaaatgccatctttgcgatgctggtcacttacagaatattgtaatgcaggcaaatcgagatgttacaaggatggaaatatttatgtcgttggttcagcttttggagcaaaccataaaaggtggtggtgtatcatcaactaatgccattgaaaacaacggtttgatggtgcatgaatccattccccaagctacccctgtagttgtgactggtaggtctggtagtttgcaataaaccaaccacctgtgctgttttgtagtttcttggtctggatatgttgagagcaagagcagttttttgcttgccatgactagcataagttccagcccgaggtttttcaggttctaacttcaactaactttgtctccccacaaaccaattcatgactgatctcacttcaagcgtgtggagatttgttaaattagcgacgaagaaaagctccccgaaaatttcacatcatgtttcatgttc

SEQ ID NO: 98595 - DNA, 706 bp, Cannabis sativa
taaatatattatgtttgttagtgagcagttaatatttgatttaataatgaggtattacttcatatggtttaatgtaattactttagttgttactatttgatgtaagggtgtattactataatctgatttaatgttatttttttagtagttactatttgatgtaaaaactgggtattaatactcatttttattgtcttaaatatgactcttgaagaattatcaaaaaataaatatgactcttgatgtgaaaattttgtaatagccaatgcaaatattattcatttttccttaactcatataaagtttgatgtattattatactttttctcatctttagggatcctacttcctacaaattcattactaattattttactaagaatttcttttcttaatatcatattaagtaattaatacggattattttttttcctaccattcaaacattctaaactcaagcatgtattgctatattatttttgttttgttaccaaccaagtattctagattaatagctgaccaaaaaaaaaacatacccttctcttcaaaactaaaaaattgttcaaatgcaatatcatattgaaacattatcattaaggaaccaagatccttaattatatagtctatttacattttttattctgttgaataacaataaattagaataaaatcaaaactaatatacattttctttaaatttcttata

SEQ ID NO: 98596 - DNA, 545 bp, Cannabis sativa
gaggcttcagacgaactaccatggtctgacgttggggacaagatcaaattcggtgttagaagatatgtaaatgttgccttgagctttgcataagaaacaaccaaatatgttccagaatcattaggtcacatatctttcccaaatcgcactaacctaacacccttctgggatcgtcatgacttcagaggactctgatctttcttagtagcggatgcgtagtgggagtcctagaatcctttgcgcccttgccgatacggagaaccttcgacttagtcctagaatataacttcttctgttaagttaataagctgaagatgaatattaattgtaaataacttgatgtggcacctttctgtgattgctacataagagacatttgagaatccggataacatttacccctaaagtttcaggactcacaagtgttgggagcttgcagcttccttccggatgcttaattcactatcctcacatgccagtcatgtgctgaaatgtgggagaagtcttctgtattacctcagataactgatgggttgatatgttat

SEQ ID NO: 98597 - DNA, 1066 bp, Cannabis sativa
  modified_base (1011)..(1017): a, c, t, g, unknown or other
gcctgctgagataagactttgtgtctcatgggtactcctccaaataaagctaggattgttactgatcgcaactgaaagaaaagtcccatgtggatagtatcgactcttgtaaacccgactaacaaaagaagtctcgttaaagagtagacgccaagcctgtttgcccaaaagtgacagattataatcgtgcaaattctgaaaaccaatgccacccgagctcttatgtttacacaaacggttccaactcatccaacttattcccattgatttcttcgaattaccccaccaatatttggcaatgagtttctcaagttcgctgcaagtatcgagaaggataagaaaaacagacatcgcatagctcagaagagcttgtgccacagtttttagcaagatttctctacctgccttagatagaaatttgccttcccaactcaaaattcttttctccattttttcctccaagaaacctaagatggctttctttttttgaccaataatgcagggaagcccgagatacaagttgttctcagtagcagccttcattcccagtcgtacaaagtctctcacgcaaatcgaccgaaatattagcactaaagaacacagaagacttgtcaaaattgaccttctgtccagaagcaatctcaaaggtatgcagaagtcgaataacattatcaacttcacgttccgtagctcgacaatacacataactgtcatcaggaaacaacatgtgggaattaataggtgcaccattagcaactttacaatccctcagctcactaaggctttcaaactattttattagcgaagagagcccctcggcacaaagaagaaaaagatatggagacaatgggtcttcctgacgaatacctcttcctggcttaattgacctgatagatctaccaccatgtaccacattgtactcaacattcataatagtggccaacataagatccacccaacgagggtgaaaactgttgggttttgtaccctaaataaaatctatttcaatannnnnnnatttactaattaatataagatcaaaaatcgcttttacgttgcatggttc

SEQ ID NO: 98598 - DNA, 746 bp, Cannabis sativa
ttaaaaatttaagacaaaaaaaataggttccgtaaagcaactaagataaaaactcacacacaaaaactagttaaataaaataactcaaataaaaatattgattcaacatgctccaactcattaaataattatacccgtactatatctacccaaaaaatactcactcattatgttatataatcagttctattttagttataaccggtttgagttatttcgtgttatttatttttagaggaaatttgactaaatatgcttacataaccttaaaatttttcccctaaacttataattaccaatatttgtaatctaggccaactttaatgttatccccaaattaccctccccatttacatcacatcggaccaaaaataaataatacacaaaaagcaatcggatcgctcattggaacctgtcggacccctaatcagatcccccatcggacgtacgtctcctgcctcgcaaccttatagattcattgcatccatcggaccccatctcacctacatcggatgtgcatcggaccttgccctaaaatcacagatccgacattctaaatctaaatctatctctaaatctaacaaaatctatctttaacagtaaaatcacaaataaaatcaataaaaaaactaaaaacaaaacacgaactcacttttgacattgtgtctgatttgtccgaggaacctccgtgcaccatgggttatgggttggctctcactttggttatgctgttgggttttatgccc

SEQ ID NO: 98599 - DNA, 787 bp, Cannabis sativa
actaactatctaattctagttacttacttataactgacttgtttgttactaaagttactgatctctataaatagtagcagtcctattgattacattcaatctaagagagaaattctttgagactaagaaattttaggtgtactcagggtcgaccctaggcataagtgggctaggttcgcgcctagagcccatttattttaggagcccaaataaaaaaatacttcttaaaaaatatacatatcttttttaataatttttaaaaatatcatttatttttatagtaagggcccaaattttttttttgcttatgggtcatttcaacttagggtcgaccctaggggtacgcgggcatagaccaagttcagattgatcatagtgaatttcgatgattaggatatagaaccaaaatttggttccaaaccatgataaaaatcgagtgatatctttctatttttcggcatttttcattaccattctctacaattcattacaagttactactaatctttgttgttttgtttataatttcaagactttgtattgtaaaggggaaataaaatgaaaaaacaaacctgttaacaacaaagtagacagagtcaggtttagcttgaatagctgttttagtaaaaccaagcttgtctgctggccataattcatctccaaagaaactacttgtatataacacttggtcccctgtttttagccctgcttttgctgcatttccacctccttcaactgcctaataagtcatctaattgtaactatgtcatgacattaaagaaaaggg

SEQ ID NO: 98600 - DNA, 768 bp, Cannabis sativa
  modified_base (28)..(36): a, c, t, g, unknown or other
cataattaaacataaacaactgctaatnnnnnnnnnaactaagcgggctttacagtttttgtattatttacttatcttttctttagaaaaaagacaaatgaaaaataaaatcacaccaagtttgcgaggttcgatcaattaattgttggcagtgacaattgtctactctccgagagaacaaccttaggcttgaatctttatggattgagttcttggtgctataatggtgttatacactggaatataaaataaaaaactacaagactcacaaataggttcaagttctctactttattggtccatacaatatagaggagagggaattgaaattggtgatgaatgagatcaatcaatgcactatatatagaatttgtccaagatagatggagatggcccaattttcataaattttcttatagctgcctaagttcaagtcaagctagctcacttcttgaagggaatagaagtatattttaactaatttttactaactccacaaatccacctttagttgaaggtagtgttaccaaaattatttttaggctaattaggattttttctctccgaacattgacatgtaccaaatcatgccccctaaacttttttggccattaaaaattccccctgaactattgagattgttagatttcaggactttgtccaattttagtaagaaaattctaactaggatgaaagtttaggggcatgattcagcatatattaaagttcgagaggcatgatttggtagatatcaaagactggggagca

SEQ ID NO: 98601 - DNA, 618 bp, Cannabis sativa
acaagaaccacacaaagaatattaattatcagtgcttacaaatgtttactatagtggctgctcttatctgtgaacatacttccgcagttatagctagaatacagtgcaacacctgcaattaatcatttaatagaataaattctgaagaatcctcataatgttcatctcccaaagaaagtgattaatggtatattgagcctttaacatatatatcaaaattaaaagagttttgcaactgcaattgcaacccccaaattcataaattgttgtaaaaatgcaatataagatttatatgaatctttagggtgctaccaccaaattctcaaaaacatcttcagagtaccatagatgtattttggcaaatcaaaaaatatacaatttattatttgataaacgaaataattttagtccaatttaaacaaatattttcattattttagatgagaactgcttctagggtgggagactacttatggcgatgtggtgaaggcatacgtgctctccgttgttaacactgatgggtaatggttgtttttcaaccatgtgaaaatatggttgtatttttcaaccatgtgaaaaagttacaatggtaatttttgacttgaggcatatgcacat

SEQ ID NO: 98602 - DNA, 2647 bp, Cannabis sativa
aaaggattgtgtttttcacagttgttaggattgacaactgaataaacggtttaaattgttcttgctcgacccgaacacttgatttcttacttcatctattcctttaccttatttcaattattatgtactgcagatcttaagctggaaacctcgagctctttactttccaggatttgcaactgcggaacaatgccaaaagataattgagatggcgaaagttaatcttaagccttctaccttggctttgcgaaagggagaaactgatgaaagcacaaaaggaactaggacaaggtatctctctacattatatttctagtttcagctttcagtacaatgtgttttcttaacacagtttttgtttatctatgatttacacacgcacatgtttatattcatgttcactaattcgacatagcatgatttatattaaaattggtacttatggaatcaatatgacatctttttatactctttttcgtgtgaggccattttttcttggagtgctttcttggataagaaattaacacttaatttctaattgacaatagttcaggcacctttattagtgcatctgaagacaagacgggaattttgagtgttattgaagaaaagattgctagggttacaatgctaccaacaacacacggagaggtaggttctgttacgtatacccttctctctcattttgttgtagtcaaagttaccaggcatattggtttttggatggtttttattgacgacagaatcagaatgtgattatattcctagaatagtgattgtaagggatttgtactgaactgaagtaatgcatcacaaaatggtgataatcctttaatgacacaaatgcacatgatcatcttgcgcttgggacttgcaaaagtacctaggtgtttgaatttgcggaatatcaagtaactttacagttttctgatattgtggtttagttgagcacatgtagcttctttctacaatttacattcctgttgaaaaacgatgaattccacatttagtagaagtcatgtttttacctatagtttccaggagaaacttaaaagggttaatctttcatcacaggtcagttctttattaacctgagtaatgcggggatatcaccatgttgcaggctttcaatattttgcggtatgagattggccagaagtatgattctcactatgatgcattcaacccagcagaatatggcccacaaaagagccagagggtatgtgtagctaccttctcaatcatatcatgttatgactgcatcttttggcatttaagttgttaatacttagaagtatttcggtgttttgatttgttattttgttttctgttgcttttccacttgccctgaatttggctaccattgctatcttctgtgccttaataattctttataccatccttccttgcttgttgaaaggcttctcattaaagaaaacatgctcaaatgctctttttcctttacttgtatgatatgtagattctgatatttgctttctgagtttcctgattcagttttactgattttccttttaagttcaagcttatgaaaccattgttgcttgatcataattcactaaaattgcaggttgcttcctttttattatacttaaccgatgtagaagagggtggagagaccatgtttccttttgaggtaggtttcagaaaatttagttttatcatataaggattcaaatcattaatatacattgtaaccggccagcctacactttcggtttgcagaatggcttagatatcagttttgggtttgattacaaaaagtgcattggtttgaaagtgaagcctcggcgaggtgatggcttactattttattcagtgtttccaaatggcacaattgatcaggtgaatgtcctcctattgtgaatcaacctagtagtgcatttaattttcacctttcttagtaatatataggtaaagcttttgctcatatgcggtgtatctatacgatcattcaacctttaaactcaggtttgaagctgggttttcacaggtgatcagaagtttggaatagattcttgaatatagtaatggctatatatacattctcttggtaattatttttgtagtctatgacaaaacattagatctcaaaataattgattttcttacagttgtctctccatggaagctgtccagtaatcaagggggagaaatgggttgcaaccaaatggattagagatgaagaggatgactaattttatttttgacctcgattcaattccatctattgtaatatcctcaattttgaaattttggaatgtcttccagtgtggaacaagtggttattctcacatttagactctgatgaataaatttgatccactgttcttccaaatgtatgattaaattagagaatgcagagaaacctacatgtagtgattgtaatcaatcttaagaacaagatcaaagcaacataacagcaatcaaagacttagaacaacaaacaaaatgtttgtaatctaaactgtgatgagaacaaatcaaaatgtaaaatagaattgaattgcaatcgacattaataacaaatcaaacaagaaagattgttaatttgagattactcagaaaattcactctaatggatcaagatcagacaaacttcatttctttgtacaacccttaaatacac

SEQ ID NO: 98603 - DNA, 543 bp, Cannabis sativa
agaattacaaagttattttgaaaactatattgggtaaatttctaaaattatccatttacttttgtaggtgttttcttggtagcatggaatagaaagtatggtatattttttctaatattaattcaagttttgtctaattttttttatggacaactatttttttatgtcagttataattttaatattatagctcataaattaaaacaggtatgcctttaaaatagatgatgaatttttttaaatgaaaaatacttctttaatcaagtaatgttgttactctctttttatcctaaccttcatagttaccagtggcgggcccaggatttaagttgaggtggggcaatacttttattttataagtgaagggtgcatttttttttttctacattgcataacatgttaaaaattaaagtaaatttgtattttagtattaaatacagtagaaagtaaaaaaaaaaagtaacaataaaatacatttggttcaataattaagacattaaatataagtattattggtagaggttcaaaaagtaaaataaaaat

SEQ ID NO: 98604 - DNA, 534 bp, Cannabis sativa
tatggtttatgacatataatgtctaatggtacttatattcccaaacacatattataaacggtgtagaaattgttaaaactcaagagatatatgatgagaatgatgaaaaaatactttttaacaatgattgagctaaatatgcacacctatatgtgattttaaaagaaatgtatttaaaaatattcaacaagtatctaccgcttttgatatgcggatctccacatacgattagtgccgcgccaagcaaatcataaacctgtccgcagtggatccaaaagtatcgatctctctcggccctctcttcctcttcaatgcaccgtcgctgactcaaacgaacgacggcttttctttaacagaaaagaagggtttccctaccaaagcttaaaccccaacctcaaacccattttcaccgccgagtctttcttgtatcaactactaagatggggaggcaaaaaggagaaggagcaagaagcaaggctcgcccttcaagcagcaggtatttgtttatatatgtattcattctcaagaacacac

SEQ ID NO: 98605 - DNA, 508 bp, Cannabis sativa
tgaaactatatttttgtaaattttttgttgtttctgtgtatttgtgaaataatccctattttgtttgattgtatttcagctttaattcgtattcatatatttccattccttagcccaaacgcagcaaacttaccaccccttcttgaatcaaacagcccaaagttcaaagcctgcaagcccaaacgtagaaggctcctatgctatcaatcaatacgagtacgataaggatatcaattgggccatcgacctttatacaatggaccagcccagttatattttttgggacaatttcaacaaaaaaatacggttttttacggaatttttaatatttttacagctttttaaattttgtttacataaatgcagtcttttatgtatttttatgatgaatttttatttatatattattttttttatattattttaatgttgttttgatgttatcaatcaatacgagtagtgaaaattacatgaaatatgggatttcataacaaagttagaaaaatat

SEQ ID NO: 98606 - DNA, 550 bp, Cannabis sativa
cttggacaaaccaaatccgtggccttcttgagcttaaagtatcaaaggatagggtgtgtgtgcttggtagattttgttgtcatcattcttgttgatttttcacacccataggcattaaaattgtatttaataactctatagatccagcatgtgttgagaaggattttagggatcactttgtttctgtttgcattttttggtcagttgtgggtctttatttttgttctcgtgttaattccaatcattgtcattttatttgtgtggtaaataggagtccgggtcttggttatcttgtgtttgtcttatttcttagtttttaataactattgtactcagctgatttagtttaatgaaatttcaacaaattgtgtttctttccaagtgtcatttttcatatagctctagtgccatcaagatttcaaaaatctagtacaacactcttgcactaaacacattgatatacgatatcatttgactaattctcatgtgtctacaggtgctcaacttgttaacttgtttataaagacattagatgcccacactttttctc

SEQ ID NO: 98607 - DNA, 1129 bp, Cannabis sativa
  modified_base (945)..(950): a, c, t, g, unknown or other
aaaatattatatatttatgtgtccataaaagttaatatcacaaataattttacataaaaatattacattaaatataatttaatataatattatacaaaataatacaatataatacgacatactagacaaactcttacgtgttaattttatttaactaattatatatctattttatgagcgttactataaggtaacataatatctaacataaagcatgtcaatacaatcaattgaatcgctacttatattcctacgtacgttgttacaatataatttattaaaacgaatgtaattatgctaataccttagaggatagtataaaatataaatattaatatataatttgatatttatttacatcaataatattataaaatatttgatatcctggttctttattctttctcttattaattatgtgatccattagtttttaaaaaagaaaaaataataattttttttgctaacatattttttaaaaatactagtgtaatattttagtacatagatgctaccaatatttatatatatttaaattataaatagcatgacataatccatgtgttggggctcactcaaattgacatttgtcatggtgtttggttcatttttaaatttgatgtaataaaaaattattagctcactttatatagttattcttcaaatatctagtgtaataggacttatatagttctcaagcatgtattataatattatctattatatttagaaaaaaataaccactcattaaaaataggaggaaaattattttatttagaaattttaaattaagatttttttttgaacaataatgaaatacttttaataatgaatattatataatttttttaaaaaaaaattaagattacatacatatatctatatgcaatacttttaataatgaatattatttattaataattactaaataaatttaattataannnnnnattttaaaaatattaaactataaaattttaatttaataacaaataataaaaaattaaatttttatatttaaattagttacataattaaaaaaaatatataaaaatatatctttttacattatattaaaaatatttttatatacaaaatatttaagttaaactctttttttttttttttt

SEQ ID NO: 98608 - DNA, 580 bp, Cannabis sativa
agtaaaaaagaaattattgccgtgtggcagtattattgtaaaatttggggaaaaaacagtatttttgtaaatttccctaaaaaacgacgatacaacattaacacaatcgtcgtttcgtttatcgatgaggttttacataaatactaaatttgggaataaatattacaaaaatattatcacatgttagaatttacaaaaatattgtcctgattcattttttttactgacagaaaatgaactaggacactgaacagaactaaaaaaaacccaaagaccaaccataaattatggcaatatttagtaaaaaaaaagtataatgcaacaaaaaaacgacaaacagcttcatcaaaaccaaattcaacgaatcaaaaaatttagacacttaaacccacctaaattcttttaaatacgaaataaaaactattgctcaaacataaatttaaaattcaataataaaaacgatctgtagcttttgaaattggttttacagtagaacctctttttaagaatactctattcaagaataatctctaatttgttataaaaaaaataaagtcccaatttgggccagttataaata

SEQ ID NO: 98609 - DNA, 1117 bp, Cannabis sativa
tcaaacccgcctgctggtgtgtacgcttcaaggcccgagcctcaaagcgttttctttaagagcaaggaagataggaacataattatcaaagagcaaaaggatgattcaacattctttgatacatttttaggttagaatgatttgtagtcataggtgacacgcttgatcaaatttaggaaaaaaaaaaaaagaacaaaattacatgggaaatttcgatgtatagctctaataggccagtgttgttgtattcatataggattatagtgattacttacatagagtttgttatagatatatttgtttattcattgtagagcttttgttttgttttttttcaacttagaaaaaaataataataacattgctgtctgaaagtcaagttccatttgttttgtagtagttttcacaaaataaattaaagattgccattttcgaaagaagttcttgtatctatttttttattattattattttctttctttaatccaattttgacacatcaaccaatatgagcaattaaaataaaagtaataaattttaaataactttgttatttaaaatatattaacttgaagagtgtctataaagtaataatatgtatacattgattattttgcttattttgctcaattgttgaataaaattacacaagagaacacatatttatgcacaaccaaaacttatgatttaaaaataataaaaaaattaagagaatgacatgaatgaatggtcatgaaaaccacacaccctacacctcaaatacataatacacatatataagaagaatatactctgtaatatatatatatatatatatataaatatatagtagaaaaagattaaatataagattggtttgataatttgaaaccagaaaggagagcagataatgccaaagtgaagaaagcaaggaaggccatgctaatggaggaagcagaagtgtctgtgaatatgttgtcttgtgattctctcattctgtttgttaatggcactgctgatgaagctgctgataacaacaggtatgtgcacatcaatctgttcacacacacacatatatatatttatgcaaattaattctcaattttaattcaaatatgtaagtatacatatattatta

SEQ ID NO: 98610 - DNA, 839 bp, Cannabis sativa
cccaaacaggaaccagacccaagttcaccgacccccacctaccatccgcctccattggcttcagaacgagatgtcctccacagaccggccaagggcttcgctccactacaaactctgcttctcccttcttctgaaacctcagagtgtacgtccccgtagccacttccgagatgttccaaccagtcgcaatcctccatttttgcgccagagtagatcgcaacaaacccttgaacacacgtcggttagagatcattcggccaaccaccgttttgtcaatgaactcaggagcaacttctgagtcatcgcccgacttttcgagggacagcatgagagtctctctagagatacattccacagtctccataatttcttttcctttttcagatgccatattcagcaaagacacaaacacagagcagcaaaaacagtagcaataagaatgtaaagaacactcaagggaataagaaaaaccctagatcactcacagaggatcaccagtgaaggacacttaacaaatcatagggtacggacacattctcgcacactgtacggagagcatttttgttgatgtgccatcttcttacgcgtccagctggatttaacaattagttgaagaaaaagatcaagttactttgtggacataggtaaggataccaaattatgcaattaaacacaagaggctgaaaataatttatccacttagtgaagctgagtattaacaccagaaagttaggatatatatatatgtttgtttgcttaatttttttttatatgtataaattatattgcagtagaacttttatttaagaatactcttcaagaataacttctaatttgtt

SEQ ID NO: 98611 - DNA, 2210 bp, Cannabis sativa
tgttaaaaataatgatttggtaacatatcgaactaaagttgtcaatttcaagcagacttaggagcttaatagattctttatttagatatgttaaaatgcaatgcaattgattagaaaaaggtttgtccgcaaaaactagttttttcttttaatcttcttggattcctttacgagtaatttgtaactgatcacaaatattgtgattttataacaaaaagattactataaattttatggttttgaaataaataaaattacagcccaacaatggtgctcactcaaagattgaaaatcaaaactcaaaaacacaagtggaactgtaattattagcttattaagtttctgatggttaattacacttgcagtgaaactgcaaaactcacctgttaaaaaaaatgatcttcacctagaaacctcaagttacaagaggtccaattattgtacctctttttgcaataaggttaagaagcaaacattaatcaagagttgaaaattgaactagaaattgtaaagaaactaatcttggacatgttttttcagtatctgaggttcttagcaacctcaaagaaatgagctacattctcttcaggtgtacctactacaattccatgaccaagattcaaaatatgttttcctctaccagctttcttcacggtatcatttattcggtcagtgatgaattccttggaaccaaaaagaacgccaggatcaatattaccctgtacggctatatttgatcctaatcgcttcctaccttcagccatatcaaccgtccaatccaagctaacaacatctacaccagtcaaagccaatctctcaagcaacccaccggagccacttgcataaaggataaggggaaggtttggatgtgtttgtttcacagtgtcgacaatctgcttcaagtatggaagactgaattcctcaaaatctacaggacttagttctgtggcccatgaatcaaagatctgaacagcttgagctccattatcagcttgatactgaacatattttgccatggaagaagcgaatttctgaagtaatgcatgaagtacctgaacaagaaatcaaatgtacaaataagtaaatggcagaacctttggactaaaatgggaacactaattaatatactaggggtgcaatgtacgttgaaattggagcgtaaaactattctcatagagctcaagtatatcataaataagtggtggtctagtaatagattgtagctacaaagtcaaagccaatgagtatggtggataagaaaacaattctaaaatggcaattaataatagctaaatgacttataatacaatatagcaaccactaggcaatcaacaccaagtaacatacatgggtaccactaagacactagtctagtcaattcctaaccggtcaatgagtgatcttactcattcagtagatgcacaaattaccttgggctgagagaacgctaatctcttaatttttgtgaaatgctttgatgaacctccttcaactacgtatgatgccaaggtgaaaggagctccaacaaaaccaagcactgcagcctcattatctacctggaaaagtaaggatataatgtgagtatgccaaatgatgtaaagatacatataccataagaagtaacactaaatcttcttactgtctatactgatactattacatattataaaggttctaaagcaagttttccaaaaacagtgctattaaagcagcagccatttatatcacacataaactacttagtttttttcatatttacagccttattcacatccataaaaaataaaaatattaataagaaaaaaaaaacccaacaagcaacaaaattcctctcaaacttgcttactaaattttcctcctctaattcatacatggtacacgaagcaatagataataactgactccttcgatttaggaataattgactctgtgaatatagttaaactaataaacttttctactgatgaagcaatcaatgaaaattacaagagtcaaacaaactgagccaaacctctttccgcaaaattgttagtgcttctccaacatatggaactgaatcttctggaacgaactctcttacttgatcaacatcctcagctgtgcgtagtggatcgaatatgataggacccttacccttcacaatgtcaaatggtatgttcatcccagaaagaggggttaaaatgtctgagaacaaaataacctgtgacaat

SEQ ID NO: 98612 - DNA, 834 bp, Cannabis sativa
tctatcccggtcccttctataccggaagctcttttatgtaatgaccgtgaggtctaaactcagtttgattatataatattaaacgctttttctcaaaaaatgaacgttcttttccaaaaacaaaaaaaaatctaaactagattaagactaagtggctagggactcaactggtttggttgtggaggctaagtgtggtagccaaattgggaagcatgacccatatattgttgaggtgctttggaatcaaagaggctttaagttggattaaaactcgcagctaggcagatgttattgtcgatcgaattgaatctaataatcttattaattgtggttaatgatcatttgttgaataataactgcatgcatgtaatttcggattgtaaggttattattactagtattggttctattttttttttttttttaatttgttaagtgatctgctaataaatttgcgcatgttttggtgcatccttctccttgtaaagctgattgtgttttcaaaaaaaaaaaaaaatactcttcctattgtgttttcatccatagttttggaatatgacttaagttactgaaattgatgattattattaaaaattaataaataacaattgaacaaattctaacactaagaaaaagaatttttgctggtgagattcataaattgcactgacaaacctcatcggggaaaggtggaaaatttatctctgccatttcactatgggaacacctataccgatgagatattttgtcggcataagtaagctatgccgacgaaactattgtacttcgccggtaaaaggtggtaagcgaaccgccaaaaggagttaacttttg

SEQ ID NO: 98613 - DNA, 845 bp, Cannabis sativa
gctaaaccaagctaaagcaaaatgtcatatacttctcaattacaaactaacacaacataacataaacatgaccatataacatcactaacatgaccttaactacacaatgttgctacacaaacaactaaagacaacaataaagataaccaatctcaacaagaacacacaaaacaataacacataactaacatcatttaaactaaacaaacataactcccacacatatttacagtaatcaaataggttaaggaaagagaaaactccctcaagggtcgggctctttgccatcaatcggattccaaggcgcaagaatctgatctaaaaaatctggatatcccgggacaactttgcgcgagttgttttgcatcgcacgcctcacccacatgtctctttccctttcatactccaagtttatagatattttttttgaacccaatactcccagttgttgcagcattgcctcatcaattcattcttctatgcatccctgtttcaaaatgctgagccaatgttataactcccgggacctgctgctttaaacaacaattcctgcttttcagcatatttcaataactttattttctgtcttgcacctgcaacaaaaatcaacaccatagcaaaatcattagtaactgtaaaaatttgaaaattatatatatgtaattatataagtatgcatataatatttttttttcttttttttttcaaggggtggcacaccccaaatttaattttaatcacactcttctctttttttacaatgggtggcacaccccaaacttattatataatatatataactaaatataatcttgttcttccgctcttgggttgcccaaatgtga

SEQ ID NO: 98614 - DNA, 500 bp, Cannabis sativa
aaaaaaaaaactcctaaaatatttataattacaagtaactgtttgaattttattttaacactataaattatttaaattttttaaattttgaactttatttatatatagacaatcataaattagtacaatgtaaattttaaaactctttcggatgatgaaacagataagagatgtactaaaagtaaaacaactaatttaagaggtgtaatatcgagttttcctaacctaataatctaaaattaggctacaaaatctttaacagaatgaagggagacgaatataccaaaaatatcatagcatatttgaaatgttgtaatcttaaatattatattgcttatgttgtcacataatctatagtctagtggtgctatttttaaattcaaaattaatttcagagaaaaagaaaaaaaaaatgaatttgttatgaacagtttacactccataatataagaacaaaaaaacatagaaaaaatgggagaaaacgatcgttgaagttgatg

SEQ ID NO: 98615 - DNA, 2013 bp, Cannabis sativa
ctataaatattaaatacttctctttccatttcttaatctcaatctccaatggctaatccagaaaaagaagtgtttttcaacaaccataataatactatctcttgtgattttcttgagaacattctctcaaaactcgataccaaatctcttaaactatgcgaatgcgtctcgaaatcttggctctctctgctaagaactccctacttcattaatcttcacctccatagtcaacaacctcatgttgttttcctcaagaaaaaggtaaggaaattttatcacactttatccatttgtgatggtgaaaattttgccgagatttctttacaaaaatttccctttattgagagggattactcatctccattatttatgggaagtgataatggtgtgttgggacttttctgctttagaactgatgtgattcatttatggaatcccaccattaatgagtataaagaattgcctatttttcttgactcgagctgtgttgactctgtgcttggactcggttatgatccattaaccaatgatatcaaagttgttaggttcacatctctagatgagaatggtgttgttggtacccataatttgttcaaacatggcaaccaagtgtggatttttagtttgagaaacaattcatggaaaaaaatggctatgcctaacatattttcagaatttgaaattcctaattttgatataacaatttctgttggtttgggttgttccattgttttaaatgagtgtattcattggatggtttggtttgtaaacagaattggttataaccaatcatctttagggatagtttcttttgatataagtaatgagactttcaagcatataaagttacctaaaactgtgaaacttgaaagagattatggtaacaacctagctaacttttctgggtttctttcctttttcactttgagtgaatttcaagtagttgagatttgggttatgaagaaatatggtgactcagattcttggttcaaatatttgtcatgcaatttactcactcttcttccaaataggtttggtcaaagttgtagctacattccagttggttttttaagaaatgggactcttgtaatttcttgtactgaaactgattattggtattgttatgataccaaaagtaggagggttggaaatgtgagtaaaagatttggtgtatcagatttcactacttatgttgagagtgcttttaagttaaatgattgagtaactataaatagtggcttggtgtattgtatgtatgtggtttcattatgtatgtattcatttaatcttactgtgtagcttgaatatagtttctctataatatattccaagtttatatacatattcttttatttttcatttgtttgaagatataatttggtttctactatttttttttttatcaagaaaataataaatttcattaatcacaagcaaaatacaaacaaactatacaaaacaaaaggcaacactaaaccgccccaacaccgaaatgtattataattttaaggaaaatttacagcaaaagtctcttaaaaaaaattctcttcatatattaattagtttttattagtataattttaacatctaatttttttaactattataattaatattttgtatattaactattcccaattaaaacattttattaagatttttttagcataagattttaatggttcatatgttatttccacttttataatgttttccatattttattgcttatttgacagtttattagtgttgttttattattaattaattttattttatttttaaagtctaattaattatttattagtattattattaatttttagtaagttacataatctttggttttttatactatacttttttaaaatatattatactattttctagcctatttctgtatatttatagtattttcacttttatttttgggactttttatttttacacttcaaaacagatttttttttgcatttttacggaattctacattgaaacccctattgcaactag

SEQ ID NO: 98616 - DNA, 1343 bp, Cannabis sativa
gtgctgacaccgtagactcgttgtctcgaatctcgatggttcctggttccgcgagctcttgcaccatcctctcaatgtctattgaggacagcagacccacttcagtgtcttcgacagttgtgacctcttcctctgagatcgaggttggaataaagctgtcttcctggggatcctcgtcgccatcaaacgcgttgcctcctgagccaagcacttggctatccgatagatcgctcatctgaaagatagaagatcttttcagcgtggtgaatgtgcaaaaacaaaataagtgacctcacctgcatataaaatataaaatcgtcttagggggatgatttgaattcttgcgaaaaccaatcatcccaccaaggtgcgaaaaagtcaggtgtgcgaatagaagaatatctcaaaaaatggctaggtgtatcccagtaacctaagcgacatgcgttttcgagcatgaccctgaaatgactgggagacacccaccgttgcgaggaacctaactaatcacaacctgcgaatatgtcacgcgtctccaactggcgatgtacctcaaaaaacggctgggagaatcccagtgactcaagggacatacgttcctgagaatgaccctgaagttactgggatactcccaccgttttgagaaaatctgttagccaaagagtacgcttatatcggaacactggcgcatgccacaaatgactgggcatttcacagtacttcaaggaacatataatggcatatatgaacattgggatactgtgacacgcccaccatttgaaagacttaaccaatgttctcgcaataaaatatacatagtataaaatcctaaggtttaaaacaatgactagaagtaataaagtctctgtgaaacctacgataagcagacatgcgagtattcgaagtgttcatccaaataccccgcgtgtattcaaaagataaggatgcgattattcaaacattcttcctaaagttcacggttatgcaaatttcaggtcaatctttctgagattacccagttctatactgaaaaaacatagccctatgtgtatttcctacaagcatgcattcctaaaatccctcaataccaaaacccagaaaaaagcagttttgcatttcaaacagaaactgaaaatgcaatggaatttgaaactaacctttagttttggtaagttgttcctgcgattgctctcgatcacttctgagattgaagagattttagaaagagaggtaggagtctgggcagagtatgaaggtttctttgaaatctctgtaaaggagggaaaagggaagttaagaacgagagggaaaaatgaaggatttagttcgtatcaaagggttta

SEQ ID NO: 98617 - DNA, 526 bp, Cannabis sativa
catgagatgagaaatactaggggcctctcttgcaatctttattccatgaatttttccttggccttctgctttcaaaaccagtttagataacacttcttggcacaagagaaagagaaaaggtgaaagtgggtctccttgtcgaagccctctatgaggagcaatcttttttaggggacttccatttagtaacaccgaataagacactccagtaacacatgtcattataagtcctcgggccttctcagtaaaaccatttctttcaagaactttgtccaaaaatctccattccatcttgtcatatgccttgtgcatatctaatttaatggccattaaaccacccttccctttcttccgacgaattttatgcactaattcctgagtcaaaattgaggtttcagctatccatctccctggaatgaatgcagattgaacaggagaaaccaactcctccataaccgggcggagcctattagacagaatctttgctaccaccttatactgaaaattacataaactgattggcctg

SEQ ID NO: 98618 - DNA, 3286 bp, Cannabis sativa
ttcatatattgtgttgttgtaacaatgttgcccataataaactcatcatcgcaatactattgactcgtaaactaatcctttacaagctaatacatgttttagtaactcatctaatatatattggaaattgttttagttaacattagaaactcatcatctctcatttcaagtgcaactctaattcataaattgtgttgttataacaatgttgcccataatttaactaagtttgcactttcgactgataatgagttaacatcgcagtgcaatattccgccatctattttgaataatgttcttaaagatttttatcgacgaacattgatctaagtagataagcatgttctttctctaacaatgcacattgttaaaatgaaacaccaatatagtgtcaaattttgttcaaaataatgacattgttgtttgataaaaagattgaaaagaattcagttaatataatataaatactcctttattagcaaatctaactaaccccaagattccaaaacaaatacctactacacctcttcaacactttcaaagagttgtattaaggttgttgtgtaagaaatgtttaagaaaccccacccaattgaatatttgaagatttgaaggagtaagtaagttcttttaaactatacaaatacaaaatccagctaaccaaaacctatcgagttatagatatagcaaccctcaccgaacaacaatcgtcttcttcttcttcgtcgagttatatatatatttcacaaaataatggtataatttccccccaacacaatacctaatgcctgcaaaagaaaaacaaaacataagttaccgaaaagaaaaattattcgacgaataaaacacaagttgggaatgtttaagaggtgtacttggcaattatgagttctcatttagatgctggtaggaaggtagatccttataatgtctttcattctaagcttgtggcgacatgtcgggcacttgtgctgaactttaattgctgcctcaatgcattttttgcagaaaatgtgaccacattttgtagatgtttcttcactcattggaccgatacaaatcgggcaattgaaggatggtactggtgggggtggtggcggcggtggtggtgctactatctcagatgctgcaagtatgggcgggtcattctttatctgcattaataaactttcactgtcagatttaggaccttaaataattgatacagatgtcatcattgtacttgaatgaaatttaaagagtcacatttaagacttctatgaagaacgtcagaaagtgttacaaaaatgtggtatacaatgcgttcgagcctacaaacaacgaaagggctaagtttattttttttgtttcggcaatgttcacttccatttctcaacagagtttcgaagctgtgaagaatggcacaaaggcacacaagaaaatgacctgatcaactttgggactctcttctgaattcatgtacagctcccagttcaaaactgcttgatttctcaataatcttctacgcttgttgcgctgaatcggatacgaagttgaagcagctgcataacaatcaaaattcacaatgttaagtttgggcaggaaaaggaagcaagccaagcaaaaaatgattcaaaagaccgaaaaagcctctatgctgacagaagcatgaccgaggaaagaaaaagaaaagagtaacaaaaaggaaatccaacaagggtagctcaaatggttagacatgtggtttgctcctacaaggttcgaggttcaagcccctcctgggtaccaacatagcaattgttatagtttcctagtccccgaaatattgtagggttaggcagggaacctagtttcgaaagaataaaatctacctaaaaaggaaaatggtagtcttatctagtaagtattgtaagttccattctcaaaatagtaacatagtaactagaaataagagagagtataactaacctgcacggctagtgttcacttcggttcctacctcagccacctctctcacctcaaggtttcggctgggattgttttttgcctgttaacaagattctcagttaataacaatgaatggaattatagaaaatgaacaatgaaatgaaaagggaagtatcataaacatacttcagcaaatattcttgaggaaattatagcaacatcatcatcgatgacctcgaaatccttaggaacaaccgaatgagatcttccgaaatgatgatgatgatgatgatgatgatgattatgcacattagcatgatgagatcttccatagtcaaaagcaactggtggattattaagatccaactctaacaacattttccctctttgtaagtcactcatatccccttctagaatctgttttagttctaattccaatggtgtcaaattattgtcaaaactaattgaacctgaaaatttataagaaaaataggtcaaccaaaaaccaaatttatgttaatataattgctaaaaacaaccaaacaaattctcacaaagctaatatttagctatcaaaacaagaaaatctgctgaaattgataaaccccatagaaaatctacaacatacaatcaatgataaatgataacacaaatttatgctttatgttcttcttatttgtttcatgagtacctaaaacctcatttttatcaacaaaaacaagaaaatttgctgaaaatttataaaccccacagaaaatcaaccaaacattttaacacacaattgttaaaatcaaccaaacaagttctcacaaaactagttcctaaaaatcaacccaaaaaaaaacatttatatctcaaaagaaaaacaaattaattgtttcaagagttcctaaaatctcatatttttcaacaaacaattaatgataaatgatcaaacattttaacaaataacatgcctacaaaccaaacccaataatagaaacaacaattacacagatcaaaaacaacattgaatacttagatttgacatgatcatcaagaaattcaacaaaccctaatccaaaaacagaatcaaaaatcaaaacccagattaacccctttgacttttcaacatccaaacactaatcaaaaagtccacgtacctgaaggatgatccatttagagaaaaacccagatcgaatttcaccttaaaaaagatcaaaaacgttgatgatgaatcaaaaaatcaaacaaaaacaaaaaaccccaacaacccaaaaaaataataatcaaatccttaagaaacaagttaagaataaagaagcagatgatgatgattcagaaaaatctagagaaccatatcatatcatatcatatatat

SEQ ID NO: 98619 - DNA, 686 bp, Cannabis sativa
  modified_base (322)..(328): a, c, t, g, unknown or other
tttttttttttttttttatgacttttcagcctcctttgaatggtgttggattcgctaatgtaaaatgtggttattataataaaatgttacaagtaataattgactaattagtacattaatacaaaaattacaaatattaacaattaacttctttattaacttaacttattaattctctaaattataggagttactatatatatatttcaaatataaaacaaggattatttcacaaatatacaaaaacaacaaaaaaaaattataaaagtaaagttttacgaaattttaaatattttaatgatttttttttattttatttacnnnnnnnacggtctttttatgttgtactcttgttcatttgttgttgatttttgttatctacatgttattttttgttgttgatttgatgttatttaaatgttatttttatgttacttttatgtatttttcttgttattttcgtgttgtttttatggaaaatcttaaaaatataaaaaaaaattctgtaaacgtaaaaaatatatatatattttttaaaaaatggtgccttgtaattatccctataaaaaattcaataaataaaagatttttttacataatacactaaaaattaaaaaaaaatacaaaaatatattagtacggaaaaaatttcatttttatagataattttttttatttacaaaaat

SEQ ID NO: 98620 - DNA, 537 bp, Cannabis sativa
tcttatataattatcccattatataatagtagaagagcccaaattgattatgagcacctaatcaatgggctgcttggtttccttcaggcccaacatcaactgactatctcatcgtagcccacgtacctgacacccagagctggcctaaccaatttaggagttttaagcgaaaaaaattaaaatttacattttattaataaatatatattgaatatttctcaaatgagtattaccgattaaaagtgcacccatatatatataaaattttctcttgcattgtactaaatggagaatcggatagttttgtaatgaaattgaggttcttgaaaagtaaaaagtttatggtatagttgagcctaaatgatattttcatctacatttgcctaagtctatgttatcacatgttaatgttcttttgatttccaagcatttattgttgacattagtggagaaggtgaaggttaaatgatgcaatcatgttaaaagggaaatttacatggtatactaacttttgccatttttttttacaaaaatact

SEQ ID NO: 98621 - DNA, 1985 bp, Cannabis sativa
taagaaatttaaataatttacagtactaaaatttttttatatttgacctttaattttaaaattgtaaattaatcataattttatgaaaatttagtttcgtcttaaaaagttataacgtgtagtatcatgaaatgataataatagcttaaaaagctttttttgaatattgaagtaaatagagaagtactgaaataatttttttccaaagtgtactataatttttttatattttattcacaattttatgacctaaagtatttatttataaaaataagcttttaaaattttaaaattataaaaatatatttctctaacaaaaagtaaaaaaataactaaaaaacaaccataaatcatatataaatacaatttatgacaactataattcaactgtgaataaatattaaaacaacttaaaaaataatttattgttgttagtaagtacgttttttgtaaataaaaaaaattaaagcgttaaaatcaaattattttcatgttatcattttttgtatcttttttaaaattttggtttattatttaaaaaattctaaattgttccattaataatatttattttgtgttgatatttattatgtttttacaaaagggttcgtttcatttgatatcaacaactttattagttgtataaaagggttcacagctctttataacactttcggctgctggaagaacctgattttaagattcttgttcttcccagcaaattcaaattatttttataattaaatcaaacctttaaagaaattctcttggtagaagagcttcctttctaagttgtagttcccactatacccttttgcaaagctcaggagaggagaaagacgagacttttgggaaaatcactttctttctttttttctctctcgatttcaacaatctttggtgttagaagtttcttttttttttttaattactgggttttctgatttggaagaagaagaagaagaaaaaagtatgctttgtcgaatggttttggtacagaggaagaagaatactgggaaagttccggtgtacctgaatgtatacgatcttactcccataaatggctacgcctattggcttggtcttggagtttatcattctggtgttcaaggtaattgaattttctttctaaattatttccttttttgaggtttctcatctgtttgtttcgcgagaaagtttggaaaagtgaactttatatacacaaagtttgtttttttagatccggtaatatgtttttgaagtaaattgaagtctggatctggctgtgatttatttatttattttttttaaaaaaaaattattaaagaaaaccctgaattatccattttaggattaattttttcttcatctaatttattatattatccattttggatctggttttgattattttggaaagtacatgagaaaatagataacgagattttgaattattagtatatttgggttaatttataattgttctggcaatcgattaaaactaaggatttttctatatataattttatagtattgtagtttaatttaatttttttaataatggatttgcttacatcaattgaccttctttcatatatataaataaatatattaattattattaatttattcagtccatgatgttgaatatgcattcggagcccatgaccatgcaacaactggaattttcgaagtggaacctaaggtttgtccaggtttcacattcagaaaatctattctgattggtagaacagatcttgggccaaaagatgtccgtacattaatggagaaattagcagaagagtattctggtaatacttatcatcttatcaccaagaactgtaatcacttttgtaacgatgtgtgtctcagattaacagggaagcctatccctcgttgggtcaacagacttgctcgacttggtaacaaatctattcttattaaataccattttttacattttgttactaaagttaccaattatgtattcaataaaagttacc

SEQ ID NO: 98622 - DNA, 611 bp, Cannabis sativa
aatttagtatgtaaataatagcttatttgacctatttctaaggaatttgaagggttaagctctcctatattaaaagccttagtcaaatcctaaaaccctaagtccgaagtccttaagtctcaaatcctagagatcttgaagggtctaagtttgataacttatatctctctctcatgcccactgctatactcatactagagattttccaactctaattctaacattgtaccctcaagagagctacttcagatcccatcagtatagtgatctgagtagtattatctctcggtatcaataacaggagtaggtcattaccgctaactaagggggccaaacctatataaaatcttgtgtctatttactttattattctaattgtgtaacacgtggaaagtatcagtattaaatacgactctgctgtcgattggccaaatatgaggtcaacacttttataattaattaccttaaatctttattacaaatttatttatgttaataaaattttgagtttagcaacatttatttcaggcatcaagatcagtgtggatgcttccttattcataagcgaggggaaattttgttttgagttcgttattcaagatatctcaggg

SEQ ID NO: 98623 - DNA, 831 bp, Cannabis sativa
aacaagaaaaataagtgcaagttaaattactctgcacgctggtaggagcgtttgcccgaacaagcacagatggagcatcattgtccgaagagtcttcgtggtcctccaggatggcttttccttttccttctacaggagtagatggccaagtaggcataccgggctccctcatccgaatagaacgttctattggcctctattcggtcggaagggtcttcttcttcttgggcggcctctcctgctctgaatattcttaagcctccttctcctgctcagaatattgttgagcatcttgcttggctccagcatcacccttcaacttagcctcacacttaagttgaataagctccttctcttgcttagcttcctcagtccagccatatctggacttcttcttcttctccttcacaggttggggtataaactttgtcggataaagcttgtacttcacaaagttgtcctctgaggtcaacaaagtgatagttcgagcagcatccgacagcaggagaattttctagggcctttccctaagtgccaaagtgaagggtggacgacaatacaccgacatctgttgaaaccgagtataggtggtatccatgccttccacaaagtagtactcatcaagaaaactcccaatcttgctaacctccatgtccatagtgcccgtcaaccacttgtagttcggctgagagaaatagaaggaccccgacctgctctgcttaggggtagacttcaaattaaaaaggcagttgatgtcgtgtggggacgccacaccccatccttgagtggcgtaaacgacaaacagggaagataagtacttgatgcccttgg

SEQ ID NO: 98624 - DNA, 1877 bp, Cannabis sativa
  modified_base (1839)..(1845): a, c, t, g, unknown or other
taccacactgagttggaagaagagaatatctctgaaaattcttatagaagtttaaacataatgtaatcgcgaaggatgctgctttactaagaattcaatcaaaggatcattactgagttagcagcttatactaaaaaagaaaaaattaatgatagaggtaatagaaagagcaacaacagactttgagctgatagaacaataggaataagagacgaaaaggaggaaacaagaaaggaaaaagagacagagagaagggagattttctctaatcttgacgcctcaagaagggaatcgacctcctcacatgggagagaaacgacatatataagagctccattatgagactagaacataaccaaaggagatacatggataagaggtagagagtcaaactggactttgaagtcaagctcagtacaacacctactcagatcttttgagaaaacaaagataagtcaatatggagggagccttgtaagattatttcaccaattgtaataatatatcagacgaaacattttgccttccacaactatgtagtcaactgcacaaatgattttaggtcgttcatcagacaaataaaatcaatgatcaaggcaggagacctctaaaaatatatcaaaaagaatcaagatagatgagttgaggaaccttatactgaggagaaaactagaggacagttgaggtagcaagcatgggaagagcccgaattgtccaaagggaaagcagcattattaaaacatagttctatgattttgaggagtgtagagcgagggaaacattacccctcatgaaaagtgaacttttgagagggttaaaaagactatcaacttagtagcataatgccaactacatttttcctaaggaaacatattttccagctgttctaatcacttttacagagaataatctttgaggagtgaagtttcctcatgatgatgctctagtagtctagctgcaaatacaagactgactcataggcaaaatcttagtagatggaggaagtagcgtgaatatactattctatgaagcacttgttaacatgggaatagatgagaaaagaattataacttcgacctttccattacaatcctttgaaaataatgaagtttatcctatgagagaaattgagcttgatgtaaaagtcataggaaggactttgaaaggttatttccttgtaatcaaagttgtgtcttgttataatgtgatcataggaagagtttggtaacatctgatgcaaggagtagcctcaacttcctaagatgtccatatcccaattggacacacatcatagacattaaaggatgccaaaaataagcaagaaaatgttacacactaatgaggaaagttaatgcagtgatccaagaaatagtgactaaagaggagaaatgacaattagagggcccctaccaaccactactacaaaagacacttttagtgtcggttcaaattttatttaatttgaaaaactaaaaatatagagtaagtttaggtgttaatttaaaattgacatttaaaaaaccatatggtatcagtcaacaaacctgcaccaaagctaaaatcgagactaaaaaaatttaaaaggaaaattttttaaaattaaatactcctttggtatcgatatcaaactgagaccaaagtttagattttaaaatcaatataaatatctatcagacccattgaaactctattcctacttcttcttccttccacctcccctagactcctttcctttttctcgttctcccgcacccagccccttctcttcctcactcggtgatccaaaccggtagctcattatccttctatagccgaccccccccctctctctctctctcnnnnnnnctctctctctattttcttcttcaattttcgaa

SEQ ID NO: 98625 - DNA, 915 bp, Cannabis sativa
taatatttaataaataacaaaaaaattgtattacattttggatatatattaaataacaaatttaaaaataatatatattttactcacatttttataaatgtcagttaaatttattgtaaaaaataaagaatttagtgacattttcaaatgttattaaacaaataatatagtgacattttacctttagtcacacgggcatatcttacacttggtacaaatgccactaaaaccataaatgtcactataagtaactaatagtaacattttgaagtgtcacttatattaaattttggtgtagtgagtcttctccaacaatgtacatattgacccaatcagcctgcgtgccgagttgccaggagttattttggactggttgtatctaatgtattttgaattgttattgtatatagtcttttaggtaaatcttttataacagagatcccaaaaatacctttctactgccgttataatgtctgtttttagtgatttatattagtcaagtttttaatattatcacgttttttaataattaattaatttattagtattaaattagtttataaaatcacacacgtgacgtccttatgcgatagagcgttacacccaatttctcacagaggacttccatcaggtctgtgacctccaacagtgttagaccgaagatctcttccgcgatcgtcgaaactcgctccgtcagaggttgactttggaataaacactacaaaaaaatttataatttatgtaatttctacttaggaatttatacaaagtaatagatataaataaatacataattagattaaaaaagttttgaaaatttagtattctcactcaggcacgcccccctgccacagctccggtggagcaatctccagctctgtattttcttttaactttcatgcacgtgaaatatta

SEQ ID NO: 98626 - DNA, 516 bp, Cannabis sativa
ttttttttttgctaaataaatgaaacattccatcatcaacaatctgtacatcgtatgaacctgattaccaaacaaatcatctcaaggtttcaaaccaacaattattgaaatttgaaaccacactttatctttaactttaattactgagcatgtttgctctggtgtattcaagattgcaatggaatggagattacaatcacaatgtttagttagatcttttaacttttgtaatccttttacattgtaaaatgagtattacaccacttgcatgaattctcattacatgagtatgactcatgaatgagaattataattaccaatacattacaaaaaaaacttttctacctttctctctcttacctctttatcaaatatagttgacgataaatagaatagggatattttggtcaatatattaattattcaattttatttttatactaaaccaaataaaaaaatttgattacacttttcaggaaaccaaacaccactttagagcatctccaatataagtgt

SEQ ID NO: 98627 - DNA, 2858 bp, Cannabis sativa
taatagacatgtaaataatcaaattgagagaagaataacgaagagcagatctattgttggtgtatagaaatgtgaatattaaagaattgagagagtagaagaggagaaagaaagagtgttgttatttactaatcgtagtattaatatataatccttgaggattaatgttggaaacttcaatgtgaatagaacacgcagaggaatgatataataataaattaataattgtaaattgacttgtcgtttaacaagcaacatcttcgatgtttccgtctcagctaaatatgatttgagttgttcattattcaaatttttatactaaaaaatcataattattcaccaaagaagcaaagtcgccgacgcccttggagactttgactctttgaacgagtagaactacagaagaaggagaaaagaatattacactttattgttaaacgacaatgtgagtgagtcatttacttccttttcaacttcttctcttctaaatcaataacctaaaacccttcttttctttgccccacaaaagaaagactcttcttttatcattaaagctttctgcttttattattttctctgggttttggaagggatagagttatttatggctggattactagagtttggtttagatcttcgaatggaaaccagacaagaactccacttgggttttctatttaagctgaatttcaggtaattcaagtcgttttaaacatttgggctctttctttctctctctatttttctcttctttacttgaaacgttttcagctttagatttttttggtgttggctatctgggtttttaagatctaggcgaaaaatccgaactttgtgacttttcttctttaatttactaaatcagaaggtttgacctgagttgggacaacctaggatatctcttctttaggaaatcaataatatttgactattttattgatcaaatttgggtttgttcaagctttacctgagagattcaattgaattacaaacactgaggaaaaaaaggggaattttttgaatttggtggttccataaacaaaattcagattctgggtcttttacatttctgagtttttaactatacaaatgatgggaggacattctagcaaaccgtctagtactgattcagtacaaccacaaccacaactacaaccacagacacagacacagccactgacaccacttgaatatagtaaaaattcacagtatgaaattgatctaagctcctacgagacagcttgtaaacaagaccctagtttacagtcatttgatgctgttcttcaggagagaactaacagagtcattggcacccttgccactggacttgaggttagatctttgtctttcaactcactcaaagagatgactgattgtttacttgagatgaatcaagaagtggtgaaagtgatattagagaacaagaaagatatatggaacaatcaagagatgttttctcttgttgagatgtactttgataacagtatccaaactttggatttctgttctgctcttgagaaatgtctaaagcgtacaatggggaaccagcttataattcgagctgcggttaggaagtttgaggaagaaactgaatgtggttctagtgggagcagtagtagctttgccaagacattacaagaactagctcgattcaaggaggccggagacccttttactgaagagttctttgtgttatttcaatctgtgtttaagcaacaggtgacaatgttggaaaagttgcagaaaagaaagagaaagcttgataagaaattgaaatctatcaagacttggaggaaggtatcgaatgttattttcgtggcaacatttgtttcggtgttgattttcacagttgtggctgctgctattgctgcaccgcctgttgttacagccctgctgggtgcattggctgtcccgataggctcggttgggaaatggtgtaatgtgctttggaatcggtatgggaatgctgttaaaggacagagagcattaaccagctcaatgcaggttggaacttttgttacactcaaggatttggagaacattaggctgcttgttaacaagttggaaattgtgattgagtcactgatggttcatgctgaatttgcttttactcaagaggactctttaaagatcgttatagaagagatcaagaagaagctggaagtgtttactgaaactactgagagcttaactcaacagaatgagaagtgtattcaagaaataacaatggcaaggagagtgatcatacagagaataataaggcaatcatcaagttgagtggccagacctttactggttcgggttttcgttgcaagtggaaaacatttgtaaggtaaaaatttcacctcttgttcttgggtcaaagactttgtttgatccttcttataggtgaaaattggatcatcaccattgttgttgatcaggcttatactttgttgtaatgaatatctgaaagtttttatatagaataatacacaatttattttatttaagtacttttctatgttacaaggttaaagatttgtttggataatgtaaagtagtactcgtaactaactggatatggatttttcttattttcatcttttggtaaataatggctgcattaaagtcaatttgaactaaattaggtgcatttagaaaaaatcactttgtacttaaaattgattgtaatttaaattattattaagtttgatgtgtttgtttaaccgtgtaaatgtaattacacaataatcttgtaattggaagtaattgtctctattacactctaattaattaggtgtggttatgaaatattactatgttttaaataataaattattatacaatatatttgagggtaaatactattttagacc

SEQ ID NO: 98628 - DNA, 516 bp, Cannabis sativa
gatcaaataactcactcatctgacagctgtcgtacatcacgaattacaatccgtgaaagtacaataacagaacaaaattatatccctatatttatataaaaaattttaataaataagaaggatcttaagaattaaagaatataattagaacgttattttttataattatacaattattgtgtatataattacataattgaaatgagtaatattttaaattttgtaattacaaacacaccctaaatatattatacatgtaattatgatatccaaatctagccataaatctctttgtttttattttgtttttgtttgtgtttttttctttactttttttctttttgagtagaagcatgcacatgtaagtaatcaaaaacaaattaatatatagttcccaatccatatgtatatataatgatgaatatgattgaggatcccaaacacaaaattaccaaattacccctctagttgaaaaggtttggtcagtccactaataacaagtcatatatataagta

SEQ ID NO: 98629 - DNA, 1544 bp, Cannabis sativa
tgttaatcaacatacctgtgagtagatctaagatcctggtaaaataatttccaacacatactggccctgacgcggcccaagtcattgaaagcccacatcatgaagtgtgtaagtcccgtacacctcatcatcatccagaacccaccttcattaatgggcctgcgaatactttagaggagattactgctaaactctcagggcctatgtgggatgggggagagggtccaaatgatactggtgctaaatggttccacactatgaccttgcctccaattttggggtcaaagtcaaaaaagaggaaggcaacgggaagtgtatcccccattgttaatttggctctcaatccatctcacggcactcccacgtctaaggggcaggaattatctttcagaaagggtggaatcgttcctttctctctcgggaaggactctcccaagaagggatcttcaagttcaaggaaattgagaagcaaaaagacatctcttggcagcagtaacattgtcgaaccgaaaatcactgatgatgatggcagtaatgaatcaggtaccaatgccccatctttttcttctgagtttggaaatttacttgttgaagttagaattgatcaaaattttcaattgggcgaggaggcggcccttatcaagccccccccaatcccaatgaggttcctttcttagaatttccgcggcctttcgagaccggcggcaatccaagctctaaaggcttgggtgtggaagtggaaggtggattgtgtttttcttatggaaactaagataggggcaagtcaaatgaggtctatttgtaattctctgcaatttgagaatggtgtttttgttccttctgtggggcacgctggagggttatgtttgttgtggaataaaaatgtggacattacggttacggagatacttgagtttgggtttgtatgtactgtcaacgactatgctgtttcgaagatttggtatttgtttgccatctacggcaccccttatgacgaatataaaagggagttctgggatcatttaacgaatatagtcaattccttcgatggtccctgggctcttatgggagatcttaacattcttctgtctaaagaagataaattgggtgggcgtaatttcgtattggaccaaggcttaaaaattggcagagaatatcgtattggaccaaggcatgggtgtgcctaggcattggatccttaggcctagtcataaattcataaaatgctcactgcccataaaaaaaggagtcatgcctaggcatggaaatcacatgcttagtcctgtgtctaagtagcctagagacgtgtggatttgcacacatgggccacgacataggatctacataccacgacccaacccttcatttttcaaacaaacaatatatttctattttttatttttttttttgctataaaaggagtggatttcgatatttttcagtaagcaattcaagagtacaaaaattgaagagcaagatcaatcgagaaagctttttcaatggggttttctgttgggttttgtgccctaaataaaacccattac

SEQ ID NO: 98630 - DNA, 1589 bp, Cannabis sativa
tacaaatcaaaatgatatttctaaaaatacatactaaaaagaaccatcataatatattaatatgaaatatatattttttttataatggtccaattgagcaataaagcttaattttggtaaaatatttagctgaaaaacaaatcaaaattccaagagtcaatttatgagaatatttttaattaaattggctcttcaccaacttttgagtccaaaaaagttacacaacaatgcgtcattttcgagctgttagcaaatcatgaaagttatttttagagattttggaatttataaccaaaaaaaaaatcaaaactaaaatatttcgccggaaaataaaaattctttgatgtattttaattactcactctaaacttttgttttaatgtacaaaagtatttaataataatcaaatcaaattcatccagatcagacgaactaataaaaaatctgttctgtgttactaatatttacaaaaattacaaaattaaaaaaaaatatcagcagagattttttttttagtttctaactgtgacccaactttctgaaaatgaccaattggctgagtcaccggacaccagttgccggagacgattttccggcgaaattaggcaatttgaagaagaggaagaagaagagaattcgaagacattaaacaattcaagtgaaaactctggtgaattaggctgtggactcgaatcccagttagaaaaatccaaagggcatcttggtgagaattcttccgatacaacagtgttatcagactcgtcatcatctttgatatctgaaacgaaggtgtgattcaaaagcatctcagccgtccatctcttcttagaatccttaatcaaacactttgatagaaaatctttgccttcctctgacaattcttctggaatttctggaacttcatctcccccaattcgaagtaacagagcccaaatgtttggttcttgtttgtaattccacaccggattcccagtcaccatttccaccacagcacaacccaaagcccaaatatccgaaggagattcgtactcattgaagtttactgactcaggagccaagttaagaggagtacctcttacagttaactgctctgtttccaaagaagaagaagtttctttggctaatccaaaatcagcaatcttaacattaccattatcgaacataagaatattctgaagctttatatcgcaatgaacaaatcccttggaatgaataaaagaaagccctttgagaatcgatcttgcatgtcttctgatttcgggttccggcaatcgaccaccgttgatcttgatttggtccgataagctgccaccagaggcgaactccaacagtaaattgtgataattgacaccattctcaacgctatgattttcgccataacacttaatgatttgtgaacaagctccgattttgtcgagtactcgcttttcgttctccagagtttggaaaccgcaagctttcgatgattttatagccattaaaggtgaaccctttctgggttttgttttactgattgttgcgaagcttccatggccaatttcttctccacgaacccacttctccattgatgattgatgatgatgatgatc

SEQ ID NO: 98631 - DNA, 724 bp, Cannabis sativa
ttttagcattcgaataattttccatcccacacacattggatctaaatatattttcatggtataatatttttagtatataatatataatataataattcacataatgagtaactattaaatgataatgtataatcagttgtcatttactattattaggggtattttgtattttttttttaaataattattcttcacaaaagtttttttttgcaaaatagtattctaaaaacacatgatattctatatgaaaatcattttgcaaaatgacaataaaaattatctattttgattttatctttttatgttttaataaaattatataattataatttatatgtataaggtttatgttgttggtgacacttggaataaaatacaaaagtaatactaatataaaacattgatattgctaatataagtaatcataatacttagtgtgtataattttaacatgtatgattctatatttaactttctatcatacttttatttatttttatttaaagtacttataatggattgcttgcatgtatatattacttttgacaagataggatttggcatatatttgtgtttatattctaaagtgtctaacattattgctaattataatttagactaattaatagtagaggcatgctaatttttatctattgtttagttttgggcaattgtgtccaacactacttgaaagttgaggtgtgttatattgagtctcacttaa

SEQ ID NO: 98632 - DNA, 737 bp, Cannabis sativa
agttgtactaaacttcaactttgtacccatagctctctgaagacttacccaaaacgttgatgtaaacttcagatctctatccgaaataatttattacgtaaggaagagactactgggtgcagaatctaggtaccccattattgagaaattgaccttttatttgctaaccgcattgagaaagttgagaccatacttccaagctcacgccataacagtactcacaaatcatctcttgtgccagatgcttcaaaagctggaatcctcaggtagactgctaaaatgagctatggaactcgaccaaggcatcctcctagaattggaatgttgcacatgccactctatcatttctagtgagtaccataaaattcaaaatttgagtaataacaatcagccattgtttggctttcataaatttggacctcccagagagattggaggtgcctgcttacgaaacctttcgtatagtggttccatccgattaacaacagcaactgccccagtctacacaatgggggtaggagccacttgcactataggagcaggcattgtaggagcaccctggtgcctcaagcgccagatctcctcatcttgctcattaattctggcttgcattgctacaaacttattctcacaatcctaggcagcctacggtgggttaatatttccccgaccgcgtgcccttcctcttgggcctttgcctcaaccaagaatattcaggggtgttgggttttatgccc

SEQ ID NO: 98633 - DNA, 560 bp, Cannabis sativa
attgaaaatgggagggaaaatgaagttaattaacttatatctaggggtttaaatatgaattagaggatcttgacatgtggctttggaaaatcaaaagtcactcaatctaacaattatctcaaaacacgctcacatgaatgccaaaggtttgatgacatggtagattgaaaaaataaaataataaatgtgggtgtcattttaaaaccctgatcaacaagacaaccaagtgtcaccgtcatgtgacagaacaactcgcctgtccctcatgaatagttttgctatttgagaaatagttgtcatcacgaaactaatggcacatgttactgtacaaattttctgcctaaaaatacgagtacagtctcataaataactgacacgtggacccagttctcgatagaaaatgatgatagttgagctaactttgcctgatgtaaacttgcaagaagatgccttcaagacagggtctataactgaaccactagaattctcttgtcttatctttattttttgctttcgtttttgtccatttagtagcctatattttgagtactcgctatttt

SEQ ID NO: 98634 - DNA, 2149 bp, Cannabis sativa
acaaaataattgaaaaagttgtgtttctccattaattaatcactaaaatgattgaataattgtttgaaatattaatataagatatttttctctatattcatatataggtcggtataaaagatcaaaattaaatgagattaatttttttattataaaatgaagaataagaaaagaaaatgagaaaataaaacagaaagttcttaagtttttaatggggtgatcttttatttatacaaaaatgtgagctacaaaattaaaaactaaaaaaatgaataatggtaattacaattaaaaattaattggaagatttggacaagatccatatattatttatacttccctttgtatatccataataaataattcattaaaaattttgcttaaaaatctaatagaacaaaaactcgattaagagagaaatacaataatcatttaatggcatacacttgtaaacatttgttaaagcaaaaagaatatttacacaatccaatgctagtagaattggcacaaaaataaaagaacgattccatcagctttgcactccaacaaactacgggtgaattcaggatagaccaaaaggcccatgctatttttcaattctcttaactccacccttcaagcgaagaagtgactctgccagtccaagtttgttaaccaggaagtaaaaatgacttggagagagcccttttgtcaagaaatctgcgatctgatcatgcgataaaatgtagcgaattttgagtttctgatgtagtactttgtctctcatgaagtgtaaatcaagctctatgtgtttggtacgctcatgatatactggattcgatgcgaacacgctggcactcatgttatcagactaaattattggtgttgttggcattcatacttcattttttgcatcagttcctgtaaccacgccaactctgctgcaagatgtgcaagagatctatattcggactcagtgctagaccgtgcaactacggtttatttcttcgaggactaaaatattagggactctccaaggaacacacaatatcttgttattgacctccgatcgtcggcacattaggcccaatcagcgtttgaaaacccttgtaaagtcaagttgtcactcggggaaatgtgaatctcgtgatgcattgtgcccttgagataccttaatattctcttagtagcccccaatgtataaaagtttgacttttgagaaattgatttaatttgttgaccacaaaagagatatttggctgagtatggctcagatattgtaaggcaacaatgacactcctgtatagagatggattttctaggtaatcaccatcactaatcaaagaggtttccctattgtcattggtgttgggcttggcttgatgttttccatcttatatttctacaagagctcactatgtattttctttgtgactaatagactcctgtgtgatccttgaatatacctttattccaagaaagtaatgcaagtgtcccaagtccttgaaagagaacaccttgttaaacctatcaattaactgcttaatttcacctgagctgttacctgttattatgatatcatctacatagatgagtatcataataacaaaatttagggttttcaacataaatagagctgaatcggttttagaatttttaaaattccagtcaaataaggtctttttaccatgatctaggggtctatcttagtccatagcgcgatttattcagcttacacacataatgaggttttgttgcatcttcaaatcctagaggttgcatcatgtatatatacatcttccttaagtactccgttaaggaatgtgttgttgacatcttattgtcgaatttccaaattgtgtgctactgcgattgtcaaaacaactcggacagttaaggatttgatcaagggactaaacgtttcaccaaaataaactcttagatgttgatgaaaaccgttggtgacaaggcgtgctttgaatctttagaagctgccatcaaaattgtacttgattttatatatccacttacaacctactatgtggggaatatgaacaatagtgatatcaaccaaaattcacgttcgattgcgataaagagttgtcatttcttcattcatagcacgattactcccctcatgttgaagtgcatctttgagagagtacggttc

SEQ ID NO: 98635 - DNA, 966 bp, Cannabis sativa
aattgagagctacatagtttaattttctcaataagagaaagatgactattattgtcccaacaagctttaacaatctgtgcacacataggctcacggcaccaagaattttcaaaacgaaaatgatatgtattgctactataagaacaatcatgaaattccaaaaaaattggtgtgtgatccgaagaggaaatagggaggtttgataaagttacctcatggaaagtatcaagccaaagctgggaaactaaggctcggtcaagccttatttccaccaaattgcctgagttacgtccacgttcccaagtgtagggatgaccgtgaagatccaagtcatgtaaggagcactcgtgaagcaccgactggaacccctcaataagtgcattcgggtacggacggcctccattattctcactttgattagcaatgttgttgaagtcaccaattaaacaccatgggagaggagaatcagcaaggagggtacgaatgagagcccacgtccgaaatcggagactacggtctggctcgccgtaaaaaccagtcaggcgccaagtagtcgtgcctgggactgtgatttcaaaatccacgtgatgctttgagtaaccaattaaccgggcttcttcatcaattttccaaaagaatgcaagcccaccagaccttcccacagcttcaacagcaaaacatgattcgaagcccaatttgaattttacccgatccaccaaatctttagagcaaagagtttcacacaaaaataaaaatttgggtttcttttgacagcaaatgtcagcaaggaattgttgggcccgtgggttcccaagcccacggcaattccaactcagcgtattcataataataggtgggcctggacaccagaacccacctttgagtcgttttttgaattgtttccagcatttgtggtatttttcaaagtgccataagttgaagagtcaaccagcccaatagagttag

SEQ ID NO: 98636 - DNA, 563 bp, Cannabis sativa
atcgcctatgtacaaaaggggaaggcacaaactggaacataacaaaagatgtgaataccccatggtgatgttgggcacactacgaatgaatgtgattacgtgaatgaagaaatagaaggattggtcagaaatggtcatttatccaattgggtacggatccaaatcatttatcccggatagggagtcggacattggcaactgtttgctctcaaacagtaaggaaccataaaatattcctcagggagtaggttatcctcatgctctgggaatacaagccccatgaactcaaactcttagcatgtagaacccttagggagtatcaaatgccgaggtgcctaagcccattccagcgataaatggtcatgttgcatccatatatggaggcccacatacttccgaaagtacaagaaattctcaaaagagatacctcaatgagttgggtcaagaaggagaaatatgttctcttgtacaaactcatacccagcgtccgtgaatgatgaatctcccaatcactttcacggaagaagaagcaaagtacgtacacttccctcacaatgatccat

SEQ ID NO: 98637 - DNA, 509 bp, Cannabis sativa
gcttcactcacaaattatcttgcttggtagcattagccagacatatttctcaatagcaacaacattccattgaatttttcttctaaatctcaattctccttcacttttttggtttgcaaatctcactccaagacaagacatgcactacaagaaatgttccctttactagtacagttcgctactccattggtaaaagtaacttttaccagcacattctgcaaactgcgctgacaaaaaggtcaaagttttaccagcgcacatttgcggtggctaaaatctaaattttacgcactgggaaaagtaatttttgctagtgcttttcattttgtgctgacaaaaattttaataccaacgttgatttgccaactttttttgtcaacacatcaaaaataaattctattttactagctaaataccaaacttttgccagcacaaaaatatactgacaaaagtgatatttcttatagtgatggaccatcataattagtcacccctttccataaaagaaa

SEQ ID NO: 98638 - DNA, 1315 bp, Cannabis sativa
aattttacttaaacaaaccaagtatcttcaagatctattaacaaaggctaatatgcagagtgtgaacactcaaaatactcccatgaatagtggtctcaagctttccacttattgtagtgatcctattaaagatgccactttgtatagatttattgttggtggtctgtaatatgccaccataatcagatttgaacttgcttttgtgtcaatttatgtaaaaccctttgcatacacactggactgtagtaaaatgaatcttgagatacattgcaagcaccttagatcatggctttctacttcgaccagttttagacttttcccttaatgtgttttgcgatgcatattgagcatctaattcagatgataaatgctcaacctttagctactacatctattttggtggcaatcttgttgcttggaaatctcagaagtaattcactattagcatatcatcgtttaaagcagagttttgtagtcttgcaaatgttgttgctgaagtaacatgggttcagtctctccttcacgagatgcacattcctcaagtagttgttccctctgcttggtgtgacaaccaaagctcatctctccttgctacaaatcctatacttcatgctcgtacaaagcatatcgagattgatttatactttgtctgagatatagttctacagtagcacattcatgtcaaacatgtccctgctactacttagattgctgactgtcaaacaaagtcgatctcgagcactagatttttagagcttagagacaaattgtgtgtcgtttctaaaaccacacttagtttgaggaggttgttaaaggtgttggttagttatacagttagttaatactattaactaactacacaattagttgagtgttttagttgagttagttaggaagttcttattcttgttcatatatataataattctttttgtaatcttttaattcaatcaataaagaacactcaattcctttctctctattcttgtctaaattctcacaaattctaatacaaacaatatatattaagaatgatgttcaactcatatagaaatatattgaatatgattcaaactaagtgcttaagttattatatatataagataaaaaaaattgagaatttaagttagagtaaagataaaaaagtggttcacaatttgtaaaaatatatttctactttagatacaacacatgataatagtagctattaaactttcaaggattttctatatattttagagagagtactttttttgaaagcattggagagagtactttgataatggtttgtttcttattttttgaaaaatattta

SEQ ID NO: 98639 - DNA, 698 bp, Cannabis sativa
ggttcacaaagaaggataatagaccgaacccgctcgaccttaacctgcttttggaaggggccgctgtcatttttgaacagatttggaaggagagaaacagaagagtccatgaagggcgatccactcctgtggaattgtgtgtaagaactgtcatcaaccgtcttaatgagttgcatactgttagagaggctccatcatttcttcaaatggattggcagcctcctccggcggggtggatttcttgcagttcagatgtctcaattggcaatacccaatcggcgggagcagcaatcctaagagatcacaatggaaccatcctgagaattgtcacatttcagacctcctacaacgaaccgcttccaggtgaaacttatgcggtttgcaaaggagcagaggcagcaattcaaatgggataccagaatatcatattccagtgtgattcttcttcagctgttgaagccttgaggtcacattacacggatattcaaaggctgcacttcaatatacagaatctggtccgaatgttctctgccttggttggacaacttaatctttgggaagtacaatggatccccagggattgtaatggtgtggcccatgaggtggctcggtgggcaaatcgaaataacaattttggaaacttcgatttgtccaattttgacgatttcctacagcacactactacaaacaaaggcctt

SEQ ID NO: 98640 - DNA, 646 bp, Cannabis sativa
  modified_base (262)..(267): a, c, t, g, unknown or other
gaaagcttataatcttttaaatattgaaactcaagaaatcattcaatctagagatgtttactttcatgaagatatttttccactttctgaaactacatctcccaaatctataaatgaagtattctcactttctttgctaccttctataggacagtcgcatactccctctgaggacatttcacctgttcccaaacatgatgacacttcatcctctaacagtttgcctgtcactaacactactcctgatgaagtaccatccacnnnnnngaacatatcaactacttctcctatcacttccacagtgggaagaattttatctaaacttaaacgtctttctgattacattttgtaataccactgctgcttcttctactgctcacactattaataagtatttgtcttacaataggttaacacaacactttcgagaagcagctcttgctgcccatacctttgtagaacctaccagctacaaaatgacagcaaaagatcccatatagcaaaaagccatggatactgaaactgatgctcttgaagcaaatgacacttggattgttgccactcttcttgatggccaccatgccattgcatgcaaatgggtatacaaaatcatatacaatgttgatggctccgttgatcgatgtaa

SEQ ID NO: 98641 - DNA, 1604 bp, Cannabis sativa
aaaaaaaaatcaaaagtgatttttaaaaatgatatttatataatggccaatatattatttgtaaattaagtgaagagttctgataagccattgttagtttgtaaattaacctagaactagaagaaggaggagatattttttcaatgaaaagtaaattaagtcaaattattttgtaaattttagtattttatattgttagtttgataagtttttctaaattttatagagtgtaaataagattttttaaaatataataacttttttttttgatgtaaaatataatataatagcattttaatattatggtattatggcttgttctaggttgaaggtaggtagaaatttaattaggttgatgcttgaatattttgaattgaatatacaggtgaccacgtgctttgaaatcgtattaaattgaatttaattatacaataaattgttgggattctttcatgaaatttcatgtgaccacatgctgtgaccatttcttatgtaacatagaaaatttaaaaattaattgaagaaattgattaatgttttctcctttcaaacctctttctttgtcaacctatttttctaagctttgaattgaaatctctgcatgcattagtagtaatggattttgcatcattttttatttttatttttaatctctggtggaatgaaatttgaggacgcgtttaaatttggtttttgaaaaaaatctattagaaagaaatagaaatttaattacgaaggtagtatataccgtaattatattatattttaaaatataaaatatatttaaatatgaggtagtaattacataaaaaaataatatttttaatagttaatatttaaaacattacactcaatccatacagttggaaggtccaaaaaattttccttttaaaattaagtattttttttctaaataaggactcaaaaataattttttttctataacttactatatttcaatatcgacctggttaaagtataattatatgatcaaataaacacaacaaatcgtataattatctctaattatacacaaagccaattatacaataacttttcagcgtcctaagtgttgctttctttttctctagaaggtctttcgttttgttttaaattttgttaactttggcatttacaaggtcatgtatgaaacggctaactgagtctattgactcccattattaaaaagagccaaataaagaaataatggtgagtcaagtctagtttagtctgtctgttcactccaaaagaagaaaaaaaaaacgcatggaagtacttcataggacggtgcttttggctccacaaaatggcataacaacaaagcatgaaatcaattcaacaccgacaaatcctttttctgcaatttcgtatacataaatttgacataaaataatgttttgaaagatgatatatatatatatatatatatcctttgttttattaatcttttagttagaatattattaaaggcaatttctttaatctcaaatcccaaagttataacgtgagaagaagatgccttactctaaacttcatttgtaccattatttacattttcaaactgtaaaatattacaagttggtaatgtgtgatgaactctctat

SEQ ID NO: 98642 - DNA, 849 bp, Cannabis sativa
tccttacagcagctttctcaaattgttcaataccccccacaatacaaaacccacattatttatatcacagtcacatgccacacacgtgagacccactcacacacaaacaaactcatataatagtagtaatttcacccttagtccccctggttcttttcctagcataaacaaaagtaattggaggcttatcaataccgccggctcggagtttcaccttgttctcaaggtggaaatgaggaaactgctcttggatgacagcaaagtcttcccaggtggcttcaaactccggaagatgtttccacttgatgagagcttgcggactagtgttgtgggtgcctggccgaatgtccagcagctcttcgggctccaagagccactcaagatcagcagtgagataaggagggaggggagaagcctgttgttggggaccgagggctgcacgaagcagcgagacatggaacacagggtggattttggcatcaggtggcagctgaaggcgataggcagcaggaccaactcgcgcaaccacaggaaatggaccaaaaaatcgtggagaaagcttctcattcggacgtttggcaacagtgcgttggcggtagggacgaagcttaacatagacaagatctcccacctcataggtcacatcgcggcgaacacggtcagcttgaagtttcattcgttgttggtctcgaagaaggttctgtttcagcaaggctaagatatcttaacgttcacgaagcacttgttcaacaacagaaacttgggtaccagaagagtcaaaccgaatgagaggaggaggatcccgatgatacaaagctcgaaacggtgtcatgcctgtagccgtgtggt

SEQ ID NO: 98643 - DNA, 639 bp, Cannabis sativa
agactaaaatcttaaataaaattaacaatgcgtggctcggcacgtacattcacctagtatatatatatattaactttaatataatgatgtgttaattagtagtggaaattgtataagatgaagaatttttattagttgcatacgtatataaaagaataataatatctgactttcacttatttatccaataaagtggatatcaaaaaataatttgtgtatcacttaaaattatttaataaatagaataatttttagtggtaaataaatatttaaatttattttttaacagtaatatgtaagttatatttttaaaattttgtaagtacttaatcatgtcaactaattattattcatgtattatttttttattagtatattaaaaaatataaatttaattaatgagttgaactagttaaagattgccacgtggccattgagttgtagatatataaataagccctaattattgcacaagaaatgttcttgtatgttagctattttaagttatatatttatgatcaaatagtgtgtatgcacaaattatgttgcataactatataatctaatatagaattattaaattataccaataattcatatcatatatattgtacctactattcttaaatatggtatata

SEQ ID NO: 98644 - DNA, 800 bp, Cannabis sativa
caggttgaaaagtcccaaagggagttgcccagagaaagaattgtaactaaggttgagatcaactagcttagtgaagactttgaattgcttccctgagattgcaccaccaaggctctttgcagaaaggtctaaggcaataacattagtggaatttgtgtcacaagtgacaccagaccaagaacatactgatgttttcccaggtgggatttctgcagaaggcaaagaccaatcattaagactgttatattcatctacaatctcagattttaagctcaaaagcacctctgagtagagatcagctgctgaaactactaagatgaacattgatgctgcaagtagataagagtacaaacaatggaaaatctccattggaacttgcagttaaagaaaataggccacaaatcttgacaccccaaataaagaaaatcggttgtgtcagattatattaaggccggaatttgttttgctcagagagagttagagagagagggagatgcatggggaatagagaaaaataaataaataaatgaatggtgcataaaaggagggaatgactgtatatgattagttgaattgagaatatattattgagctgcttttggaagcaagaggggacccttatgctgtttgttgatttatatggtgtttgccattagggaataaagccttcatatcaagagctcatctttttcttgcttttttccttaagagtatccaataagtttcctgcagtggtttaattttgaattgggatttggacattgtgggacaaacctaagaaaaataatatattatccttt

SEQ ID NO: 98645 - DNA, 507 bp, Cannabis sativa
tatatattaaatactatccttagaccccacagataagccacattgttctatgctaatatacatacacgtacatcatactatatgtgtattgccacatttttcaagatggggcaatggccatatttttctttattttttaattaaaattaaaaataaatacatattccatttaatttaaagaataaatataatttttatcttgaattttaaccttgaattcgttgttaataaacactacaaaaaccagttatttttattgacaattttttagttacaacataattttttttgtgactaaatgtgatttttggtcacaacaaaaaactacttgtgactaaaacatagtatttaaacacaagttgtcactaatttacttttagtcacaataagtattgtgactaagatcatatttagtcacaataaattgtaatttttgtgactaatacatttagccacggaccttttattcacaatataagaattataattaataattagtcacaactt

SEQ ID NO: 98646 - DNA, 597 bp, Cannabis sativa
  modified_base (45)..(54): a, c, t, g, unknown or other
atattattaattttaaaattatgatattaaaaaaattaaaaactnnnnnnnnnntaacatacgtgacttggcacgtaaaatctatctagtatataaaacaaatgcatattttattcaggggaacaaatactataccttataaatctacatatataaattaagcgtgtaaagatatgtcacaggcacataacttacgtcaaaatttatagtttataattatatatcttactttcatcaattatatttaaacaattgttaaaaaaaattatatttaaacaagaatatagtaaaatacaaaagagcaaagaccataggaaaacttctgctaagccctgcgcaacaagtaaaaaaaagcttacaaagttatgtataattagaaaaaaagttaaaatgcttttaattatatttttataattttgaatgattttttttatatcattgtttttatcatttatttgttaattaattgagttttgttacttttttaacaaattagttaatttagttggcatttgatttattaagtttgattaatctctcaaatcttatatatgtgtaggtttaattgactagtatatttttgttgggttttatgcc

SEQ ID NO: 98647 - DNA, 568 bp, Cannabis sativa
ttttcaagcttgatttgtgaagaatttggtgtgattggaagcttaatttttgggagaaaatctttgttcttgtttgttgtaatcttgacgtaattttctatgatcttagtcatatttttagttgttgaattttatgattaaaagtgtgaatttgatgatagtgatgataggttgcatgttcttagattttgtggaaattttgatgaattaatgaggaatttcatggattgacttggattcatgtttgtgagattggattgtaattatagggtattattctgggttgaaatttatgttatattgttgtgtgattgctggaaattaattgaggaatttggctttgaagctcttgagtatgagcttgatgtttgcttagttaagtatgattttgttgtgtattctcaatctgaaatttggtattttttttatgaggatttagatgcatttgagttgtgattgttgagccttaatatgcgttttttaccctctgtttggttggggttcgaaatctaggaaaagttggcatgtttaggccttaaaaattgagtttttgggtgttctgaaccca

SEQ ID NO: 98648 - DNA, 1706 bp, Cannabis sativa
ttttttttttttttttctattatggatgtttttctttctttaatttgttgagttatacaccatattgctttctttataataataattaaaattgacttctatttaacttttttttcttcttttcaatgaaggttttttttagtgtcaacagggcaatgaaaattgagtttaacattgtgcagggaaaactcagcttgtcgaattacatttttaataaatattttgattaattaatacataaaatcaaggatgattgaactatatttgaaattattttagcaaacaattttttttttgaaacagaatactaacaggaatttaacagcaaaatggtataaacctctcaaatttttaagaacattcgttccaagtagtacatacagctcccacttaaatagccacttgtaactatatttgtacataaggaataattagaaatggtgacaactttgacttactagaaaacagcttgtggaacttcctctcagcaaacattaaaacaatcagaatcgaaaaaatagatgctctcagaatggcaacaattccaaaagattcttcttactgaaatctgaaaatgccaaatatataaataatcagagcatcaccgagctttctaaatgtgcaaaagagaagtctaacatctattttctgcaagtgatgttggttaacgttgtcactgctgaacatctattttgtgattagcatcttctttgacaaatgctaattcagaagccaaggcaatatgatcgctaccccatttctgcaaaacagttaagaagtccatacatttaactgaaattatgattgagtgagcctatagtaaaatttgactgaaattaataattcagttacaataaaaagctggtgcaaaatataattggaagaacaaagtaattggtggaagcttttcggggaaagaaaaagatacgagtattagaccttaggaagatacttttagacaactaattcatacagcatactcgctttatttattattagcattggagctgaatattaaacattcagccatacatttaccaagacttgaacttaaaaccattctccaacttgagcttgcatcaacgtagctcattggactttttatggtaattactaactacataacattttcagcattgtacctttgttgggaatcctgaagttgtttgcataacgtgttttggtataggagatagcactttgactgtctgtaagccttcagaacgcctgaatagcaaaaccaagtatgttttatatcgattctgttttattattccaacacgaacagggcttttaacagaaagcacaccagaagagaagaaacataaaagtatttaccaaatgtagtcaactgttcccaagaaacatctatgataactggttacaagaggctctccatttgaatctctagtacccaaacaatccttccaaaatgtatagagagaaaaaaaaaacaaattataaagtattttgattaaaattattattatctaaaacatgaaaattggcttacaagatttacctcgacttctgtatatgtgcttttaagcttcaaaggatgctccacaaaggtacattttgcatcgcctgtggcagtttctatgtctgcaggagtccataatgatgggtcataaaaaaatttctcaacttcaataggctgctctggatccaaatctgtggacaagtcaccttccactcccatgttt

SEQ ID NO: 98649 - DNA, 530 bp, Cannabis sativa
aaattaaaagtcacccataaatttctcaaaaaccaagaattttagttatatagacacactttatatagaatagacatataaaaacaattaaaatatattttttgtagatgttgaaaacagaaaacaattctacaatagaaacaaaagcgatgcatactaagaagctccttatctatatatcactctaaaaaacttaacaaagaaacattaaccattttttttatattttgagaaaattttgaaaggataaaaagatctaggagaattctacttgacttggtaataataataattctaaggcaaaaatctaaatagcctaatttcaaacataacaattagaattaaatttaaacctattttttactttagaaagggatttatactgttattttgatcaattttaaagctcaaggttagaaatatattctagtaattatacaaaactaaagttaaaatggtaattatcaaatcaaaagtaaacaaaatgagtaatgataaacgagaactacatacttttttttttttttttt

SEQ ID NO: 98650 - DNA, 1192 bp, Cannabis sativa
taatatatatagtaaaattatatacatggtatgatacaattatgacaactctattttagtttaatttgggggctttttatatataattataaaatttttttgagtggatttctaaccgtgagtgtatttgtatgattatatatctatctctaacatgtcaaatatacataagctttagaaattgaaggggggccacagcccctgttggggtatatgtggcttcgcccctgaaccttggacaggtttggatattgcaactactatttgtcccacatcgttgtgaatcacagctccaacatccaacactatagtttcataattaacaacaacatctacattcatctttaaacaattagcatcatgtggctttcatgggacaccctctaccagttgaatactacaaccagggattacaagtagctttgcatatttatgttgctttcttgtaggcttagtaatctcctagtgacatcattttactcaaatacagttattaaaataatttattgcataagaagcaataaaagactcatcatgtcgagaccctttatggaacactttgttcctctcagtccatataatccacataatacatataaaaagttatagattaactttggataataaagatgggaggtgaattaaataatctccattaagcatatgtcgagcatatagtagtaaatatgtgtgtgtcatgccggcttggcccatattttgaaaagtccacaataatatggatcgtgtcataccgacctatagaaagatatggggtgtgcagtgttgtgctaatattttaaagagtagtaagcccgacacgacccgtaagcccatattttcgtgtcgtactcgggccaacccattttttataaatgagtcagcctattttcttatatggctcaaactcgggcttcacttttctattatttttttacaattaatgagttaatcactaaattatatgtatttttttttttataattttaattatttttaagtgtgtaatttttcaacaatactttgcacatatctatataaaaaattaactggaatgattaaaattacaatatttattggtaaatacatttgaattattattattattagtatcaaattataagaattattaatgtgttatatttttgggctagtttattcgtgcttacatgttgtgcattcgggcttttcgtat

SEQ ID NO: 98651 - DNA, 582 bp, Cannabis sativa
  modified_base (283)..(285): a, c, t, g, unknown or other
attaataattcacataaaccatcaagcatccaacaaacagtatcgaacataatcgaattttactagacaagaagtcttagtacataaagtaatcgaacaaaatctatcaattaaaaacgaaataaaattaatacaaaaagaacatcttcaaagatatatatcaaacaaatatcgaacatatactgatgtgtatcgaataatacaatgaaataatatcattctacatataataaacaatccaacaaacatcgagcaaggatcaatatctatatatatatatatnnntatatataaaggaaggttttaaggaattgatgtggcatgcctaagattcttataaccttccatacttattttttcttttttctaattttttaataattttgtatttttttatatgttgaccaaaagtcatatgtatcatatcaatactatacttattgctaataatttttattttcacaacaataacatatccctttatatatcatctttaaaattatttattatcaatcataatatatagttaagaaaaataaattttttattttttatttcttttttatactaaaaaatcacaaa

SEQ ID NO: 98652 - DNA, 4734 bp, Cannabis sativa
  modified_base (34)..(59): a, c, t, g, unknown or other
aatgttatttatgatctttattaactagtaaatnnnnnnnnnnnnnnnnnnnnnnnnnntagggcataaatcccaacactttatagaaaagactagacaaggctaaaagaatatgggaagatgaactcccaggagtgttatgggcacacaggacgacgataaagacttccaccagggaaacacctttctccttaacctataaaacagaagaagtcattcccgtagaggcaaggctccaaccacaagattttaacacacaatggatgctaaaaacttgcaaaatatggctcacacgcttgatatattagatgaacaaagagaacaagcactgataagggttgcgacatatcaacataaagtggcgcaacattttaacaagaacgtgagagtttgtcagttcaacgttggagattgggttctaaggaaactttttcaaaatacgagagaagaaggagctggaaagttaggtccgacatgggaaggaccttacaagatctcaaggatagtcggacaaggagtttacaaactccaaacatcatatggacgtgatgtaagcaacagttggaacgttgttcatctaagacaatattatatctaaactatcaaatttatttcaattttaagttttaatttcaatcatactcttttcaccttactgacttaagcatcggagggtagacgactttgccgtcgaccgtgtcccctgacattttaggatctaaatacaaacatcacaaggcttggtacttgaccgtcaggtaaaaaaatttcaatcaattgaattttactgcaatatcccaatactaagttaagctttggaggattgacggcttttccgtcaaccatgccctttgacattgcaggatgttacttggaatgatatataagcatttgacaaaaattgcaatgatccagatacgacaaaagtccaagcatcgacattgtatcatgcccatacttggactggggaataagatatgagcatttgaacaatctgaaggagtaaactcatgacaatctgaggttaaaaaacttttataatattaccatttaacacttatttagttcaatataatctttataattattcaaatggtacaacctaaaataactttatgcgcgtaatcaatctcaattaccccttcaagaatcatcatttttaccaaagttaacccctttcaagtctaactcgagaagtaaactcaaatttgtctttgaggaaataaagaaaaacaattgaccaacacctcaaaatcttaacactaacgcctgaaatgtaagacggataggaagtcctaaagtggcactctttgctgagtgataattctaggaaggattcttaaatcctacgaaggatgcatgaatcccattatggatggagagtcctagagttgcactctttgatacgtgacaattctaggacagatgcttaaatcctacgaatgatgcatgaattccattacagatggagagtcttagagtggcgctctttgctacgtgacaattctaggatggatgcttgaatcctaagaaagatgcatgaatttcaatacagatggaaagtgtataagtgacactctttgctacgtgacaattctaggatgcttaaatcttatgaaggatgcatgaatcccgttacggatggagagtcctcgagtggcactctttattacgtgacaatttaaggacgcgtgcttgaatcttacaaaggatgcacgaatcccattaccgatagagagtcctagagtggcactttttactacatgacaattctaggacatatgcttaaatcctacgaaagttgcatgaattctattatagatggacagtcttagagtggcactctttggtacgtgataattctaagaaggatgcttgaatcctaagaaggatgcatgaatcccattacagatggagagttctagagtggcactccttgctacgtgacaattctaggacatatgcttaaatcttacgaaggatgcatgaatctcattacagatggagagtcctaaagtggcactccttgctatgtgacaattctaggacggatgcttaaatcgtacgaaggatgcatgagtcccattgcgaatggagagtcctatagtggcaccctttgctacgtgacaattctaggacggatgcttaaatcctacgaatgatgcatgaatcccattacggatggagagtcctagagttgcattcttaactacgtgacaatgcatgaagtaatatttgctattcctagtaacaaggcaccaggtccagatggctctgggagctcttttttccaaaaaatttggagcatcataggcactgaagtagctgaagcaatcatcagcttacttaaaacagggaagctgctttgagaaataaataacactattctaacacttgtgcctaagttaaaaatgtcctaatacagtgagagattacaggcctattgcatgctgcaatgtgatatacaaggcagccaccaaattgatatgctcgagactcaattgtttattacctcaactggtagctggcaatcaaggaggaattgttcaagggagatttattgcacacaatgtgatgatatgccaggatctgattcgacattatggaaggaagctgacaaagcctagttgtgttatcaagcttgatttacaaaaagcttatgacacaattgaatggaacttcttcgaagaaatgctgtatggactgaagtttcctgctcagttcattcaacttgtgatgttatgcattcgaactcctagattctcactgatgataaatggatccttacatggttactttgaggcaaaaagaggactgagacagggtgatcctatgtcccatttgctctttgtactaggtatggaatatttaacaagaatcatgaggaaaattgggcagaaaactgatttcatctttcaccatagatgtaaggagttgaatttgaatcatcttatgtttgcggatgatgttcttgtattttccaatggtgattacaagagtattatctacttgctacagggtctcaaactgttttctcagacatcggccctgcaacctaatccttctaaatctgttatttactgccatggaatggctcattctgagatccaaagggttcttgatgcttcaggtttccagagaggtgaagtccctttcacctatctagggattcctatcagccttaaaagattatcaccaaaggaatgttccagtttggttgaaaagatgacacagagaattagagcttgcagtactcgacatatttcttttgtaggcagagctgtccttgtaaactcagttctcctagcaatttcatacctattggagtcaggttatgcttcttccaaagacggtaattaaagagatagaaagcatttgcaaagcttttttatggaaaggacaacatatgatgactggagcagggcaaatagcttgggaaaatgtatgtcaatccaaaatagctggtggaattgggtttaaaaaagttgctgaatggaataaagctgcaatgttcaagtatatctgggaaattgcaaccaaagaggataacttgtgggtgaaatggatacacagtgtatacatcaaggacaaggattagtggagctatgaaattcctcaaacaggcagctggtactggaggaagattgtagctctaaaaggtatgttgctgaatttagttgatcctaccacctttactcaaacgaaatataatgtagctaatggctacaaatggttgtgtcccacggtctttagggtcaattggagtaaggaagtttggaatcgtttaaatacacccaaacacagttttattttctggcttgctattcaaaatagattgaaaaccagagatcgcttgctcagatttcaaattgcaactgatccttcttgtttgctctattcggggaatgcagaaacttgtgatcacttgttttttcactgccctttctctactgagtgcttaaaccatgtcaagatttggctgggatggaagactccagcaacctccttaactgatctggtgcgagttatagagaagggatcctcctctcttccgaagacaggtccttactactgcctgtgcagcattattgtatcaaatttggagagctaggaactctaggttgtggcagcagacaaaagaagactcgaaaaccattgtataaatgattaaacatacttgtaaaattagaatacaaagtatatggcctagaaaagtttccataggtgactcaacatggtttagtgagttgtaaccatggtaatcaattggaaaaaaaaatcatcagaccttgttttataaaaggtgttgaataggttgtaaatgtcatttggagtaatgaaaaacactgctgatttctcaattaaaaattctaagacagatgcttaaatccgatgaaggatgcatggattccattatggatagagagtcctagagtggcgctctttgctacgtgacaattctaggatggatgcttgaatcctaagaatgagcattaatcccattacatatggagagtcctagagtagcactctttgctacgtgacaattctaggatgggtgcttaattcttacgaaagatgcatgaatcccattacaaatggaaagttctagagtggcactctttgctacgtgataattctaggacggatgcttaaatcctatgaaggatgcatgaatcccattacggatggagagtcctagagtggaattctttgctacgtgacaattctagg

SEQ ID NO: 98653 - DNA, 1256 bp, Cannabis sativa
  modified_base (958)..(969): a, c, t, g, unknown or other
ctatgtagaattccgtgaaaatgaaaaaaaaaaaaaattgtttttaagtgtaaaaatgaaaaaacctttttctatgaacatctaagttgaagttatttaaaactaaaaaaacaaatcgcgctttacgttgcggttttatttttttaattatatatcaggtcataaaaatatataaaattttaattttgatatttcttttatttgtatttctaataataaaaattaaaaaattctcaaaaaaaaatagagatctaacaaataaaaaacgattgataaatttatatatataaaaaaaatctataattttaaaattgttatcatcactgcatctctcttttagttactattatattcaaagtggataagatctaacaaaaagacaatcgataaatttattaagaactcatcctataatttcataatcaatattattaccatatctcacttgtagtcactactacatttaaacctaatatcatcactattatacctaagtgaatctagataaattttgacatcacactattaaacttgcactattatatattaaaaataatctttttgtgtcctctattttcaatatttgaaggtacaaattaaatcataaaataataaaaaaaaattgtagtatatcccttaaaaagagttttctaatagaccatttatgtgcttcgacatctacataagttttttagttcaattttctttttgtaatcacgcacacacattgtagcttatttagaaacacctgtaaatttattaaaaattttgaataatttacagtgttgaataattatatgtagtattttaaatttttttcttaaaagaaattatttttataaaaataaattaataggatggtgtaaaaaaatattacggtgtttcccataatacattattattattattattatttcaagtatcacgtacaactcattctttattattattattattnnnnnnnnnnnnattattattattattatatctttaattttatttaaaaaaaaattaaaaacaaaaacgtacacattagagttaatatttattgttgctcctgattttgcccaaaataagtagaccaaccggatgatgacacatagatggaaagggtttagtgtttaaataaatcagctaagtctctttaacaaaagggatcatctttagacatacctcccggagaaggcatgtaagtctcacatgctcccggagagcaaggctacaacaaagcttctccgggaggtgtcagatcctat

SEQ ID NO: 98654 - DNA, 548 bp, Cannabis sativa
tgtctatttgtgaaataattcctaaataatactaatgtaaaactacatatttgactataaatacaaaattaattgaagaaaacgtgaaacacatattaaatgatgatttaccagcagtaattaataatacatataaaaagaaaacgctttctcgaagttctaatgtctcaagttaataattgataatatagttcataatgataatgacgatgtaaaatcgaaatcaccggagaatttgtgtcataaatagtttgactttgattaatttgtgtaaaagttacttattaaatgataaaataaattttgtattttttaaatgtactgtaaatataagattggactcaaattttaatattttttttattataattaatctaaaaaaaattcctatacgaataatgtatttagttttatcataatacttattgattaatattattaaattttattttgacaaagtattaattcacgttatatttatactatttttaaaaatataaaatttattttattatttaacaaaataaaaaattcaattaataattttt

SEQ ID NO: 98655 - DNA, 601 bp, Cannabis sativa
gaaagtttgattatttcaaaatcgagtaaataccaagagaacaaaactctaatgtcgatgccttagcaaaactggcctcgtagaaggatttggaagaattaaactttgtttcggtggagatgctaaatgaatcgagtatatgtgagatggcaaacatcaagatgatatatagtttgcccacatggatgactcctataatcaactatctactcgatggacaacttctaactgacaaaaatgaggcacgaaaactcttgtatttagtgcctcgctacacgatagtagagggcgaattgtacagaaggggctattcgatgcctctcctttggtgtgttcttcctgtagaagcaaacgagatcatcacggaaatccatgaaggcttttgtggggatcattcaagttggcaaagtctatcaaaaaagatcattagacaagaatattactagccaaccatcaacaaggacacacatgaatttgtcaaaaagtgtgatttatgtcagagattctcacatatacctcgcgtaccaccaacggaactgagaatgatgacctcaccttacccatttgcgatatgggggattgatcttgtaacaccctaact

SEQ ID NO: 98656 - DNA, 1048 bp, Cannabis sativa
  modified_base (985)..(985): a, c, t, g, unknown or other
aatttaaattttaaaccattataaattgaatgtagtcataaactcgatgaaattctctataatattttgttcctttaattgaatgtagtcataaactattatattgtatagataataaaatgtacttctataacacatacaagcaaaagatagaatctcgaaaaaaaataacaacttaaaactaatgtgaaattagtgatataaaattactaatacatatatatatagtctcaataatggttaagtttttgacctccaaagtgatggttctcaagaagatttttcgacaaagattttcatctaaaatcataaaattaaaataaaaactttattataaaataaataattcagattaaagaaatatatttttttccaaaaaaaataaattcaaaaaatttaaaacgaaagatacaatttagttgagataaaaatcataaaattatataaaatccaaaattattgatacaatttcaaattaaacatatatatcacacaaagaaaatttaaagaaattaaaaaaaaaaattaaagatacaactattttgcaagatgaaaaaaaaatgaaaaattaaaaactcttactttatatgaaatcaagataagtgacgtacaattcattcaattatttgtcgaatgtcttccttgagatagactatgtcaagacttggtagtagagaaaaattactacagatatgatatttgattgtggaattatttaatatacctgcaaactatataattatacgtaagtatgagaaaaaattattctatatatgctatatatgtaggaaaaagacaatgtgatgataatagtgaagagagaaaataaaaaaagtgagcagccaaagagaaaagaaataataatattgagaatatgatgataatgatgaagagaaaaaataaaaaaaaaatacagtgaaaagaaaaataacaataatattcttaattaaataatattttagaaatatatctattctatataaantgtgcctatataactgaaatttttggtttataagaaatttatgggtgactttttatttttatt

SEQ ID NO: 98657 - DNA, 2261 bp, Cannabis sativa
acaatcacaaacaagtaatacaatgataagtaatcaaggttcgtatccacaggaacttttacattaaatgatgcaaaatcaactgaaagcaattcaaaaatttgaaataaaaagaaagcaaaagaactaatcaattcaagagaaaaattcttaaccttaattctagagttgagaaataatattttaagctaaataaactaaaattaagaagccaaaagtgattaaagttgtgataatttcagatttagaaaatagacttgggtggttaaattccccctggtatgttccaattgatacagcaatgacttagcaatcctgttagagttaacatatttcaaaaaaaaaaccagcaagttttttccaaaacctgtaatataccattcataacatcaacaatgcattcctacaaggtagcaaaatatgcctatatcactactaattaatacctaaaagagaggtaaaaatcatgcatcaattagatgggttcaactaggtcttacttttccaagtaagatctagcttagtaaatgttaaatctggcaaaaaattaaatacaatcaacacttcatcacatctaattgaacaaagataggattactgcaaccattgcaaatcacaacactagttcatacaagggttcataaccacccaaatctcaaagatcttagttcatgtttgaaattaaaaacctaaaacaagaaattaaaattttcatggagctaaagagaatatcaaagcgtatgaaatgatacaaaatggaagaggagagcaaaagaaatgagttgatgagctcaaatcttctctattgaggttgccttcgtctgcttcttcttactctttttcttctcttctttgtactctctttttttttttctgtacttcctttctgaaaaagtcgtactccttccttcattcaagtgcaaccaccatctatatctctatatcctcctggctgccccccatttagggcactaaagtttacccttattagagatccaagtcattgtccacttgtccttctttttccagacattggctgactcattgtacacatttttaccacataagcatcatttattcctcattaacgccagctggaatttctgcgaaaattgacttattgcgcttgccaatggctatagcattgacagtcagcatcaagcattttcctgctctttttcttcttgtcccaaacacttcccaacacccattttagcctttttttttatgcttaatatacacaaaaacagcaacataagtctatgtaacacttaataacacacacacatttctatttactacaaagacacaacaaactaaacacaattacataaaatagacactaattactctactatttagtttaaaattcaagtttaaagatatcaaaataactctaaatcttagagttgtcaacaccccaaacttagaatcttgctcatccttgagcaatgacaacataaaaataaaacacaacaaacatatttttacacatgactcaacacacaagacaactgagagattccaaagaaatttaaaaatgacctagcgaacattgatgctctcagaaaaatggaatcaagtggaatagaaaaatatttttgccataactttatatgctgcccctttaaagttttctcactggatatcaataatgcctccccatagtcacctaatcaataatttatacaagtatatcctaccgaagctttgaacgtctttacaactatattaaaaattttacattcattaaagctccataggttggattagtgcactcccctcaactaatgtagtttaaacttatccccttgatcaataggactttactaagcttgtaatataaggcttgggttaaggtatggtaaaggatgtattttagctagctcaacacctaaccacttcacttgtcaaaaaccgagtctctcccccatgctgattttttctctcttgattcacttccctaactcattatactcacaagtacttggtattgtaatagacttctcttgctatgtatattcttttttaaaaaaatgggggaacaccccaaactcaattgtgagcacactatttttttcgtcccccttttgttgctgttttttttttacatatatatactagacaagaaaattatcactatagtacacttatataatagatagtaagagaatattgattgatagtacataatggtgtatcttatgagcaaattcccccaccccaaacttacaacccaacattgtccccaatgtggctaa

SEQ ID NO: 98658 - DNA, 1029 bp, Cannabis sativa
aaaatttctgtatctaatttgtacgatatatatttgtctcaggagctactctgggaaaaggtttgaataggggtttggctaccttactagctggggctttaggtgttggagctcatcatttggcaagtttatcaggccaaataggagagccaatacttctgggcttttttgtctttttacaaggtatatatatatatatacataatttgataatataagttttattgattgttacacttaattatatcgtatttattaaatgtttttttttggcagctacactatcaacatttgtaagattttttccaaaaataaaggcgagatatgactatgggttgttaatatttatattaacgttttcattgatatcggtttctggttttcgagacgatgagatattggaaatggctcacaagagactttccaccattttcattggaagttctgtttgtgtgattatttgcattttgatttgtcctgtttgggctggtgaagatcttcataatatgatcgctctcaacttggaaaagcttggaaatttcttggaaggtatattaatatatatttatattatttaataataataacactcaaattaattaatatatataaataaaaggacctgatgatttataaaaaaatatgtctaaattaattgtgtatattcatggctcatatcatatgttgccgacttaaagacatgaggttattagaataataaatatatatatagagcattgcaatctgactagtatctctagacatgttgtattgtaattgattatcgatactttttaaaaattattatattagacaatattaagatacttataattagatcaatagcgatagaaagtgctaagcacaacgggtacctttttatttctcatatatatatagagacatgattttgtctcgtgattgtactttcacggaatgtattccgtgatttacggcagccgttagatgagggagttatttgatctgagggttgagattgatctagggggaattatggttaaaaaatag

SEQ ID NO: 98659 - DNA, 835 bp, Cannabis sativa
  modified_base (782)..(786): a, c, t, g, unknown or other
ctcacgtggtctgcctcaaccacaggttctttttgaaggagagtctaccaacaagcaacttcattatcatggatcagttgagacaccaaacaccttggttcggccaacacacaatcacaatcgcaatcctcccataccaccatcagtaagtacaatttttaccaaccttgctactactcttactattgtccctactgccattcccccacaattattcaccactcaatctcatgttcagaccagtcaccctcacaccagtcttcacaccaacagtacccaaacaaacactcctaccagcagtgcacatattgattcccaaaatagtcacactaatatcaatcttcacaccaacaatgcccaaactaaccctcatatcagcagtgcgcatactaattctcataccagtttgccatgtgcttcagcagtccccacttacagcaatcaacccatcactgatctctcccacatctacatgcttgaccttactgatcatacctttgccgcataccctttactaacaaactctgtcactatttccccatctaactaccccatgaagcctttctctacttacattgctgctgtagtggctgtggataaggaaaatcaaccaacaaataccaatattaagaggccaaatgactcgctatccatgaggaaaatgctgaaaagatgtcgaaatatccaaggatcaacatcttctcctttgtaaagagatgatgatcatgagatgctagttttcgagtttgaggattctagctgttgggaatattttaccaggnnnnngatttactaacaagtatgttgaatcaacatcctaaatatgaatatctct

SEQ ID NO: 98660 - DNA, 735 bp, Cannabis sativa
ggcatataagcataacatataatgagaatggataatatagtagtactatatagtgtgtgctttgcttataatgtgcctttgagtgctccataaatgtcgccaaaaatatgcaaaggcccctcaatcacaaccaataatatgtgtgctaccactagtactattattaccaatttggataatatatctcttttgacaaaaaatatcagttgaaaaaaatgaaaaagaaaaagaaaatagtcatatggtaaaatgaagaaaaaaaaaactttgattattgacccattaacatgcttgtaagtgaagtcttctctttcccactttctttttaactaatcaaaaacaaaacaaaattaaagctaacaaacaaagtaaaaacatgttatataatttgatatgagagtgaatagaaatctttcattaagtatggtctattaaatgggttacataatgtaaataaagagcatgataaaaaaacaaaggtctcttctttgtaatcatttagatttttgggatccaacgtttgaaaacttgtcctctttagtctttttaccttactcttttgcctcttgcttatttcaaataaatgaaaaataatagaaaaagaactctataacgtatacttttcttttctttgcctttattccatgaaagaatgtgaaaaacccaactaccatcacaatatattgaaagcacttcactttcttattttgaataagggcaatttggtcattttac

SEQ ID NO: 98661 - DNA, 1177 bp, Cannabis sativa
caccttccggctcctccccgccgctactgcttacagcggcggctccggtttcggctccagctccggagccgcttcctttacggcttcgtttactcttcgataaactcatggagctctgaacatcgctactctgtttcgtattatcttctcctcgcgccgccatagtctcattctcatcaccgttaacgacttttccgggttcggattcgggtcgtggaggatccgaatcatttctcctctctggttcgggttccgtttcggatttcacggcgccgtttcgtcgagaggtggaattagactcgtcggaagatcgattctcgcggtcgcaagaatcggaattcgatttcacggcgagattattctccggtgagttcaatctacgttcgttttcttcgagattgatcttatcttcgttttcttctttcaaactcttttctctctcttcttccaatctcttcaccttcaactccaacgacctgttgagaaaaaaaaaaaaaaaaaaacaaacactcgacttcttagatctgaaacaaaaaccgaaactcctgactcagatctcgaactgtaacgaagagatttacacgatcgaaacgtcgcgtcgccgaacctcgcggcggagctcctcgaggcgaatcttcttgagttggtcaacaataagaaggaaactcgttgattcatcgtcgtttcgtgaagtgaaacgtcgtttgagttcatcaaacctgtgtttacaggtatctggagtccatggggattcagttcggttggagagttccatggcgatggagtcccagttcttggtgccgtgccggttaacggcgcacgctagcaagagttcctctaacgtgcaccatggttggacgctcgtttcgtgttccttagccatactctaatcatgtcctcataattttcaaaattagggtttttcctttcgttttttttttttatttttttttaataaatattatttttcaatgttatataaatatatctataggtttttataaagagatgtaattttgtgatctttgattttgagatctttttgtggtgtgttgttgcatacatatatatgttctccaaattggattcaagtgagtatagtcttcttttgggttttaggcctttctcgagtactttttagggttgttgggccagcccaattgatattttatttatt

SEQ ID NO: 98662 - DNA, 812 bp, Cannabis sativa
ggtaaaataaattccaacaccttgccttcgaatttattgcccggttatttggggatggaaggaagcagtcaagaccccctaggtacccaaccttctccaaattttttaagtggccctcagttatgatggacagaagacacacccatctagctgctaaggcacctcgcctcttatgggggaccgcctcagtaaacttctgggtgacatagtcttcccccttgaccaagacgtcaccgagcttgaacactggctccccaaactcaatatatcctccaaaacgtacaggccgagccactccctcctcctcaacctcggaagggctatcaagacggacgtcctcctagtcctctatctcctggacctcaacgtccccctcgtaatatgcctcctccgcgttgggcagatcctattccacacttggcagcgtggcatgctgggccacatgaggggaaattgcatcaactctccgcatcgtctgttttgtgcgggccatcatgcttctcctggatggatattggtgtgtatgtcgcacaacagtgatggtaggaatagcaatcagaatgacgaaggctccagagcttggatgtcctacaggaagagtgtcaacaacactagcctggacgatataagtccagttggatggaagataacgtctccaacccttcctatgctcccaaacaaatcccccatagccttctcctgcgatcttctcggagtaaaagtgatgtttcacctcgggttctagagtaggagaacgttcactactcacttcccaatctttgaaatttgagttagaaaatccatcactcgaa

SEQ ID NO: 98663 - DNA, 2510 bp, Cannabis sativa
  modified_base (1706)..(1713): a, c, t, g, unknown or other
agtagtggtcagggataataagggactcttcatcgagtgtttcacaaaagtcttcaatgaagcattggactctgctttggcgaaagcaatgggagtgcgggaagcactgggcttattaaagaagaaaatgtggcaacaagtttttattgagatagattgtttaacgacggtacaagcgctccgcagtcaagtcaaaatgatctctttatttggtattgtaattaatgattgtaagagtgtgcttaaagagttgaaaaatgtctctatttgttttgttaagcggttagctaatatgttagctcatagtcttgctagagtttctattttattccctaatcgtagtttcagtctgagggatgtcccaactgagttgctgccctacttggtagctgaatttgctggttaataaaagtatattcctttaaaaaaaaagtaatgggataaaaatagtaatgagaattaattatgatgtttgtttcttgttggaataaatattcgaataagtaataaatttacagaattatctctactttaatttttattcttatataaaaaagagtattcgagccattttatttttacttttatttaatatttgtgattctcattacatagtttcttcaatataataaaaatttcattgcataatgtaatcaccattacattgtaatctcattatatcacttttaaagaaaaattaaagattataatagtaattttgattccattacatcaaaccaaacatgaccttacatgttaattaatatttttgtgttattttattagtacataatggtagaaaaaaaaatcatgacttatatttaaacaacatgacagatgatacacattatctttaagaagaacctgtatcacactatctttatttaaatataattgataaaagtaagatatatgattaatctacagattttaacgggagttacatccctctagcacatctccacactagtatttatatatagagtaagattatcatagaacttagcatacgttcactaccggtaggaaaacttttttgactattaattttaaatcatgtggtcattatgatataaggtgtatatttttatgataggactgttgtatacaattaaaactttatacatattctaataatatttaattatatattttatttaaaaaataaaataatattcataattaaaaaattattaataattacttttaattattatttttttaaaaaagttaatttaaattatttttatataggtatttattttcaaaaagtaaatttacttaaaaattttgctatcaatttttttaggggtttttttttatttttacatttcaaagtagctttttttttttttttttttttgcatttttatgaaaattcacatagccactcacataataactaactgagcaacttaaatcgcaactcaaatccacataacaactaccaaagtaactcaatccgtaaatttttttttaaaaaaaaaaagttaaaaaaaaaaaggtatatgagctgattctctattttttatactaatagttaactatcacaaatctgaatttcttaagtatttttgccaccaatttatttacatatatagttctatcataattattttttaaattagtttactttattaatattttttaaagaaatgctaaagggcaccagtggtgcttagtactctcttatgtgtcaatatcgnnnnnnnnccaactaagtatcgggtcccatataatttaatataataactttaagagagtatcgctagccaatcacaacgcgacatgtcgagaaggtgctaggcactactggtacctaatagcaatgcttttttttttttatcaaaaagataatttctattaattaaactaagttaattacatttaaagaggattctattaaatttaaatacattgcgcatcctattaataacaataatcatcacaaaaatatgctcataaatattcaagatcatattctatttagagcattaaatgcaacaatacacatacctttattcttgtgtaatgatcctccatgagcaacttaaaattattaactaatttttagggcaaaagaagatttaatggatagcaagccctttatactcaaaccttaccacctcacaacctcttatctttttatccacgcccaaacctcttcttatatgtcttaattatcctaagggataaatggacatgttatgggggcttataatactaatggtagaggactatgatttaatgggccaatctataattattaaggtactatgtacctcaaataccgttaactacactaacccatctaagggcggaggtagtttaggaggtagtgtggtcatggccccctcaagattttatgaaatgtataatatatatatatatatttatatagtgtagctaaattattgttgaccgaggttttcggcaactaataaaatatgaatataataatgagctgtaagaaagcgagatgaagactttttacgtggttggggggttaa

SEQ ID NO: 98664 - DNA, 505 bp, Cannabis sativa
acccctttggcccttaccaacctacataccaacaacaaccgcaaccacaaccgccacaacagcaaaatttgttaatgggtccgtcaaaccctttcggcgatgcaggatttggggcatttcccgcaaaccctgcttcacacccacaaaataacaacccatttggagccacaggcctgctgtaatgaaacatttgttcgataaacattcggaagaaaagagtagaaaagtgtaaaatctacttgtgaaattggtttttgagtgcacttgacttgtggtggtgttagtatagataacaaaaaaggtggggattgggttttgattttggccatgagagctttttgggcaagaaaataacatcattataatgtttggtataaaagcactgagtagtagtaattagttcatacgattcaattatcatttctttttataaatgtaattttcaaatctatatttttttttcactcttagatggcaacacacacacgtttacatatgtggtatg

SEQ ID NO: 98665 - DNA, 589 bp, Cannabis sativa
tgagaacagtcctaatattttcatgtggggcggtctgtacttagctttgcccttgtacatgacattaccatatttacatacattttagactttaatcaattttattgttatttattattaaaagtattatcattgaaaatatatactattgactcaaaatttagttaaccagcaacggagtcgtatttatgatagacaatcgccacgtgtaaataagaacaataaatgataaaagagacacaaagattaatagaggttcgacccccttgtttagcggataatgacctactttcctttaagttgtattgattttagagataataccatagagatcataggtgagaaccttattaattctagctatgactctctttgaatgttacaatgctgagaacaatattaggcaaatcaagaactaatgagttcttgtgaaagactaaagaagatatgacttagtgtctaggtggcatgtatgagatatgagacttaagagagggagagagaggtgcaagtggcctttgtagcatatggaatgacttagaatgacttagcctagtgctctttatataggagagagcttacagaagat

SEQ ID NO: 98666 - DNA, 745 bp, Cannabis sativa
ccattccattatatatcaactctcctatcttccttcccctgtttcacattcacatccagtccagacacctaacctttcttttattttcaattccatttcttttcaaataccgaccaataataacactaaatttcctttctttcatttttttttttttttgttaaaggagagaaaagtttatttggggggtcatggtagtatattattttctgaccacaaattctgggctaagtggggatctgaatatccctgaccttgagccttcgaaagcgataacccaagtcacactacctctatacattggatttgtcatttgattaagaggttgagattgtggatggaagaattccttggtgagtgtttgttttatttatttaattaattaattaatttgttttagtggttcaatttcgttcgttctagactgagaaagatagaatttttggcggtttgtgtgacgtgtcgtttatttgtcattcgtaggagaggctgttttgttttgttaacaacgtgtgtgtttttccttattttattttctctctcccttgctttcttataataattcttttctctctccctttagatatttcaattaaaaaatttaattttctgagtattcattagattttcctgtcaatctcgattcaacggagataggacggatacgatacgtgagatttgtacgttggattaagctttatcccgcgttttggctggtgggtgtctctgtttttttttttttttt

SEQ ID NO: 98667 - DNA, 510 bp, Cannabis sativa
atgtgtgtcactgggattagactgtgggcctttatactcttcgccaatcaacatgttttcatttcctaacacacataaatataataactaattaaattcataattttgtagctaggcatgcatgtgcatctttctaaattttcgaagcaataaattatgtatttatatatatagttacattaaaacaattgcatattacgtaccattgatatactatagattaatattactaacccaaattaatttaaaaatgtattaactacattgtaattaagttactgtatgtctcagagctagtcctaggactatattgtatagttcgtagtgactagaatatcttcataatctttcacattaatcatatcaaattaatttgcagtataagtataaatacctatatgaatgttctgagcaaagcaaacgaaagcaaaaaccaccacaaggaagaagaagaactgaacagagttgaactggacagagttatacgctttaaaacccatactctagact

SEQ ID NO: 98668 - DNA, 697 bp, Cannabis sativa
ccatttcattcatagtaggttaaaaaaaaggggtaagtaatttatatatgaagtgtataccaaagaccaatcacgacagtaaattaatcttaatattgttatagatacaataaagagccaagagaatagagatcattattacacaacacagttaagaaaattaaaaagaaagaaaaaatatataacactcaacaccacactaatacgctaaacccttcaaaagaattagtaaaaattcaaaatccaacaacaattccatttctcagtgataatcaaacccaaacatcaccgttaaaataacgaccaaactcaaatacataaatataatacattctattctcacaaataattaataagacgaaaaaaaaaacttaagatgtgattagaaattatacccacaactcagacttgacctctgaaccgttggatggccagatcgctaccttgtcatcagtcaacggagatgcatcgtgaaatagagcacgacatgttgaagctcttggccaagagaacataaaatcgttgttcatttggcttggagaggtctgaaagtggtcggatctgacccaaaacactttggctctggtgagtcctttacggtggcggaccggtgatgagaacctcgcgactacagttttgtggtttagagcgagagagagatgggcgagggaaagttggggttcttggcttgggatca

SEQ ID NO: 98669 - DNA, 561 bp, Cannabis sativa
tatagcaaagtaatgctaagttaattgattaattaattgttcagctaagatttatttatacctattctttctttcttctttttttagacgaaaattatccaatccttttagtttgtacacttaattattgctaccaacctgtcagagataaaataagcatgtcgcacaaaaaaaaaagaagaagacccttcctcagtcctcaacgttccaatgtcaaataatttattaaatattggtcgaatttaataggaagtacttagttgactttccctctttatttttttaatattattttgctgtataagattataggctaattagaatttgtttttttcgaattttgacatgtaccaaaaattatgtcttttaaattttttttgccgttaaaattttcctctgaactattaagattgttttgtctaatattaataaaaaaattctaacatggatgaaagttcagggagcaggatttaatacatatcaaaatttgaggggcataatttggtagatatcgaaagcatagtttagtatataaacaattactgaaacagtaaaattgaa

SEQ ID NO: 98670 - DNA, 623 bp, Cannabis sativa
aagttctttgtgctagttcgatacgttgtacagtatgggtgcccccaagtgaccatgcagactagtctcttggtcacttgctattcactaagttttacagactttgcataggtaccgtcttgggtaccatagtacgcatgtggaaccaagagataactttgaaaagttaatttgtgagtaaatggttcatagtagggcaacacacaggttggattttcaggttttcagatggtcgagttcggatttttgaattttgggtgtttaaaatgtgcaatcgaacctattttttgggtggtcgggtctggcaagttttgggtcggatttgcgcgggtatgttgtggtcgggtttgggttttattggacttagtccgaatgaatttttggaccaaatgaaattttgtttttaaaaatgccattagattttaggctatcattattcataaaaattattattttattcttgttctttgtaatattaaaacgtgatgaattagtatatatatcaatgtactgttacactatatatactgtttgagcaataaaataagtgggcaatgtttctaggcatataaagatataagttcaaaaattgagagaaaataatgcaaataaaggcttaagat

SEQ ID NO: 98671 - DNA, 667 bp, Cannabis sativa
ataccaaacatactctaaatttttcctttttcttttttcacaatttttttttttgaaaatgattttttttttttacttgatgcaaatagctttctcgtaattttgacaaggagagaaatgaatgtttaaagttaaaaataatcattcctgcttcattctaataggatagaatcctcctcgtacattaactatgccagttgcttgccttattaaaaataataatattttattatattatttattaaattattattaaaattatattattttatttatataatcaacaaatataatcattattattattagaacttttaattatattttgtttataaatttttaatgaacatttttatttatttttatttttaaataataaaattaaaagaaagcaacttaagtaaggaaaaagtattctctataaaaatggagatactttttttttttattttctttttattaatttgtatggactcagttatttttttaatttttaaaatttaataaataattgtatgaaaatttagtacatctcttttcttatatttatatatactaggtgaatgtacgtgccgagccacgtactgctagtttcatttaagattttggtctttttaagattttgaatgtattttatttttaaagattacaaattttttgtttgaaa

SEQ ID NO: 98672 - DNA, 506 bp, Cannabis sativa
ttttttaaaaaaaaaataaatcacctactaatttctcataaactaaaaattcaattatataactacattttatatagaatagatatagagagagaagagagtaccagagtgtagttgacggccattgattctaggatggtaacgtaagagtgttgttttttccttacaaattaaatttctactctttcttgagatagataatccaaatctcatgtaataattatttttctagttttcaataaagtaagtatgcctattattcctttttatttttgctttaagtggcttcttaatttaataaatgtggtgaaaacaacctcaatacttggccaaaccagtgccaattaacaacaagaacaacaaaaacataacaagcaaacaagattaatacaaaccagaaactaaaaccagaaatgaatgaaaattaaataagacttagcattgaatcaaatgaaactttattcaaatgtctagcacctttgcaatccgattcatgcactcaattg

SEQ ID NO: 98673 - DNA, 609 bp, Cannabis sativa
tttttttttttttttattttgcacccagtttgatgctcatgaggtagtcgctcctcctaaagtttaaacctttgatgccccaaaatgttagaattatgtatgtatgctaatttatccttaattgtgtgtaaaccaattatgaactttcactctacgctttttccatttacacatttttcataaaaacttattctactactcaatccggccatcttaaaatagattagccttctagacttagagagcaattacgagttgttgaccggaaaataacattccctcaacatactcaaccttatccaaattagtcttcacaaaagttaaggtatcgtttgcatatatcaaatggaaaataacaagaacattaagattaagagacataggaataccttcaatcagaccttgattctcatataaaaaaataggaggacaaagtaagtacgaatcaccctgcctcaatccacttaggaaaaaactttttttaacaaattgtttgtaaattttagtattatgtttcacacttaaatggaggcaaaccatttttcttttaatagctaatggccattataatattaataatattgtttggtggtagataaaataaatgtt

SEQ ID NO: 98674 - DNA, 532 bp, Cannabis sativa
aaagaacataaaaaattaaataaacaccttgatttcttcaaccctctttcttttcttaacatacacaataggatcagatttcttatctatgatatataaacctaaacaacagaaagaacacagagagagataaacaagtaaataagtacacataaaagactaacaataaccatatataacaattaatttgtaactgccaacccacatcacaaacacacaaaaaaaaaaaaagttgccacaacgtggcaaagacagttattacacccactaaaaacacgaataattaaaaaaaaacattaaaaaaatgataacaaaaaaatcagttcaaaatcaaaacagagataaaacaaaatacaaaaatcataaaaaaaatcaaaaacaaaaaagaaaattaacaatcaaagagaacaaatactattatactgaaaaaccggtttcatttaaaaaaatattaaaaaaaatctataatgtaaacagttcataaagaccaaaacaaagaacaaactaaaaaaaaatcaaacacttaacaaac

SEQ ID NO: 98675 - DNA, 669 bp, Cannabis sativa
tttctttttttttttttcattgtttaatttctgtatttctttttgttgcaaaaataataataataataaataataaataaataaaaataaaaaaattacatattctttatctagttataacaataaaataaaatcaaagaaaatttctacctttttccaaacgaaattgagacaaaatttgatttatttattcttactttctttttcagtaaatttatctctggattatatttgacttcatttgattactcttatttttagtattgtatatttgaaagtggattattatgatgtatattactaatatgtaactttgataaacatacatagttttaatattttgtttaattgaaataaaaagccaaaaatcacacagtggctatagacctctacacaaatgaaagcttgaaattcatcaagcataaaaaaaaaaaatgggtgctagaataaagctccaaaaataaccaatatagttatataagtttaataactgcatgcccacgtttttttaaaaataaaatatattaaaatatcaacaattatattcccatgtgagatgatctatcttagtcaatgtaactaccaccacttgaataaaaatgaagggcttaaaaaatgctctcacatgtgaaaacaaaagtagtgccctcacttaaggagtaccctata

SEQ ID NO: 98676 - DNA, 3200 bp, Cannabis sativa
  modified_base (234)..(249): a, c, t, g, unknown or other
  modified_base (490)..(494): a, c, t, g, unknown or other
  modified_base (562)..(562): a, c, t, g, unknown or other
  modified_base (2303)..(2308): a, c, t, g, unknown or other
  modified_base (3173)..(3175): a, c, t, g, unknown or other
aaggtagttagggtgttacaggggctatagcccccacactttctttactgcgtccgtccctgactctactatagatttgaatttgtattcttgattgcatagaacgctccatataccaaatatagatacgctgtaaattattcattgttacaatttaaaaaatcaatgatcctctataaacgatttacattgagtagggataaatttactattttacccttcaatatattttannnnnnnnnnnnnnnnctacttgtaaataatatttcagtaaactaatataattactaaaataagcgctctatcatttatctcgttaagccaagctctgaggaaactatcatttcacttttaatagttgtagaagttataaatttcatatctatgattaatgctcccactcaattgcactactgaattctccaagatgtaagtatgggctaatcttatgggtaagctagtaacaaacaagtcaaagaactcgtatagnnnnnttaagctagaacttaaccatctcaggattgagatcaattgacataagatcaactaagtgacattgacntagaaaagatataacagtaagtttatgatatcttttctactgtcaatatcaatcgaatctgatataaagttgatacatccgatactagtttacttccttgttaacgccctggttgggtcgtcgggctgctggtggtggtggtttgggctatgattttctaaataagagtgagaaggggagggagattgagtggagaggcagagagatctgacaaagaaggagatcgagtggagagggtcgaagagggtgaaggagagtgagaatgggtctcaagctgttggtggcggtggtttggtgcgtagctggcctactacttggtggtcaaagagatgaaggggagatatagtggttgtgctagggttcaaaacttaatgaagatgaaatgataatttcatttgtcaaaagggggtttagaaaaaattaaaatattttgcttcggtggataacacttgctaatattttagcatcggtttctaactgaagcaaaaataattagcatcctttttcaaccgacgcaaaatgtaaagacatttttttaaattttcaattttttttcttagttttccttttagtgtcggagagttaaccaacactaattgagcttttttagcttcagttaccctttgaagcataaaatcattggctatttatcgcgtagtcaattatattagtgtgacgtattgactgacgcaaattgacaattttgtagtagtgggagttaaaatactttctttagagttaaccattaaaaaaatactccagcatcttacaaaaataagttgcttgcatcatagtaagtaaattaccagatataccacaagtcataggttcagatgatcttaaacctatgatactaggatcggaaagtttgcttaagtctattgaatagacctattatcaaaatttcccttcttatccttgtaatagaaaacttctgattgctccatgtgaatggttttaaccatagttctcttggctttgattcttagttccttattagaagtatccattgtttgtttaaactagcaatagatttttatcacaggtgtcttccaagtcataacaaggtgggttccttaaaaatctcccactatgatgaggtaccgtgactttctgtttaggaatattagtagtatttacttcattggttgtgtcaatacaagagagacattaggaccatcttgtatagaataagatgatagaacactttgggattgaatcaaatagtatctcctctactttgctattttgttttcagatttagtcatcttcttaaaaaagtactattttttgaaacaaatattttttatcttaatgaccataggatggtccacccctaatcactttataataactaccaaacatgcaaaccttggctagcagttctggctttcttaagttcacgattaggacatccctgaatctagtaatggtgtacattaagtttacgactattccatcattttgaggttttcttgggatcagacatagatgggacgacatagaatatcgtttgctatctctaaggcatttccctatcaaattaattgataaaaatggtcttattaaatattcaaattaaaaattaattattttaagaaatagttaatttaattctaaaaaaagaatttttacatgttggtaacctgctattacaggtcaacaaaaatgtacctatcatggttacaataaaaatgtaaccattgagtaatcactcatatatttatatatcatataattnnnnnnactatttaaaaaatataaagttgaaactaatatgatttttttatggtggttgatttgaactttaaattcaatctatatatatatatatatttgtctcattattacagttaattaaaaatgaatctaaagataaaaaaaaattaaaaaaagtggtcggtttggacaggttaacccgaccaaactgaccaatttaattgggcgggttatcattttcttttttcttaattaggcgggttacacttagatttttgtaacccgatctttacattgggttgaataaaatatggcataaactgaccaaaccgacaaacgtacacccctaactcaggcaactgctagtaactaatcatagaccttttattttcatcaatatgcgacttcgaagttctggggaggtaagtttggatacaatttgaagttcaacttaatgatctttgagctgcataaccaaatatttatccacctttattagttcgcaagatctttaaccactttatcttattatttttcatcatcgctaaatataaaattattaatattaattgcttaaaagagtcttattaaatattcaaattaaaaagtaattattttaaaaaaaaaatagttaattatagttaatttaattttaaaaaaaattatatgttggtaacttattattatatgtaaaaaaaaatgtaactatcatgattataataaaaatgtattaagtagtcatacatatataaattgtatatgattttataatattgtatttttttcacattttttgtattataagtaagaattgcacatttctttcgcttgcttcattttttttaaggaataattacataagataccattttttttgtaaaatatttacatnnntacgttcaaagaatatttttttaca

SEQ ID NO: 98677 - DNA, 1792 bp, Cannabis sativa
aaagggagaaatatgtgtggcaagttctcgtgtttatgttcaagaagggatttacgatgaattggtgaacaaattagtagagaaggctaaagcttggtccgtgggcgacccctttgatcctcaagttcgtcaaggaccccaggtatatatactgatcgatcttaaagataatgcattgtgtataaatgtaattttctaaaacaagataaaaaaaactcatttatcaataatgtatactttcaccatttgtaaatattgtagccgaaaataccaacaaaaaaattattaaaaaacaaacagtttatatatatttgaataaaatcaattcatgcaatcgcagacaaacttttagagaatatcgaagcctcctccaaaacatgatcaactaataatcgaatatttctagcaaaaaaatcacaaaatgtaaaaactaaactaaaagaaacctacaaaattttgcaatcctcaataataaaaccaaaatcagaacacaaatcaaagagcattaataagtaataaccaccaaactacaatcagattctacttcagctcgtttaattaaacgctgagttcagcaaagcttccttcacgacaagcgcctccgcccaccgaatttcgcgccgaaaagaaaaaagagaaaataaaatgaaacaatattatagtattaataatcattaattaacttcacaacttcacattctttaattgttttcaggttgacaaaactcagtttgataaaattctgagatacattgagcatggcaagagagaaggggccactttattaactggtggtaagccaataggagacaagggatattacattgagcctaccattttcaccaatgttacggtaagtttgttcatttagttcatttagctaacagtactattataatgtataaaatcatctaattaagtaatatttcatgacgatcaggaggagatgctgattgtaaaagacgagatatttggacctgttatggcgctcatgaaattcaagtaacaattttcttctactttcaaattttattagtttattaattaattaatattctaattgccaataaatatatatgtataggagcatggatgaggctataaagtgtgccaacaatagtagatatgggctggcagcaggagttttgaccaaaaacttggatatagcgaatacagtttcgagatcaataagggcgggtaccatatggatcaattgttactttgctttcaatgacgattgcccttttggtggatacaaaatgagtgggtttggaaaggacttgggcttggatgctcttcataagtatcttcaggttaagtccgtcgtcacacccctatataactctccttggctttgacatttaagctaaaataaataaacataaaaactccaataaagggcatttaatgagagttattactgagtgttatacttctgttatatagtttgactgcagctgtttgtaatgtgcccaaaaaaaaatagaaaacttgtaaaaagggtttgtataatttgctggttagttagttgtactatataaccatatatgtgtgtacttatgcaaattttagtaaaaactaatattttcctaatttgttgtcaattatctaaatattatcataatgacagaaaccagcttgcatagttattagtgctctatatttaagtagatattattcaacatgtttgccaaaaaaaaaaattataggagaattttgtagggatatgattttgtcccgttattgtactttcacggattgtaatccgtgatgtacgacagccgtcagatga

SEQ ID NO: 98678 - DNA, 1363 bp, Cannabis sativa
agcttccttcctctttaaaccaacctctttttatgaagttctttaaggtttctgcgggcaatttctttatgttaatcatagcgctgacttcgatgttgatctttcttactgcgacgaactgcctccggaagctgacttgcagcttgttccagctttttgaaccattccttagtggaaccacttaatgttagcagaaagcatagacacttggcatcattgcggaccctcatgactgtcattacccggttgaaacgggataaatgatcactagggtctgagtctccagtatacgctgccttctcgggcatattgaaatttttgaggagctctgccttcaatatgcaccgggtgcatggctctcggtcctcgcaatcagaatctgagtcgtcccctttttgccttcgagacactctagcaatgtctttgtgcagcgttgccaactcagccagaattccttcatttagtgtccccgtggagaccgctggtacatgtttcttgttgtctaggtgatctcgttgatcaccgtgttttttgttgattttttgtcttaagtcaactggaggatatctccgatttttccttcctctatctccgggctcctagtgcacggatacgctctttcggtcctctcgatcctgagggccaaaactcgctctagggagcttacccctctgcggacctttcccttttgggaaatctgagtgaacttttcgtggatcctgcacctttttctttctctcggggattgaagtgggatttttcccatggttttccttggaagggtaccgtatagggcttggttccctggtcttgggtttctgagtgcttggtgaggactcttccggtgtttcttcgggtcctgctgggatggccttagggtgtatgtgaatccctgccgtctccatggctttttgcatggcaaccatcacctcttgcatttttctattttgctccttttaggctgcgatctcattttcatgatcagtagccttttgcctcaagaccagtaactctatatatctaccctcgtcgtaagcgtcatactcgtcaaagttctcttcgtattcctcattgttggcctcactcactcctcagagcccacgtttaccctagaagctacttcttcgtcctttaggttttgagcatcctgaggaggacggggctaacgtgtattgttgtgagtttccaccattgttggtctaactttttagattgttctctgtttaaagacgcttccttcagctctcaatgaaagcaccaaaatgttaaccgaggttagcagaaaccaattaaataaaatatgagaagagctgtagaaagtttaatgcaggagattttacgtggttagggcattaatgagcct

SEQ ID NO: 98679 - DNA, 1464 bp, Cannabis sativa
tagttattttttatttatgtttatttgtttttggtatatatttttattttcttcctgaattttttttgtttgtatgtgtgttgcattgtagtttagatacatatatttaatttttttttgacacattttattaaaatataatgataagattttttatttttgtaattaataatgtgcagtagtagatattgacatgttaattatatattatctattatattatataccctattttaaaattataaaattttattatttttattattaatgtaattatttatttaacttttaaaaaataaattatcattttaactgctaccactaccttaaaaaggaaaagaaaaattgaaagtatgaagttggaacaaaaaattatatagaaataatgtaatagtataaaaaaataaatcaaattgtcaaaattaagttaaaagaaaatccgtaatacaaaaatatattgaggagttaatattgttttgtatattgcaattatgtcattgttttgttatttttcgttgttttgtgattatcattttgttgttttcatattgtttgttaagttgtttttttattttaccgaaacatagtatttttgtaatttgaaaaatttaatacaatacttttaaaaacttggtaatagtagaaatatataaaaaaatgtgtgacactaaaaatataaaaatgacaataataataggtatttttgtaagattctcaattatttatttatttatttattaaaaattccttttgacattgtgggtccaaaacttgtattcttttgataccgggctttgggccttggtcaattaagtattgaatcacgatgaagtgaacccaatccacacacactttaaaaatggaaacctaatcgaatatattataaaattcttacttttttcatctataaagctatactcaaccttcaaaagagactacttggacaaaatgaaacatttatataaattcatttaaagttgctttaaaatttaaacaacacacatataaagagataaagcaacaacattttgtacacaacctttatattaaattttagataccacggatattttggtggtgttatatataatttttgttaaaaatattggacatgattggttatattataagtttataaactaaagtaaccttattttattagtatatatgtatgaacgatgcacgcactactatccaagcttttgatagtggtcgccattgttgaaactatgaacaattgaccagcatttatatgttttcctttatatagattttttcttagcttacttggtccacacggtttgaagacccaaggcccaagggccatactagctagcctagaatggagtttatatataggaaaatttatattccagtactttaattgcattctttttacaaaaatatggtgctgtcatttatatatgaaaatgtaccgtttttaataccgttatcaatttaatt

SEQ ID NO: 98680 - DNA, 834 bp, Cannabis sativa
acttaactttgttttttgtctaagcgctaaaatgtcattttgttgagtaattctcttgtctttttgaggaatttcatgctgctaaagataatacttttaataataaaaaaaaaaactaagtttattgatgataatataggaaaaacctagaactacctaaacatacctctctctttcgaatcacctacaaccagcaaggaggaaggaatttcagttgaattcaggtgatttcagcaagatctaggtgcctctaaccaaggtaaaaccctctaatcttctcctttttgaagtttcttagctcaagctaggtgtctcagttgaattcatgtgatttcagcaagatctaggtgtctctaaccaaggtaaaaccctctaatcttctcctttttgaagtttcttagctcaagctaggttatttgcatgtttttggggttttaagttctgtggttgaactatttgtttgattttctaatctggagtttgattaggaatattggaagtagtttgggctagacttggttattattttggggttaagcaaaatttgagtttaagaactcaaatcttaacctttaatggtggattgaatttatgggtttaaaactgagaataattgcttgatttgagtttagtatgatgaatacaggtactctagagaaaattctgaagtttggggttgaattgtggtgtgagggccgatttttggtttttctgcacaaaactgattaactggttttgtgggacctgagaaaccaggtaaccagttttgccctcaggaaacctagtcaaccagttaaccagttgagaaatcggttttctggttggggtttttcc

SEQ ID NO: 98681 - DNA, 863 bp, Cannabis sativa
ggctaaaacacgatgaagtgtgggaagtcgctcaactcccaccagaaaggcccagactcatggattaacctattggttttatagaagaagacgcgaaaccagtgtgttcccccaccatgaccccgtagtcatagaaactcctttcgccaataaggtagtggctagaatattggtgaataacggaagctctaaaaatttattattcaaagaagccttcacagccatagggctcacggatagggacctatcgcctagcagctctcagctcacaggattcaacgggacaacactgatcccgataggaaaagtaaggcttcccgtcaccttgtgtcctgataccccacaaagcactttcaagtactgcacctttgttgtggtaaactgtcccaccgcctacaatgccttccttggccgacttgccttggtcaattttggagaaattacctccattcgatatacttatgccttaagttccctacttgggaggccgaagtaggaaccgtgatgggaaaccaaggagaggcgagacaatgttacaatgttgaagtacatctatcaattttgatggtacgaagggacacaaaaagcccattttaacaaaaaaggaggagttggatctccgtgtgggatttgaaacagctatagaacctatggaggacatcgaggaagtaagcgtgtgcgacctcgactccactaaaattatctgcttaggaaaaaacctagaaccagatgaaagaagcaagatcatagatacgttaaaggcagccacgaatgtctttgcgtggtgccaaggggatatgactggaataagcccctacgtgatcacccatgtcctgaatgtctttgcgtggtgccaaggggat

SEQ ID NO: 98682 - DNA, 807 bp, Cannabis sativa
ctttatgagagctatattttagcttttcaccacttatttacacctctattggagatgattccactcttctttttcaccataattcttaaaatcttaatagtagttataacctatataggcagccaattttgtacccataaatgcaaaacacggaatgtatttcgttgtacggcatgtacgtaataatgtgtcctagggtacgttaccattttttaaccctaattatccctagatcaaccccaaccctcagatcaaataactaccccatctaacggttgtcgtacatcacggaatacattccgtgaaagtacattaacaggataaaatcatgtcccaacctatataatatcataaataataaaatagttcaaaagtgaaaatgattctgaaaaaataaattatgatgaaagagattagagaaataaaatattaaaatatttaaagtaccaattatataatacctaaagaaaagcttggagaagtggaaagccactgatgagaattagaaaatcattgatgggaagttagcttgtgtgtgattaagaaaaaataaatggataaaagtataatgaattttgtttaagttatatatattagttaaatatttttatatatttttttaaatgttaggtttatatgtttaatcaattaatcataatattttgacatggggcctaccatgtcaggggtttgttctatgcgtcagactcaaggagtgtgtgctccaccaaaggaaaactatttttttgttaacaaaactcatatattaatttacctaatgactattttgttggaatttattttacc

SEQ ID NO: 98683 - DNA, 1395 bp, Cannabis sativa
gtgaacttcaaccgaaatgtcagtcaatgaacaatgaatgttgtcaaatcttttgtaaataatatttctgaattatatattttggctactcaaaaagttagggttaacatgaaaaaaaaaaaaacaattcaaaataaaggtattaaaagatcgttcgtcgaaacatgctaaatgaaaatgacacatgtaaaataatgcatcttttaatttaatgttcataatatgaaaaataaagtgatttataataataataataataataataaacttctagctagtatgttatcagtgttcaatgaataaaaaaaaaacgaaatttacactattaactctccttaattaaaaatactatatggttattggaagagatgagagttagttttatattacgattagttagttgattaatcctgtcaagttagctctttcatctcattccttgatgtatataaattaaactaattgtgtagttcatccaacaagattgatctttgatcttcaactctttctttttcttttcctttcttcttcttttttttttattctttaaaccactataagaaaattaccttatctcagaagttaagaaccctcgtgatagatctattttggtgattattgaccgccgagataaaatcataaccaatctcgatagttgggaactgctgagattgggtaacctatcttagcagttcaaggtaaaaccaccaatataggtgtgccatcttctcacaatattagacaatctcgacacctggaaatgtcgagataggtggcattcttgatcctttggaaccgcgaagataggtcaattacgacactattttcacaaccgccgtaattgattttagcaaggaaaaaagtaatttttaaatttttaaaattttctccttcattggtagtattgattatatatatgttttcagtggcaacaataactttcaagaaagtcttcgactttgttgtcaaaaatatcatatatcggtttgtactgccacagaagattgtgtcagacaatgggaagcagtttgacagtgacatgttcattgattcttgcaacagacatggcatcatcaaaagcttctctttcgtttctcatcctcaaatgaatgggcaggtagaagttgtgaacaagaccctcaaggacactctgaaaaagtgtctaaacaagatgaaaggaaattcccctgaattgctcccagaggtactttggtcacacagaactaccgagaagacagcaaccggacaaacaccatttgctttagcttatggctatgaagtaatattgcacgtagagttgacgccactgtctcgtaggaagataacctatgaccaagaagtaaacaatatcttgttggcggaatctctttaacaaaataaaaaaaattaaaaaaa

SEQ ID NO: 98684 - DNA, 2304 bp, Cannabis sativa
ttaacaggaatatgattacatattaccctacacaaccaaacacagtttacacatttccttataatcatattttccttcataatattctctacaatcaaattatttttaacacctcgtaccaaacacccctaaaatgtaataccactaccaatgttaaaaaaaaaaaagttttgaggcataataatgaatatgttttggggagcaaaaatcttttaaaaataaaagaaaaaacaccaaacgcccctccttgtagtatctgattcttcttgttctttctttctatgagtgatgactgactgaatcattcaatccattcatacaaagccctaatcttttctccattgctattttcttccacgccaccaacacaaatcaatggagtatcaacaccatcatcaacatccccagcaatggcgtccccctcccagacctcctccaatccaaggtaacaccaccatctgtcctacctgctcatactctcacttccctttttgcccaccacctccttccttcccctttcactccgatcacgctcactacaggcctgctttcgatccccatcgaccaccacatcctgttaatgctatgggaaaccctaatgctcatggtggaggattcggccatccggggccttacggacaattcgcaccacaaccgtctgagtaccccggggttgagggtgataggaatcgtaagaggcctagggttgatgattttggttccggggactttaatccaaattgtccattggtcgatgagcggagattgaagatgattcgtgatcatggcggcgtatcgggtggatcgcctgtttcaaggtttgggccgggtgaggatcggaggtcgcatgttttaatggagaatggccgagctgagagtcttggaaatgaacctccatattcttatacaactaattctaataacaattatcaccagccacaacaccaccatggatatggattgcagcatcagaatgtgaacgaacccagatatttcccacgccctggtggtgaaatgggccatgtgcaaggccctcaattttttggtggacagcctcccttgcctctttctccaccacctcctcttccgttggaccaccctccagtaccggcgtcttcagagttgagagtttattcttcgcacccacaaagaccctcttctttatttcccgttagttcatcagcaatggcagctttaccttgtccaccaattcctgaaaccaaatcattgccacaatcttatttccacaacaggccatacttgcatactaatactggcttttcaacgcaggtatgacttctttagtcattttcttcttttttaattacaaaaaaggtttacctttgcactctcgtagccgttcagttatttgagtacgcaattaatagtgtttgaattttctaggaatcacaagtcatccacgggacaatgccaaagcagtttgggggagaggaccgatcttttttgctgaaacattcatcttctagcaaaccagttgttgttgatgcttctcaattatttaagaagccacaccgagctacccgtcctgatcattttgtgataattcttcgaggacttcctggtaccaattttgtctcatctttttggggtttgaatggagttttttatttatttttttttttttttaaatgatcatacatttatttagttctttactcatttgtttctttctacttatcactatcaatccagtttatgcttgctggagtttgagtgttttttctttctcaaacgactttatggatgttaagataatttttttataaccttttcacaaccaggcagtggtaagagctacttagcaaagatgttgcgtgatgtagaggtagaaaatggtggtgctgctccacgaattcactcaatggatgattatttcatgactgaagttgaaaaggttctattattgtcatttctgtttcttcttcatgatatcctccttatatttttgtatgtgtatatatatatatattttggcagtcctctcaacttttcatgttcctttggttataatgcttgttcagctgatttgaataattatcttgtaacattctaaaggttgaggagagtgatgcttcgaaatcttccggctctgtcagaggcaagaaaccagtcaaaaagatagtgatggaatattgctacgaacctgaaatggaaggggtaattgtattgcaaactaaaaatgttcaaaaaattaatatattggctgttttatcaaataaggtggcgtttggttggaggtaatgaaatggaatagaatggaaaggaaacaattttcattccatt

SEQ ID NO: 98685 - DNA, 880 bp, Cannabis sativa
aaaaaaaaaacacatataatatttttagaatattaatacatattttaaaaagctaataaaatcacatataatcacatataacattttcaatatatcaaaatctatattataaacatatatattttacaaattattttttattacatataatgaataagtattagaaaaaaaaaaaaaaaactaacagtggcaactctgatatatgagcagtttgtctaagttgattgtggtggctacactatgaatacccaacactatatatagctacaaaaaaaacatatataaacataaatatatataaatacaaaacaatatacatactttgaagggttgatctgaaattttaatggaacattcttcaataaagtcaagttcacattttttttaagaaaacaaaacccaactctgtggccgagatgggactactctcaagctcagctgcccttaacagggattatctaaaaacgacatggtcaaactcaatatgctgagaagtaaagatattatcaaaaaatgacatttttcaaaattttctaaaatcaggtgtaagatcttaactcagtattttttttgtttcctgaaaaaactaaattaaagaaaaaagagacaaactagaagaaaatataatgttattaaaaaaaaaatagagtatgaaggataaaataatattacctaaaggatggcggcggtggtggttcggtgaacgtcgggcagcggtggaaagcagtctacaccgtagtggtccggcaatggtgaatacaatgtagtattcggccaaaaatttaagaagaaaaaaaataaaaagatgagaaggagttgatgaagagaaggagatgaagatgagaagaaggggacgaagcagcagaaaaaaaaaaaaaaa

SEQ ID NO: 98686 - DNA, 2863 bp, Cannabis sativa
tagtaggaatatcgttacatggaattaatgccttgttgattggtttggcaatgaatgggcagggacaggaggcaataggacagttcaaacagatgacaaggttgaacatcagaccgaatgaggtgacctttctagcaattctaacagtttgcgctcattctggcttggttgatgaaggacgtacgtactttcatcagatgatgagagaaccctataatgtttgcatggttgaatttctgtgtagggctggagtcttgaatgaggctcaacgattgataaagtctatgccaattgagcctgatatatgaatatggggagctcttcttagtgcctgcaagaccattggaaattttgaactttctcgtgaaatattagatggcctcctagagttcgagtctaaagatagtggggtgtatgtgctcctatcaaatatatatgctactaataaaaaatggagtgatgtaacaaagctgaggaggctaatgaaagagaaaggcataagaaaggcaccagggtccagtgtaatagaggggaatggtaaactttgttttcttaattttctgttttcggaggcttattttatttatttattatgatgcatactatttgtataataataaaatcagaaaagggaaactgatttaataaactagttagatttgtttttcgcagaatcttcacgccacaacttgaaggaattaatttttggtcaagaatctatacatttcttttttccagacaacgaaccattgctttttaatagtttgctctttgtggaagatgattgtatttgtttttccctctctaaagaaaatgacattgaataaaatatgtagatggggacaagatataatctaaacattcataaactaaaagagaaaagttcgtgtttaggttctgtggaagaataagtcttgagatgattggctagtgtaataaatatatgattgcgctcatgtagcaaatcagtgtatatatattatagatataaatatatttcttaataaaaacttgtacatgggaaagtcttttgaatatgcactgtagtggtggtaggtgccatataacctttcttcttaccaaacctgaccatagctgatggagacctcttaaaggtttttgccacactgatacagacaatatttgcaatttggaagaccaatcttttctgataattaattgagctttgctgtcttctgtttgttttctcttgtagatttgtgctactcatttgcaagtgcatgaatagaatatactaaagaaggtggacgaagtgaataataacataacggcatagtgatgatgttctgaaagatgttggaatccattctcttgaaagaattaatacttcaatatacatgtattatgtataaaattttgtgttgactcaaatagttcaagttttctaaactttggatgaaagaattaacaaatttcaaccttgaaaagaaaaataaaattaaacttcaattgtattctgattaagagctgtatacctccacctttccttttccacaaaatctgcatctaggaattgtgctacaaaagcccaaagcctgtatgtgtcttcgaaattggccaggaaaccaagtgcagctgtaaccacacttattccttgatcacattttcccttcaagttgttgggtgctatttgatttgatcctcctcctcttgtctttaggacactgttcttctcttctgcatacttatccgggaagtgaatgtggtgtaagaatccatagctgagagatatgttgcttctatctgcaagtttctgtacaagaacaggttcaaccggttctcttttccaatcaaatatattgaatgccaatgctgcccccctatcaaattttacctttggtccatatatttttaccaatcgaaatccctctgcatttggatgttcaagcttcaacaaagagctgaccagccagtttattaagtatcttgctcggttcgtaatcattatcaatccaagtgaatcaacttgatccaaactcctgcattcaaagtctaatgccccttttctgcttattttgtcatgctcaactggtatctctgatttcctcatttccagattttgtggttcctccaatcttgcagttatttctatattttggatgttggatgactctccttgctccaattttggtgaccgcggtgtttggttcgataaaggaccagagaaggagctcgaggaagataaacctgcttcttccaagccaaattgtgttgtctgctcaatttctaaatcagtaacagaggactcatctgctaactgaagtaactcttttgctggaacaatattaacaatccctgtacttgtagaatcctccaggtttgaaatggcagacttcttgacaaagaggcatccaaacccagatgggttttctccaaaaaccttgtagaaagaacagatgaggaaatcaggtcttaagagagagaggccaaagcaatccatgtcctttggtcctagtgcacaagcatctatcaatacatcccaaccgttctcctgtgcaacgttcatccacaaataagggtatctggctcctgtgactctggagtgtagtgggaagacgaaaagccccctcttcttcttttgtttcttcttgctgaccaacatgttcctcaatttcgatgagtggatcctcaaccttggccatgaaaattctgctgacatggcatgagctcctcgtttctctgagctattaatcattgactccactgcttcactctcataatcataaactgtcaaaagcttactactagttttgaaggggtaagaatcagcaacaagtttgaaagctgatgttctgttggctgtgaaaaccatgctgtaatcactttctgaaatattaagaaa

SEQ ID NO: 98687 - DNA, 688 bp, Cannabis sativa
tatgcgctattaatagtgtttgactttgatatcaccttaagggaacaaatatagaaatctatgtactgggattcagatgatcatgaaaaatatattagtaaaatattttcacagcaggattgttttacttttaataaaaatttatattatatgacaataaagatataaatatattattttaattcgcatatatatatatatataatagtgttcaagtggaatggaacatggacacacaacgtggcgatggtgtctactcaagccgaatacgaaatgtgcacgaaaccaggactcgttttcctaagtggcatcagtcacgcactaacaaaaaatggttcgtacttcttcctttgtaccgttgatgaccactgtgaacgggggatgaagatgatcgtcaccgttgggtctccaaccgacgtgtctcctacaaatgattccacttccatattatgttcgcccttattcggcacattggtcacaacttttttatcaaccattgtaatttttttctacaattacaaagcatagagtcatagtattctttgtgatttatctccctaagagctggtgttgttgttgggagctctatgtatatactttaatttattgaatcatattatatatatatatctctatctctactctatttatatatatatatgattagtttaattagttggtccattac

SEQ ID NO: 98688 - DNA, 1878 bp, Cannabis sativa
ttatactaattatttaagtatataactttgtattgttttcatcaacaaaaagtcgtattatacatgtagggccattattattatatgagtttttctcggctaaatcatctcaactattgtttcatttgtacttaataaattttttaagtttaacttttaagagtaaaaccttccaaactatcgaactgttagcaaattaaatgtatacaaccatgaattgtttatgtgtacaatcttgtacacacttaatattattattttaaaattaaataaaattataaaaaatatttaaaaaatattataaattttaaataataatattaaatgtaacaatattaacatgtcacgtatatatataagagtggacataagcaattcatatttctagtttactgtgaaaaataaattacacatgtataggagtggaccaaaactaatgatagttttccaatgattacaatttcttttttcttctaattttggttaattaatttagatatacatcatgatcatcacctatataaaccatataaaatatatgcatgataccatatcatataattaagtaagtataaattaagaaagacatgatgtgcttccaatttgtgatatttaaattttttatgttgttattgatcatatttttacataatcataattattatggtgttaatggagatccacaagtagaatgttttttcatatttggtgattctttatctgatagtggaaataacaataatcttaaaacattttctaaggctaattacaaaccttatgggattgattttcctaaagctactccaacaggcaggtttaccaatggtcagactgtggttgatatacttggtatgtatatataatttttttttatattaaatgtgtatataattatatttattttgtgttagaatgtatatatcttggttcttgggaattatgaggtttattcatttagaataatttcaaaaaaaagaaaatacaataacaacaaaaaaaattataaaaatacgtacaattgtacagaattttaaatatttttacgattttatttataaaaaatatggtctttagatatatttttatattgtactcttgttaatttgttgttcttttttattttttttatgttgtttggatgttgtatatttttctattactttatatagttttcttgttgttttcgtgttattttgtaaaattttcttgttgttttcgtgttattttgtaaaattttcttgttgttttcgtgttattttgtaaaacattgtaaaagtataataaaaaaaatctttgaatgtataatataaaaattttataaaaaatagtactttatgtaattatctattttttctttttgatcaacaagaattatgaggttgttttttcttgaaatatagtgagccatatagaaaaaaaaaataattttgggctcttaaagaatttgtaatttaaacaaaaaaaaaattgggtccttgatctaggtgggctccaggcacaggcctagcccacttatatccagaatcaggcctgagtaactcttattattaaagggtgggatattaataagtggaaattatattgtatatccattttactttatttgttttcatttttactttcacttttcatattctttaaaatatatccacttttataaatgatgtccccattataccccttagattaatataaatcatgtgctacacttaagtgtaggatagtcgtatattaggcaatccactcataaaagtgggtagattttaataaaatataatataagggtatttttgattaattgatacaaaaaagaggtattcctcaattaatccctatatatataatgtccagatcgaattagggttgagtaattcaaat

SEQ ID NO: 98689 - DNA, 620 bp, Cannabis sativa
ccgacgagaataagaaggaagaggataatagctcgcttgaagagacatggaaggccatctcggcggggaggaaactgaagaagagtgagagttgggacgtggcgccgcggctggtgagagccgatggagatgaaaatgactatggtttgaagaagatgaacggtgaggatgatccggcggtttgggcacggcgggagatgagaaagtcggagactttcagtgatagggtgtcgttgaggagagaaaagtcaatgagtcaagaggaattaaacaagagagccgaagctttcattaaaaaagtcaacaacgatattcgtctccagagactcgaatctgaacaacgcttcttcgacatggtcaaccgaggtctctagctttatttcctttttcttttttttgattaaattaaattaataatatattatgttattattattagtaaggtaatgagtttgtgagtttttttttttagaaatttatatatatatttttttgagtttgtagtttttgtgagtggtggttactaatgtttaaatttggttctcattattctgtctatgtgtcaatactcaatagttgttggcagaaactacaaaattaaaccaccaaattatatatat

SEQ ID NO: 98690 - DNA, 701 bp, Cannabis sativa
aagtggaagtgaaggtcatcaagttcgagttggtgacgaaactcaaattttggaggggaaattgatttatttattttcgtattcgcagacttggataattggattatactttgaaagtttcaacaactttacttgtggggttgcttttgtttttcgttttttcttttacacttagacttggggattctctattttacctttacaagtttgaagattgcaatctcctattataattttttaattaatttttatattcgaaaatatatgacaaattttttctttataaaaatattcgttatgcttataatattattccgttaaattttaaaaaaatttcgaataagtattttaaatacgctaaattgaaatatcaaaaattctatttttgatattgtaaattatttataatttttcaaaaatttatagagatgaaattataattataacgaatatcattataaaaattgaaaaagatactttagcatgtgatttcaaacatagaaattaattaaaaaattataataagaagttgtaattagtacttctccatagatgtgggtttcaatttacagaaataccttttttgaactttgatgtaacgagtaattagtgggcggagccagaactaaagagttggggggccaatatgagacagtgcaatatacaataaatttaatttttggtgactttaatacctttta

SEQ ID NO: 98691 - DNA, 650 bp, Cannabis sativa
ttaaggctccaattgataaaaaagattgggttggtcttgaaagttggattagttttagatatattgttcacttggagattagtggaggaggctcttttgatggacaaggatcttatgcttggccctacaatgattgtcaaactaacccacattgcctccaacttcctactgtaagttctctctctataattctttgccatattcttaactattgtgtaaaaatttatgttcatagaagaatctgttcgatttatatgtaaaagatgtgtagagtacatgtatttagttctaacaattttatgtttttattatttacagtccatagggcttgaatttgtgaatcaatcattgatcaagggcataaaattaatcaacagcaaaagctttaacatgaaagtgtttgggtgccaagacacaacttttgaaaacattcaaataacagctccagccacaagtcccaacactgatggaatccacattggttcatcaactggaatcaaaatcttcagctctaacatagccaccggggacgactgcgtctcaattgggccggggacagacaacctactcgtgagtgggttgacatgtggccccggccacggagttagtatcggaagccttgggaaatatcccaatgaagctgatgttac

SEQ ID NO: 98692 - DNA, 568 bp, Cannabis sativa
  modified_base (257)..(258): a, c, t, g, unknown or other
  modified_base (315)..(318): a, c, t, g, unknown or other
  modified_base (502)..(529): a, c, t, g, unknown or other
aaaaaaaatgggtttgatgcggatggtatgcacaacataccgtccacgcgcacacctaggggactggtcgagaaacctcagctaaggaggctacattcagcctgtcccgcgcgcgcatggcccagccttcagacaaattagggccttcagaccgagaaaactcggacaggtccttgtcagaggcgcgtgtgaccaagtgaacactcggatccgcgcgcgcatggggtgacaccacccctatcttttttcaaaacttnnaaaaatcataactaatttaaattaaaccgaaattaagttctgtaaaaaagtgaattnnnnaattttttccaaactatccaacaaaaataattccagaaaaaaaatgcaaattatttttcgtaaaaaatttgcaaaatcaaacaatcatcaaataacacatagatcaacatgaatcacatccaaatcacacatatatcgttttaactccaagtttcttgaaaggaaatcaattaccatggctctnnnnnnnnnnnnnnnnnnnnnnnnnnnnggatctagatttactaacaactatatttttaacatccta

SEQ ID NO: 98693 - DNA, 776 bp, Cannabis sativa
  modified_base (325)..(346): a, c, t, g, unknown or other
taatcttattgatacaaagtttcaaaaataaatccagaaaggaaaacgataactccattccaatccacaaaagcaaattaaacctaaaacctaaattcaaatttaacctaaaattataaaatcaaatttaaaatcttaccttgctcgttgtaggctatgaaggtgacggtggaagctgaggaacgtcttcgcgtggtggcgtagaatagagaaagctcggagcttcggtagtcgatggagtttggggctttaagaataggagaaaggagaaataattggcatcaaatatcagttcaaatataaatgggatttattttatttttannnnnnnnnnnnnnnnnnnnnntttattattttattaaatataaatgaaaagtcacccttgaatttctcataaactaagaattcagttatatagacacactttatatagaatagatatgaatgtatgcttgttttaactatttacactactagcactaattgtttatgcgacattaagggtgttagtatagtgtaagtttatagagtagttacagtgttaccaacacgagtactaaggggtacgtcgtgcatgtggtacaacacttagtaacttctccgggtacaataatggctctaccatcacgagtacatgtttggtactttagtgcatatggtatacagtggtcgtacttcccttaaaaacgttgttaagcatttggtgggtttagttatagagctcagagcggcttaagcataaagccgaaattgcatggtttatatatatgttatgc

SEQ ID NO: 98694 - DNA, 685 bp, Cannabis sativa
caaaataaacattggagaataacacttgaacatgaaagaaagtttatctcccatctgcgtaggccatacatgaattatagaaagacattatacctgtaaatgcctcgaactttttgctgaattttccactttgattaaccaaatccattatttcttgcctgtgagaaattgacaatgtaaaaaataattctccgaacaagagtaaaaaataatccattattcctttgctgaattcacataaattctggactcttaacgccatttaacaaaaagcaaggtaaagtataaaagatgggaatacctggataaaggatgattatcgcaacccaagaaaattctgccacgtagtctcttcttcaagattgcaatacagagggaagctgcatcctggatagagaagcacaaaagttgggaatattgttgttcagattctaaaatacaaatcattgttaggcagcaaaggaaatcagtaaacaaaagatagcagcattcaagtccagcaagtctaaccataaactgttggataaaactcaagagtgaaatgaattctagctatgataagacttgggaagacaaaaaaagaaaaaagacaaaagacaaaattcactacattactgaactaacaaactttaggtaccattatttcaggaaagaaccatattgattagtgatcgtaagtacattt

SEQ ID NO: 98695 - DNA, 1592 bp, Cannabis sativa
ccgtgtggcagtaaaattgaaaacaattaccccaaatgcagtatttttgtaaaatgcccaaaaaaaaacaatcatatgttttattccatgatacaaatatgtagggtgtttttacgatgcatctcactaatatgggtatactgatacaatttctaactattttagtatttataagaattttttagtctaattttttttataatcgtgtacgttataattatttaagacattttgtaaagttttaaaaaattcagaacaatttacaatgtaaaaatcaatatttaaacagtctatttcacaagcgtatataataaaataaaaattacacgtgcagcagactctttatatcctattttcagtatgttaattttttttttttttttgaatttctaaaatttttatcaaatatcttaaataactacaacatatgcgactgttgactcagaaatctagactagacttctaagcacatccgcttgctagattgctgaaaatgaataagtagttaaatatttataagagagacacaacaaatttataataatattttagcttctatatcacaatagtagttaaatatatacgagagagacaacaaatagcgtaatggcatatgtgtttacttaaattattagtttggatccagaggtgaaacattggacgaatcgagatcctctgttaaaatttggtgttccatattgtattaaacctattaaaatttaacacatcaactaatttaatttatattagatatgttaactaattttgttgactttattaaaagttttaattttttataaataaaaaattaattaacgtgtcaaattttaattggtttaacatatgagcaccacttgaaccattacatcattttaataagttccaatcatataaaatgcatataactttttttatatcacgattttttcagttcttcgactctcccttgttctttaaaaaataattattaagtgtcctataattttagtcttagaccatattttctctagcacaaccatgcatgcctgctttatggttggtgtatctcaatactactgaagtttactctttaaataaagtatgaataagaaataagtaataaataaatatttattaatactattataaaacagaataatatatcaatgtagtggaatatgtgtttacttaaattactggttcgtatccaacaggaccttaggtgaaacattggaccattacaccaaattaagttccaatcatataaaatgcataacctataaatggagctttttggaaaaaacttcggagaggtaaattttattcatctgattatgaaatgtgtaagctcagtttctcgattcttttgaatggtgggtcgttaaagaagttaactcccaagtatggtctccatcaagtatggccaaactcttttggaagttggcgtgaagatgaatcgatttattgtaaagtgtttaaggctaagtattgggaccaaactttctggtctttcaacattccgaataatgtcttttggacaaaattatgtcaactagggaattgataagagaagagtcctgctttcttattgcaaacagaagtagagctgaggt

SEQ ID NO: 98696 - DNA, 658 bp, Cannabis sativa
tctgtctcagtaatcttggagtacaagtcttcatcaccatcaagctcccttaatgcatgttctatggtttcttggcttgcactagtagtctcgagcacctatattcccaatcatcacaaattgaacaaaaagtggactatcaagacgtgtatagaaaatagtgtataatacaagtgaaaattgtaatctaaccataccttttcttctgtatcattagcgttgtctgttttctttgccttttctccttcggtttctgtttttgagttttcttcatggctgtcaattattccttccctttccatgtaggtatcatttgtagctgcttcaataactgactccgtcttactttcttcaggtgttacaagtaacaaatcttcaagtttctcccttctttcgtcaaactgtagtgggtgttgatctgtttcaccttttgatgctatatctgtacttctttctgtggttataaatttgtgggtttcctcttcttccaaatctttggtaatcagtgtgtcatcaactttagtctcttctttcatggaattcattggatctagctccttgtctatttcatgatgatctttttgcttcattgacaaggcaactacaaacttttcagcatcttcacttgttggcatctcagtttcttcgagccttgcaa

SEQ ID NO: 98697 - DNA, 674 bp, Cannabis sativa
tttcctcatcataatggtccccatagattgaaagcttaaactcttccaaagctttaaccacgcctggtctgtgtgaggtaatgtgcaatatattacattaattacaaattactaaccgaatgcacagagaagacaaacatttattatcgtctaaagctggattgcctccttttggtaagcacaattttcttgcaagagtagtaggggtgtgcataaattcatctaatctaataacagccgaacaatccaattacaaccaaccgtcaaacattaaatgtccaatcataattggatcgaattgaatgttatttattggatcggatcggatgttagatgagttgtccaaaatccaatacatccaacatccaatcaaacatattaatattttcatttagtttagatgagtaattagattttatgttgttatacgtaataaaatatatgtatatatatatttatataaaaattaacttaaaattttactttttatttttggattagatggatccaattcaatccaataaatactggatttaaaacattggttggatccgatccaatccaacatctaatgaatgtttgatcaattggatcggattggatggtaaaatctaaaatctaattagatcggatctgaataggcctaaaaatattggatgtgatccaataaatac

SEQ ID NO: 98698 - DNA, 708 bp, Cannabis sativa
agagcctaaaagtttcaacaacattttccttttttccttcttctttttacaaaaactaacttaacttaagaacatgcttactatatccactgatcaacagagtataacttttgaaacaagagaccctaataaccagaggtggaataacctcatacatgaactaaattcagcttgaatttatgtcaattgggtttttcatatttctaaaaattcagaatcaaccaataatacacagataaagataaaatgtctcaaacagaaaaagggcattcttaatttcactttatttagttcttaacaagataaaatagaaagattcagcaaaaccccaagtgggttcaaaacctcaaatggatgaaatgggcaccattcataatgattcaaaagtacaaaacaaacttaccaaggagcaatcttgagaagcaagagccaaaagcagcacctaatttcttcaaattttataactttaagacacctgaaataagaaatataatagcaaataacattacaaattgaattagcaataagagatatcggttgagtaaacaaatatgtactaagaactgtgttatgagtgtaagaaagaaaccactgaccaactatacgataggaggaggagaagctgccgattgcggcggcggagtgagatactcagagagagaaagaaacttgttctatgatcttccagagggaacttctactttgctt

SEQ ID NO: 98699 - DNA, 1756 bp, Cannabis sativa
atgttaaataagtataaatgatatgtaccaaaataattggtaggacaagaaaagtacaccaatttagagataacacattttctttcttttggtggagctcctatactcatttaaaccatttaggtagtatttatttttgaaaaatgaaaatataggaatatgaatgggaataagaatatgaataagaatagaatgtaataaaatttaacatgcatacaaaattaataaaaaattatgaaattttttctcatcatgcatttgaatagttttgcattctatttcaaactagaatagtcatttcactaaaataatagaaaaattatttcattggaatgacattcaatattttaatatgcaaccaaacaaagaaataaaataaaaattatttattttctatttcattaccttcaactaaacaccaccttagtttttatcttattcttattttagctttagagtgttggttcctgccatgcaaagctcactcatatactgtatcagatctcaaataatatgtacagaatcatcaaatacactctcaatatataatatcgcacatggaggcttttatttttagtttttgagaattgtatttattttttcggtatgaaaaagatgtaattctcatatcagttcaatcacattatatggaaattaatggattaaaaaaataagtatttagttctaattaaatacatttctcaaataaataaaataataaaatcaagtgtgtgttctcactagggatggagattgagtgggtaatgagcggggaatgcactcctaactccgtccccgctccccatttatgtgcctatccccgcccccatcccacttaatccctaatgagtttggggacccattgagtacccataaattaaaaaatgataataataaaataatataaagtaattcaaaataaagttaaagaatttttgaatttgaaataaatattctatttaatttataatttatattataaaaattgtaaagacaaataaatcagaaacataatcaattatatatattcatactaagtttgtaagtagtaataaatttaaaaagatattaaaatttaaaatatttattataatagtaataagaaagataaataattaactttgtagtcaataattttaatataattataggaataaatatttaaaaaattatatgaaaattatattgggatcaaatatagggtgggtagtattacccttgactctaacccaaacttgcttcgtctaggtaaaattgtcctccacctcgctccataacccaccaaagcgggtattccccgccccattcggagtggatatccacgggtacccattcccgcgggtcaaatttttatctctagtcctcactcatgttgaactctctccatgtcacacacacactagtacgaccatattttgtcaaaaattcactatgtaaaaaattccaacactttataagttgagaaatgctaagtggcaagtggtgatatattattgtaatattagtttctatacattttaattcaataaatagcatgactaactaattagtaattacaaaacgttgtattattgtcaactaatattataagtacatttgtaatcataaacatagtaatttcacacccaaaaagaaaaattcaagttcaaatctcctaacgtaatattaaaaaaatatatatatattataggtgcatttatcatgtgtcctaaccactacataatacatattaattatatataataatttaaatagt

SEQ ID NO: 98700 - DNA, 1650 bp, Cannabis sativa
ttttctatattatatataacttttgtgtaacatagttcttaacatgaaataccccattataatttctattaatttttaagtggcttttccttcctgaattttgtgatagggcattatatataagagagtatatttttgtactccactctttatcaaccaatatgttttgggatattttttgccaatatttatgtaaaatttatagcgactaaaattgttatatattttgttgttttggggatcaataagaagttattttcatgaatattatacgcattattatttgtgaaaatgtatctgtccaaatttttgctaggtgttgttgttgttagttatagtttggaattcatcacctgtatatttatttatttttttaagctaaattttaaaaatggatatttaattcaatgtaaaattgtaaatacgagctgaattttttaacacgatacaaaatcagtacaagcacgacatgacacggtcaaatttgagtttgagcataacacgacaactatgtattcatgaatatagattaatctgcaagcatgacattacgcaaaaaaaaaaaaaaaaaaagaaggtttgaatacagtatatatgtgatcacgaataaattagcccgtaattaagagcgacatattagaaaaacttgacaataataatatttatttttcaaacaaatttaaaatgaaaaaataataaatattttgcagcaatatttgtgtttatatatagctatatgtgaacacaacgtagtacgtattcacataaatatatatatgaaacgtatattcgtattatatacatagtacttaactgataacaggaaaccctagttttaactctctctccactgctgttttaaacagattaaataattaattagtgagatacttcaacttaataaaaaaaattatattacagctaatcattgttttctctaaactattttaataaatgattcccatatagctaaatttaatatgtggtcaacttattttgtatagttggaaatatatataataaacaaccactgttctgatgatgatgaaggctagctcgaacttcatgtaaatatatatatatatgtatattgacatggtaactgattttttatatatataagttatatatattaggactaatacaaaaaactcgatacaaagaagagctatagctatgggcaacaataagaaatggcttaagggaaaagacactgttgaaccaagcggtttgatcatagcatttatatatataattaaatatatatacatatatctacatatatatatatatatgaatatatatatctggtgttgcatgcctcatatataacaggatcatcatttcatgcaacatcatacttttcttactatcatttcatagcaacttattactattcatgctttgctttatttacatatgtaataattatatgcagatatattttataatatttaaagtttttttagaagagattattatatatataatcgatctttgcgaattttgtagataagatattttgtaacccgccaagataagatatatatatatacatatttatataaatatgcagtataacacacataattaactatagagttaattaaataagttatatcgatctaattatcataattcaaatattta

SEQ ID NO: 98701 - DNA, 1919 bp, Cannabis sativa
tctaactgctgttggttttcttagtattaaatagtgaaaaaaccgttaaaaaaatttctatcaatcaaaaactcaaaaaaaattacgtatagtatcgaaaatcctcttaaacaaatgaggcatgaaggtacgtagtctactaatactattaatagacaggaaacgtttacgttttcgcttcttgtggccccaccccacgttgtccgttgatccaactagcgccccgccatatccaacggctaataattacccacgaaaacttgcgtcaccgtgaaatctcataaagaatcactctctcaagtatcaagttaattaatcatctcttcgtccgtacaacgcagaaccacaagaagaaaaaccaactagctctttcttgattctgcaaatgttcaagcaattcatccaaaaacccactgatcaacaagaggtatgaaaatctcagtttatgattcagctatcgtatcctatgtatgaattttgtaatatcttatcagaaaatcttcaataacgaattttctcttgaatttttacgaattatattttatatttattcgtagagacatttatagatgtgcttatgtgtgtttcactgagtagaatgcacgtaagggaagtttaacaatggcggatttgaagccgcgtattgctatacactatgggattccgtccacagcatccattctagcattcgattccaatcaaagcctgttagctgttggaaccctgtgagttaacatagatgagaactaggataataaaattcgatttcaatttcgttaataaatagtttgttttgtagtgaccggattttcacgtgtcactatagtgctgatttattatgtatttgtttattgctgcagagatggtaggataaaagtgattgggagtgataatattgagggtcttcttgtatctcctaagccattgccctttaaaaatcttgaggtttgtatttatttggaaacagtagattactagtttgtatcttggttttccttcctcctctgaaaatggaacttgatgattcaaaagatgtgttttggtgattaaaattgaccatttcaggaagcagcctgctgtgttagtccacggggaaattgtcttgaatgaatttgtttgttcatacttatttatttgtgtgtatatatagtgaatattgtctttatcttgcattttctttcctgtaaattttggcagttcttacaaaatcaaggttttctagccagtatttcaagcgagaatgaaattcaggtatctgatatctttctagactctatttaaatgctattattatcttcaaatctctcttttatgtttatcctactttcccttcattaatatgtgatcaatataatatgttattcacataattggcaggtttgggacttggaaaacaggggactagcttctgctttacaatgggaatccaatataactgctttctctgtaatttatggcacaagttacatgtatgatagtaatttgtataactaattgttggatcacgtattatctttaaccaattaccctaaaatgtattgcctaaagtaatacatggcttaaatatgtctcattgtattcaggtatattggaagcgaacatggggatgtaactgttctaaagtatcaagctgatgacagaaaaattattcagcttccttattatattccggcaaatgtcttatctggtaactatattaatatatgccttttttggtatcttttttatgataattttgttgttgtacttactaattaagttcttatggaaagtacgctacaattttaaattgctttgtcattgtggctgaataataaattatgcatgtatggatagttaccctacatatattttcatgaccactcaaatgattctgagatttttcatgtttatttaaaaagaaaaatatttcattgata

SEQ ID NO: 98702 - DNA, 2600 bp, Cannabis sativa
taaaaagacatatcttttatataaatattgtgcttaaaaagacccatcaaaaccttaagtggtgcactcgaatggaatttaaaaggaccccatcatctcctcaacaaccaaccacgcaaaaagaaatgactataaacaatgcacattatatatatacatatatatatatatatatttgtttgttttacgttgcaggaaagcaatgcatgagggtgaaatctacaacagaatcattaaaactcaagtagttgaataaaatatcaaagttaaaaaattacatattccaatacagataagattcataataatgaaaattaatatatataattaggtgctatgcatgcaccatacaatacacaaatctttattttataaaagtacaaaaaacgacccgtaaacaactagctaggttgtgctgggtttttaagttagtatatatatatagtgactcatattaatatttatttaggtttatttagtagaaagtattcacataaatgggaaaataaaatcagggcagttgctcgtttttatggaagaatatatattgacctttcatattaggttttgagaagcaacgtgaaagagacgtgtgcatgaagaatataataaagtatacatatggaatttttataggttagatcgatatcatatacattataggttttttcatttaattttttttattatttttcaaaaaagagtttgtgttgtgcccatttgtcgccgtgctttttggatccattacgttatttttaaataggttattgtatattagaatttactttttgtaatttaattagttttaagttttttctttttcctaagaaaagatttggattgtgataccaagccaagtaatttaatatttatatattttatagtaataaagtccaaggggttatgattttggcttacgagcaaagtctgagtgggtcctgtaatgattaaaatcgggtaggtttaagatggtggaattggccgggcagccctcaaacggtctatttatttaggtgaccgctgaccgaagtgttctttatttttgtttggaatctcttgggagatgatgagagagagcattttgatgggtaaagtagacgtttacaaagattgagatatatatatatatataaggatgtgatgtgatggggcataatatatatcttagcatggggaagacgtaaggtagtgatagccatattgacaaagcatgacttcatccctacgtacatatacatacatgcacaaattttcattcatttcatatactatatacaattactatttcatatatataagtaggaatggtgtgttcattcgattagtaatattttatttatagtgcatggactaagtgtaaaatttatattttgaatctaatttaggatgtagattaacttaaattcaatttaatcaaatatttaaaagcgaattaagttaataatatgttttttttacataactaacaataaaataaaataaattattattattttataataaattaaaataaataaaataaaattctaaaatttaaagtaagaaaaaaaaaatatgtataaataaatgttaaattttattttagattatatttttcttgtaaacaagaatgaaatatttatttaatttattatattttgaaatatatttatatgatattgtgtgttcaatttttaaaatattattttttacattaaattattaattgtatacataattctttttaaaatatatatgtataaatatgtctgaattggattttatcagttaattttatatattaatataacatccaatttacataaatataaattggatcgtgcagattgaattgaattaagtactttatgaatattcctcagtaagtcctatatataagttatatgaaaaaatggctagtacacctctaggcatcctcttgatgtgttttgattttttgattagtttttttttatattgtttatattatagttatttaatattatttataaatttaaaaaaaaaaaaactaaataatttataatgtcgaaaataaagttcaaacagttacttataactacgtacataaaaaaaaaacagtaatacgttcaaaattttattaaaatttataaatagtcctaattatttacaacacaatcatgaacaaaataaattaaaaaaaaaatgcgagattaaaaaaatttctaagtaataatatttacggtttcaatatttaggaagttttatactttttttctttttggatatgttatagttttaaaattacattttttagaaaattctaaataatttatgatattaaaattaaaatttaaatattttgttatacaaatggttattactttttttatacatctaattaataattgtttagctcttactttcttcattataaataattcaaaaaaatttaaaaataataaaacatcttatatataactacaaatacacatgattataagaaaaaaaaaattatattaaaaaactctacttgatacagaaacaaataaaaagtgtacaaatatgacttttttgaagagtgtactataaatttttttaatgatttttaatctctctttattcatttatttatttaattt

SEQ ID NO: 98703 - DNA, 533 bp, Cannabis sativa
attaataatagaactctagttaattatgtgactacactgatcaatatctttgattaattacctcgcttttaatcaaacttgttttcatttaataatatcgttaatctagtcaagaactaaattctataacaaacattcaatggacattacatgaacttaaaattagtcgtgtgcatccgatctaatctaacttttttttcttatccgatccaatccaattagtaatccgattagcaattagtaatttgatcggttttttaattggatatccaattataaacttaaattttaatattaacttaaaaatatgaagaaaaaaaaattaagtttaatacttcatatacatactattcttacaagtgtaatgtagctaaaaattttaaataatttaaacaataatatttctaaataataaaatagaacaaaatatcattaaaataaatacacaaaacaatcaagtattacaaatttaacatacgtaaaattctaataaatataaattatatttttcaatattttttattatataaata

SEQ ID NO: 98704 - DNA, 1022 bp, Cannabis sativa
gtaatgggttttatttagggcacaaaacccaacaaaggtctcacctgaattagcagaaattatgggcattagagaggctttaagttggctcaagtgcaacaattacataggggcagccattgagacagacagtctggtttgtgtcgaagcaattagaagtccagaaagatttgtttctggtttcagattggttgtggaggagtgcaagaagttgctcaaaagtttgttaaatatttcgttattttttgttaagcgttctacgaatcgtaccgcgcattttattgcccggcattctatttctttagttgaacgtatgttccctattaatagtgttcctatggatttgatgtctatcctaatgagtgattgctcaagttaataaagaacacttttattcaaaagaaaaaaaaaagaagaagtaattttatgctcaatcttattttttaacacctttaagagctaaattagtgtatcagtccaagattggttcaagttattttttttttcttttaaaaaatgaaaattaagtaaaaatgtaataactataaaatcagtaattgttaactattttcactcctcgttgaaatcatcttcattaatctaaaaattgtaaaaaaaaattatcaaagtagattaccagctaattaaaattgttgtttctttttcacaaataagcataacagtagaaaaatagcaagcaaattattaaaaatcaatgaaaattttaactatagctggttgaatagagaaatgggtttgtggtagagatgtaggagattgcatcgaagtggaaaattcacataatattttaaaaaaattataaaagaggaaaataggtcaagcggttgttgcaaaataataattagatgtaatttttaaaaattaattaagtattcaaaatttattttagaacgggtggaggtctaaattttgtaagaaaaaatagaattttattataaatattatagttaaatggtgtaaatgttaaaaatattataatagagacttaaatataaaaataa

SEQ ID NO: 98705 - DNA, 900 bp, Cannabis sativa
tgccatttacaaaatggccccattgtaggtgtgctatggagcaccacgccacacaaggcaaggatgtgtgtgtgtgtgtgtttgactttgtagagagggatagggagacacaagaatgagagagggaatgggaagggtttagttttattatttgaggggtaaattttgttctaaaaaatggatgtagcatcttttctctaatattgtttaagatggtagcctataataacaccatgctacacatttaagcatgtgtagtcaaatttccttctctttattggtctttgtatcttaaattgtaatataattgtaatattttgagttttttccattcatataataattagtaataatagtagcaaacattggagcttataatgctagagtctttcatttgtagatggtattctatggacatacattctaggaacttaggaatacattcggtttggcaagtttgtatctgttgtattcatcacctaatacatctgatgctctgctcaccttattatatacaagtctgtttacttttgttttcatttcaaagttggacaaatcgaactcatagaccatatagtgcaggtgtttcgtgatcagccttttatcaagttatatatgtttaggatcaatttattttagtcctagaaaatcttctttatgggtatgttctaataatctttgtttgtttgtttgtcacaaaataaaatgaaatattgtgaaaggaagaatcaactatagtttcgagtcttggtagctagctagttagtagtattaatgttccaaatttcagagtgtgctttcagtaatgtcatgactcagtcatcactcataaactagtttttctttgtttgtggaagttggttcatttcatcttagtccaccacgtgattctttattgac

SEQ ID NO: 98706 - DNA, 618 bp, Cannabis sativa
aatcccaatcacttccttcttcctccacactttctgggttttcctccaattcccaatcgattactacttctgtaactttttcaatattaacgtttatttatatatattgcacaagcaatgaaactttattttcattgttggagataaataatgtttatgtaattactcctattattattattattttttttttagaataaaaactgttatacattaaatctgtaagtttaaaatacaacagtttagaaaggaggtaattcctccaaccaaatacaatctgtgtccaccgaaagagcatacttagctagcttatgagcataagtattagcagatctaggaacataaaaaatttgcactcccgagaaattggtcacaaaattacgaatataagataaaatacaatgaaattcagaaactaaggcattagaagattgcaatcctttcgctactaaaagtgaatccgtttcaatgtagtgcaccgagaattgaagagcaattagtctcggtagactataaaaaatagccaaagcttctaaaatttctagtttatagcatcttggaaaaggaagggagaaggttgccagagtcatcctattggagtcccttaaaaccgctcca

SEQ ID NO: 98707 - DNA, 540 bp, Cannabis sativa
  modified_base (501)..(506): a, c, t, g, unknown or other
aaaactaaatataatatattttctctattatttttaatgcttaaaaattaaaaggtattgtttcatattttaaaatttactacttgaatgagtaaaatattgaggagggggtcgcagattcatctaggttcattcgtttgtggaatggagtatggaattttaatatgtcatcaaaggtaaaagtgtttgtatggtatatgttccacttgactttaccagtagcaacacaatttatcttttagaatgttcgggtacctctttactgttctcaatgtaaagaagaatctaaaactcctgagcatgtactattttcttaaactggtttgattccagtgtggcatcggttaggggtttggtcggtgctctgtcaacgtgtttatggaccaatgcaggaaattatcctatttctctttgtcacgctaccctgtgaagtttttgaattgttgataacaaccctttggtggttgtggtatgacaggaactcagtattatttggcaacnnnnnntcaagattggatgttattccagacttagtcaata

SEQ ID NO: 98708 - DNA, 572 bp, Cannabis sativa
aaaaaaaaaataaaaaaattatcaatatataatataataataaaaaaataataattttaatatttattttagtcaccatcttttcaactttacttctaatactaaaccataaaaagggcaataactatcatttctatccctcctactgtcatcattttgaaattcttcatccatagtcttcttcccaaattaggagtactagattctcagccattgcgcgtgaattttgacataatttaccatcagcaaatgaggagacttctctctcctcaaactaccaactgccaactagactactaccaaagtaaagggacccactcggttaagcctgacacgtggcatagctggttctcaactcatactcccgccaacgactgtctccatatttattattattgagtaatattttgcaataaaactgtctgtaattttttctgaaaaaattaaaaactgtatataataataataattgctagcttaattaattattcaaagttttgttcttctacgacaataatccatcgtataataataataataataataataataatatgagctggacctaataa

SEQ ID NO: 98709 - DNA, 814 bp, Cannabis sativa
  modified_base (784)..(785): a, c, t, g, unknown or other
agagcttgagatcgaaatgagagttttagagattgagtcgaactgagtgaacgagagcccaacaaaaaaatgggtgagtactttcaaaatttcacacaacaaaaaaaaagagtttgaagatctaaataacatatacatttgcatgggcgtaatttttttttttttttttttctggtagtttcataagtaataaaggtaattttggtattaataatagagctcataaacattcttatttttattaaggttattgatatagattatagtgccaagccaatagttggagaatgaaggccccatatataatctttcacttttagcttgttcataaaagaaacaaaaaagaatgtggaatcttgaccaaaaagaatatttggtgtaatatgaaattttgggggctaaattctctcaactgccatttcatttgtacttaattctttaaattcaaattttagtggtaaatttttcaaactactgaactattagcaaacttaagtatcatttattaatctcagctaaatatcatcataaatagcttatgtggatatacttctacacatgtcaaatttacactattacacttaatataattattttaagaagtaaaattattttaattttttgttttctaatttctgttttactttttttttttcatcttcatgctaccaccacctccaagcacacatcaaccgaaaccgcacccaccacccacccatgaccaccgaagtcatcactacgggtgttcgcagtgcgggtagtgcggtttttgactattttttcnnaccaacccgcacatgcggtttttcaaatt

SEQ ID NO: 98710 - DNA, 564 bp, Cannabis sativa
atttgtttgggcagataaaattttaatccatttttttaataataatatataatatattatagtaattgttttattaatatttataagatttctaatgatttataatttcatattaccgaaaattattttgataaattttccctgcttataaaacacataacaaaataattattttatattttcgacataataaattaattaatattctaaataactatattatatatctttatatctataaaaaaattataatttatctataggctaaacaaacataagaacacaataaagagaaaaaaaaaaaacacacaaaaaaaagttcatataagtcataaaaaaagttaaattatccgcaagaaaaattaaactgttgttagtaattaatgactaaattattaattattagaaaaaaacttgtaagactaaattgttatggttttcaaaatttaatgactcatccaataaaaagaaaattaaagacttaattaccaaaaaaaaactttttaaggactgaatggtcaaatagcgaaagggaaatttgattttctatacttagaaaatcaa

SEQ ID NO: 98711 - DNA, 524 bp, Cannabis sativa
gagcactctattctttttagggtttctctctagaagttcttagtcaccactttattttttttccttgagcagggctcgctggctgtttctcggccttacgacgtggcttggtcggttcttgttgatctccacactgttttcgatttcattggggttgttgcaatccttttgcatgagttctttccttctccgtcttctttctttacaggtgtttctcaaagatttgagttgtgcattggctttagattggatcttcaattggtgtgttatttttgtttgctatgttttgctttttatgcttattttcaatagtggtgttgctacatcaccttgttattgttatggcagtaggactttattcattaatggcaggggattacagttttgtttatttttgctacactaggggaatctcaattggctcaaagcacgattgtattagtagcatgagtatttttgtcaatgttcagacctaggggactcaaatatttattgacctatggtttatggtgtgattatttgtt

SEQ ID NO: 98712 - DNA, 550 bp, Cannabis sativa
  modified_base (200)..(209): a, c, t, g, unknown or other
tcccatatttttattatataaaaattgtgtattatatcgacctagaaatgataataaataagtaaaaggaaattttatttacaacctgattttaataatttttatttcacataaaatttacatctttaattgtattaaattttttatttttttttcttctaatttatatttttacaaaatatacctatcaaataaaaatnnnnnnnnnnttaaatattatgacaaaaatattaaaataaaaatttatatgaaattttcttataaaaaataaatatatatatacagtacatggtttagaaaaaaatatgaaaacataatcaaagtaagtattgaattaacataaaataatgtgagaaaattcaaaaaaaaaaaaattaagattaatttttaaaaattatttaaatttatttttttcactttacttatcatattttgagatacaaatagaaatctcctaaacaaaatcggttcatttatatttaaataccatatcaccttccaaggaaataccttctaaatgggcacccaaaaataaatttcaagcatttat

SEQ ID NO: 98713 - DNA, 3517 bp, Cannabis sativa
gttatgtgggaacgagatcctagagtcttctgggtggttagaaacgcatggcaagtactaaaccacccggacccaatggtgaacatgtaccgaaagatgaaacatacaaaagaccaactttctaaatggaacaaggttcagttcagaaaactttctgtccaaatcgaggaagcccgtgcaaatttgaaaggtgttgaagagtctcaagcccccagtgaggaagcgcactcggaggccagaaaaacgctaaatgaagcactggcgcgggaggaaattttttggcgacagaaatcgagagtttcttggttgaaagatggagacagagcaatgaaattctttatggcgtccacggtaactcgaagacggcaaaattacattcaaattctgagtgatgagtcgggtaatgtgctggaccagatagcagatattgcaaaacaatttattgataaattttccaacactttctccatatcaaaaccgcggactgccctcaggcttgaggagtggcttcacctcaaatcagattgttgtttagatagtgatttaaataccatcccaactgaagatgaaatttttaaagctctttgctcgatgggaattgacaaggcgcctgggcctgatggccttcctgtggctttctttcgatctcactgggagaccattcgaccggaattcttgaagatgatagcacacttctttcagacatctagagtccctccattcataaatgacacgaaccttgttctgattcccaaaaaggagaatccgtctacggtcaatgactatcgccccatcgctctatgtaatgttgcatataagtgcatttcaaaaattctagcgttgcggctgtgacatgttctgcccatgctcatttccctgactcagatggcttttttcaagggtcgatcgatctcagaaaacacttcggttgagaaggagatcgtccattccatggcaaggagaaatggctctaaaggttttatgatgatcaagcttgacatggagaaggtgtacgacaaaatgaattgggagtttatcaaagaagcgctccaatttcattgtgtttcggacccgttgctaggatggataatgaactgcattgaaatcaagaagatgaatttgatcattaatggatcgaaacagggtacaatctccccccaatgcggcctgagacaaggggaccccctttcaccagccttattcatccttgctgcggatcttttatctcgcctaatctcggatgcaaatgtgaaaggaaaaatcagaggattcaaggtcgcaagggcggctcaaccgatcacccacctcatgttcgcggatgacgtaatgttatttggccatgccttggaaaaggaagctgaagcttttcttggatgcttacatacttactgcgagtggtccggacaagcagtgaacttccagaaatcaacggttttttttctctaaaggagtcccaaagaaacgggcagaaaaaattgccaatctattgggaatgtgtaaaatgaagcaagatgccacttacttgggtcttcctttttttcgggcagagaaggcatctcagaagaagaattacctggtgaaaaaagttcttaatagaatcgatgggtggtaatcgaggcttctatctaaggctggaagaacttgcttaatacaatctgtgggaggatcgttgccaatatatgcagctgctgcagatatcattccttgtggaattgcatctaccattgataagtgcctgaggaatttttggtggaatggagcggatagtagaaaaccgatccatactatgtcgtggagctctttgtgtaaatcaaagtttttaggaggccttgggttcaggaaaattagcgacatcaacagtgctttcattctgaaatgggggtggaagattatcaatgactctactagcttatggagtgcaacaatgaaagctaaatatttgaaggatgctaatttttttgatgtggctcccaaaaaaactgattcgaaactatggaaagcaatgctgaaacacagagtgacacttaatgaaggcatttgtagaaggataggtgatggaaaaactacatttgatgcttgggtaccctcaggggatcacaaaccatgtcctcttcttgacgccaccaaaggagttaatctggtgaaggacttcataaacgagaatctcacttggaacgaaccaagaattagagagtggtttggatcgatcgatgccaagcacattcttaacatcgccttacccgctataaggaaggatgatttttggatgtggctaggcgaaaccagcggaaaattttcgattaaatccgtttaccacttagtgaagaatggtccaagatcattacccccgcttggcagtggaaattagtgtggaatactcaaatgcatacaaggttgaagatactttgttggcagattctaagggatgcgctcccaactagagccaaattggggcagttcatggcaattccctctgtctgttgccctctctgtaatgatgaggaggagacttctatacatttgttttggcaatgctcttttgcaaaagccgtctggtatggaatcctttggggcatcaaaacggattccattcaattccctgattggatggattggtttcaatggttcaattgcaaaaggaaccttccccacgatctggactttgacactttcttaattggggccctatgcatatttaaggtggtatggaacaatcgtaacaaggtaattgacggatccaacattacccctatcaatgaggttattcgaatcgtgaggcgtcaattccatgatcactcatcctctccccaacctctttcaaagaatgttgaaataagtgcaactcctcctatgggatggattgcgtgtactacggatgtttctattaatgctgatcagtccttcggagcagcagtgtttagggactcttgcaaccgaattcaggccatttactcggtgcatctcaatgtaacaaatcccacattggtcaaggccttgatgatagtgagtgctgctgaattcggggtgcgatgcaagttcaacaacgtcctgttcttctgcgacaatttgttggtggtaacacactttaatgcattgcacggtgaggatcattagttgctgaatggagctgtggaaaggttctttacaattgttcgtccgctcgaaaattggaaggtcaagaagattagccggggggccaacttcatggcacacaactctgcaaagtgggcgcgataccatggctctgttggtgaacttgctgtgaataccatggatgaaggagtgcttctggatgacacggaatgggtccctgacccgggatagatcctgcattttgttttggtcttctggtttttttggtgatctttttgctttggttgtgtgttttttcatgttgtttgttgtacctcttgtgtcttaaggttgttgtttgcttttctgtctcttggacttgtttcgctagcctttggttggttagatttgctgtattttcttcttttgtttcaatgaatctggt

SEQ ID NO: 98714 - DNA, 590 bp, Cannabis sativa
atgtgtttaaattacattgttttatataaattcatatttaggatgttaaaaacatacatggtagtaaatctaaattctcgtaaaataatttcaacacattattctcgtccacctctggctccacctccacggtgatattttggcgaaggaagaggatcatcgcgacaattctccgatcgccatccccgaccacgacctgacttttttctatgaagggatagagacagaaaatagttatggaaggaaatcaaagagtgtgagtgaactaagagcttctttatatataaatattttttccttaatagcagagctcatcctgggttgttctcggtcgaaaattgtaacctgccggctagggtcctccatagattgctagctacgattagctctctagttttatcaagatccaggttctttagtttccttttatcccattcgtttttatatgtttgttttgattagaaaatgaaattttgttttcaaattctttttgcgatttctttgatattgttaagttcttttcggtatcttgttgagtttttgaaatcgttttttattttcttttgaggaatcttttagtaatgggttgc

SEQ ID NO: 98715 - DNA, 1320 bp, Cannabis sativa
ttaattttctaatctcacaatctccttaatctaacataactttcatacacatcaaatttgtaaaattgcatagatttaattttaaattttaaaaggatttttttttacattttcttatatttcgattgaatcaataaattaagatttaatttttcaaaaagaaaaatacatagaaaattgtagtataatttaatgaaatttaaaataattataaataaaataaaagatccaaacaaagccaaactatccaaattccaaagaatataataaataaaaacactcacattaattagtttaatttttcttttgtatttttacaacattaccaaacacttcataactaacaatatccacaaagaatcattagcaactcacttaaaaaaaaaaattactacattgttatgtttaaacacaatttagatcatgaatttcccactagaaaaactcactctaaacttgatcaaaactaaacatacaatttgcacacacaaaatcactcggtcaaagtcaacgcttaatcggttaataaaccgcgccttttctaaatcatttgcaagagttcttgaacaatctcagaaattggaggcctaaattcgggttccctctgaaatcaaaagagcaaacataagtacctaaacccgaaaaacttgtcattctttgcattgacactctttcgaggtcaattttcactgattactcaaatatgtaaagacgagacaaatttatatttcggtacctgtatgcatgaggagattatatcggcgaatcttgacaaagatttcatagaaaaagatccattaagagaaggatcaaccatccttgacaatgcatcaatatcatgaagcttaggtaccgcccatctaactaggtattgttccccgcgaggccttgacctatcgaattttttaaaacaaatttcataagacgctcttgacaatattttaaggaaaatgtttcatccaagagtactttacctgtcataggattttcgccccgtgagtagttctaacaaaacaactccaaaaccgtaaacatcgctctgacaagtgtaactacccgattcaaattctagcgcgctataaccgtacgaattatggcctccagacatctacaaagcaacacacatccaaaataaatacttaatattttgcctaagtttcattactaaaaggtcttatgtttcttacttgactcaatgtgaaagatgaaagcaaaggagccaatccacaatccgagacaagggtttcgagcttttcattaagaagaagattaaccgatttgaaatttcgatgaactactggcggttggcaaactccatgc

SEQ ID NO: 98716 - DNA, 722 bp, Cannabis sativa
tgcacattaattatacttaaattttgttatacaatattgttttgaatatactattatggacttactatcgtccacctggcatgttaattaagatgagcttaatgatgttgtacattatttgtttggctaatacatttgatcgatgtatttttaatatatgtcaatcatggacaacacaaaagacggatgtccaagttgtttgtggtaagacggccaacagctcattctaaattcttctgtaccaataacaattataatggacgttagttgtatacataattatttcttatattatttgtccaaaataccaaaaatttgcttgagaaatcattttattttatttgttcagaagatatattataaaaatatgctttcattgagagttgaactcaagacctcccgcttactaaacgggtgctctaaacaactgagctatgaaagctttataagctctttgtgcttttaattctgtctcaaatttatatatatttatctacttatatatttatataataactacgttcactgtttgttatgttaacacaatgagtttaacacattttttaagaactttctttctggtgtcgattaaaacaataaatcatttagcattaaccagattaaaaatgtaaaaaatctctattattgggctagccatgatgaatggatcgttctttgaaataggacatgccaaagacaatctatttctttcacaatgaaaa

SEQ ID NO: 98717 - DNA, 3422 bp, Cannabis sativa
acatgtatcaaatcatgatttaatagctggttttgtggtcttttggtgaaaaataggaaaccagtagcagaggaagttgctataattgtgtggtgtatttagttggctcgaaatgatgttctttggagcaacaaatcgacaaaagtttcagaggtgattcgttcggctaagactaatcttgacatatggaaaaatgctcaattaaaggatttcataccattattgaatgttaattttagtaatggtagggagcattggatgaaaccagttacaactaattcaaatcgattttcagcttcgaatatagccccattgacgttgatcttgagcttagttgtaagggtatcttctgagattgctgaagtggttggagtgaaggaagctttgagttggataaagttgaaaaatttgtctgatgtggaaattgaaactgattctttagtagttgttcaggctattaatggttcggttcaaatgtcatctcaatttggtttacttattcaagattatcaaatgcttctttcaacattacataatgtctttatttcttttgttaaaaaatctgcaaataaggccgctcattgcattgcgagacggttttgttttatgttagattgtatttttgatgagctttctgctccatttgatttgctttcaattgtaaggaatgacagtttttcaagttgattaataaaatttcccttttaaaaaaaaaataataacagtttttctcaaaaaaaaaaaaaaattattattttttattttattgtatttcttttttcttaaaacaataattatatccataaaccattggcattacactgttcactcacccccttgcttgttagtggaaccgttggatttaaaaaaataaacaaaaataattcccaatccaagtaatccaacggctggaaacaaatctcttggtgggttacacaaaaaaataaattatatttgaaaaaaaaaactgtacaactaatcgaagggtagagcaaatctggtctggtctcgacagagttgtcttcttctccgtctccgattctcccatcgccgattccaacaatctccacttcaggtattgaatccacatcatctttttctttgctttaattcaattcattcaacactttatctctgtaactaatgttagaccagactcgtagtaacatgagcgattcctccttaacggaaccggccaagaccggcggcggcggaggaggatcggaggcgtctcggattggagaggtgaagcaatggctggctcatgagtttggccaagcaggaaaggaagttccacattttgaatatacacctcgatctgttgcttatttacacaaccttgctactctatctcaagccaagacccaagcttctaagatcctcgcttctgattttcgtctcaaagcttccgagtatcgctcccaaggtttattcacacactctctaattctactttttattttcgtcgattttgaaaaattatggagaaatagggaaatttgtgaaactaacaacttgaaattgtacaatttgcaaatgaaaccgcattgaatttacactgtgcgatcattgtggcctttttatggttgcaaattagtaatttttggttgcttgctcattgcaagtaaatgtggttattctgttggaaagttattttactaataaaaaattttgtaaagactatttttacaaaactctctgagaaatgtatgattttgtgagttgcagcggcgagaattagggagattttggagaatgtgggtttggcacaggagggtatggcttcaaatgttgttgggtcggttcaggttctggcaaatgtggccaatttgttgaacattagagatactgagttaagcaggtgagctcttcccccctctatttttgggtgaattggtgtttttggtttttgtttagaagtgattaatggaagaaatggtgtggttttgggtttagttttcttgtagcaatgggggatatttctttgaggaagactagtgtggaggaaaagagggttaaggtggagaaagagtcaaagattttacttgattttacacgaaaagccattgcgagattgacatatttgaagaggtaagtctattgaaacttttggtaggaaagtaatagaaaatgttagtgagtgttttgattgtgatgctaatctctgtttggtgttctttattcatttgttttactttttattaagaacacttgcgcaattagaagatgatgtaccaccttgtgaggctcaaatggagaattggaagacaaatttggctgttatggctgccaaggagagacaatatttgcaacagagttctaactacaaggtattctttcttgatttgctcctcatttcttatataaaagattagttatatagttgagtatgaaaagtaggtcaatttaatggagtcattttgtttcttaagaagcatttgttgaaagaaaactaggttaagcgatccccacgtttttagagagtgactgtaaatgttataccaagtgtttaaactgaaaaaccgcatacaaacttgtgcggatctgatctgggtatagttgaatgcctcaggggttgatcgataagtaataacttaaagaaaaaaaggatagccctttgttaccgtgcgtcgtttggtgaaggttgcttatacaagtccttgaaactgttttagaaattgtacactggattttatactcaataccatatttgagttgtgctgagagcttatgttgttgacaggctatgcttaatcgcgtgggctatctcccagaaataagccacggggtattggttgaaacagcagaacataggaaggagttggagaagaaaacaaagcccatactcgatactttgagaagctatcaggatttgcctccggtaatttgccctatttcatttaatggatcctcattcgtgtttgaagcttcgcagacaatgaatttcatcacttttttttttttgcaggataaggcgcttgctgctttagcaattgaagacaagaaaaggcagtatgctgcggccgagaagtatcttgaagatgttttgcaatcggctcttgcaccatcagagtagagtaatacatcgtgtattttgtatataaaaatataaaatcattctatgattgcctctttgttcttactaatatgatttgttttagtaaagggtgattttgtgtgctgatatgatgttttttgaagggccttgttatagagtttacatatacattgctaattaaagatcatttctttttgaaattctctcctaagatatgctatgacttcaattttttatggctatttaagatttttatctttgaactatgatccatattattgtgccttcaaaatttttcaacccactataaatggttcccgaactattcacaatattgtaaaaaaaaaattattaaattttgtct

SEQ ID NO: 98718 - DNA, 1845 bp, Cannabis sativa
attttactacttgtggttgaactcgattctttacttaattgcaccagtatagtgaaataaaacagaataatcaataacttacgtttcagtttacagtatcaataaacacgtaacacgatcaaaaaataatatacaaagagatctcaagaattcaagataatgaattaaccagtaaaacagaaaagaacaacaccaggtttaatgagttcgagccatgtataatgctctacatctcgattgaaacatcaacacatatctttattgatatcagtgtttacaaggttacaagaatcttcacaaacttctcagagattacgagaagaaatttctctctctagtttagactctctctctctcaatcttacactatcacgatttttacttaagcaaatttggtctgattctcacacaggttacaaagatttacaactaccaataaatttgtattgttgccaaaaatatctcctaaatcatcgtgacacatttacaccaccttaaatgattcatctcatcaccaacaacaataatccacgtcatcttgaaatatgcactttcagtatggacaatccggaagctctataagcacacaagcctatagagcttccgaatgcgtacaagactagcttcattgtaaaatgaactttcaagactgatagtaagttgtccagtagcataacaagctattcgggagatatacattccataaacggtacaaacttatttagaagtaccttttcgaattctataagaccttctatacatattcacactaagcttacgatatcttctcttcgaattcacagcttccaattctaaacagtgaaacttataaccataaccaacaaaaagtttagtggtaggcatcttagcatctacatctagtgactagtgcgtttatcattttctttttccatgcttagcatttctcttttctctttctaaaaagaatagcaaagtttccctaaaaaaatagctcatagtgcacatctggcacacgtgggcgcagtaagggtattacgttaagggacggttagatcacgttctcaacgcgcgcagtcatatgagtttccgttactcctgctccatgtttgaggcctcaatcaccgccgttgtttttttatagcactaacacagaggccgttggttccttccatcgacacagtctttgactaatcattttgccgacctctctcaatcccacgcgtcctttatgtccgcaaaattcacgcgccttataggtgatatgttttgtatcaaagaatttatatcagtgacgtaacattatattctaactaatctaatcatatttatgttagctgaaattattttcaaattttgtatcttattttatcattgttttctaaaatataacttaaaaggttttagcaattaagcgcattttgtgtttggttaacacgtgagtgttatatgtgggtttataattgagattttttcaaaatacttattttttgtaattttattttttgaaaactgtttttaaaaaataaggccaaataagttattattttcaaaaaaataatttctgtttttaaaaacaaaaaacagtttttaagttatgatgccaagcatacactcataatttcagaataatttataatataaaaaacaatgttcaaacaatttatttatttcacacgcgtataaaacaaaagaataacgtgttaaaccctatttttagaatattaaatttatctaaaagtctcaaaattttacaagatatcttaaataattacaatatacatgactataaaaaaaaattaaagtttatggcacgtttactaaccgtaatcagaataaataaataggagaaataaaagggaataa

SEQ ID NO: 98719 - DNA, 519 bp, Cannabis sativa
tttttgaggttgaggactaatcggcatcaacctcaagtttttggggacttttgccgcaattatcccttgtgcattagatataatattaaaatttaatgtgaataaatcacaaaattattttgtttcaaatataatacaaaattttactatgattgcatataatcttattggtgtcttatagcattccaaaatggaaaagttagatttgataagttgcatatatatcatttagtatgggatgtgaagtcattatcgtatataatgtggactattttttttttttttgaaagatgcatgtcagactattatttagtgttgaataatagagacttaaaagagacattaaatttggtattatactatcactaaatttggtatcaaaaaaatatttccactccaactacaatactaaaatttacaccaaaaaatacattttattattatattaacaaaatataagatattttaatattaaacaatatatataaacaaaacttagctattaaatattaataataa

SEQ ID NO: 98720 - DNA, 743 bp, Cannabis sativa
  modified_base (401)..(405): a, c, t, g, unknown or other
atatataaaagtgtatgagaaaatgataataaatttttttgcacatattttgtaattaattaaaataatgtatacaaaattgtaaaatgcccatttaaatttataccaaatatttcgtgagtaattattctaccttagacctccactactaatctaacgctaagtataagttgcttatagtaagcatacataagtaggagattcttttaagattgaggatttatattattataggatagaatatctagaatatagtcatctgcgccactcacttttatagaagaaaatagagtgacatcataagtagatactttataaaccttcttgtccaatgacatatgtctaagcaatttcttaatgaaaaagctaagagaaaaaataaaggataatttcgattaaannnnnaatccaacgatgtcccgtttaggcaagagtcaaagttattctatttataaacttcttcattgtttcatattgtaaacaccagtctaagttgtcatctttagggatgagtcaactagatgtcgcatttacaaatacttatttgttgagatctaacactattatgtttgtctaacagatgacaatctttttaggatgtcccattaaaaataacaatcaagttagaccaacaatgaagactcaaaatttatactacaaaatcaataacagaaaataatataggttcaatatatattcatacacaattcagaaattattaaacatttaacaagtaatgaaga

SEQ ID NO: 98721 - DNA, 830 bp, Cannabis sativa
ataataattataatcacatatagtatagtgtgatcatttaattattcttgtctacaaacaccccttctgagaaatttaacgaaagtttataatgaaaatatatatattaattggacttcagtcaagtctgaaaagcccacgttgtgatgcttagaaaagctacagcataagattcttgattacataattataaatgtgtgttaattatttatacatatactaattaattaattaattaattcctttttcctaagacacacatgtattgacctaattttatactaatcttccaagattttgggttcagtgaggctgattttctccacatgaatacttaatttcttcagcaatataaaacaaaaaaagagatcaagctttcttcttttaatctatagaggtaaaccaatcgaaccttcttactatttcattagaattatacttatcatttattttaattattatattcatattattagtatttatatattttgttagaccctatcactagattcaaagaatttctgtatagaataattttcagcaaaaagggagaaaagatttttgctaagctcatttgagcttttttattactttttaattttttgagctcttcaaatatttttggtaatcaaagtatttaattattttcaccaaaaaaaatatattatctaatatttatcataattatgcacatacgttacatatataaaatatgattaataaaaaaaaaaaagaaaaaattcacttactgacaatttaatatatcaaaaaattcaaatagcttactagcaaagaaaaacgatatggctttgctattaatttttccttag

SEQ ID NO: 98722 - DNA, 867 bp, Cannabis sativa
  modified_base (675)..(678): a, c, t, g, unknown or other
tttaatcacaataaatattgtaactaaaattaaatatatttaatcataataaattatgattttcgtgactaatatttttaatcacggacattttaagtcacaacatatataagaatgatactttgtaattagtcaaagttttttcatctttaatcacaatttttgttatgattaaaaaatatgatttttttttttttttttttatatatagtgagagacaaaaataataatcaaagtacttagactgtcatatataagagctaatcacggaaaaatactaatatatatttttacatgttaactactcaaaccctaatatattacatcttttttaaaagacaaataataatttttttattatattatgaatttatgatatgtattttttaattaataaataatattgtacaatgcaaataaataaatatatattaatctgactactatatttttcaattaattctaatgctttctccactactatatatatgtatatatataatttgtaatgtgtccaattttatttctattattgatcttaaatgggtaattaaataaaagtattaacattgaacataaataatatatatgtatatactcggtgcatatgcttttcttattattatgcactttgcaatgatatgacttgctaatataaatatatatatatttatnnnnatatatatatttatatataatataggtacgtttttaaatattttcacgtataccattccaaatcacacacccaactttttagagatttaatttgattcaaattccctcctccattataaaaaatatattgatatttaataagggcgcgtttggaaagccacttgggaattagaattggatgtaattgga

SEQ ID NO: 98723 - DNA, 741 bp, Cannabis sativa
gtagatcagtggtggcttgctttgccttcttctcatttcaaagtgagtccaccgtcagcgagcacttctcgaccgtggccttctggcagagcttttccctcaagtctccttagatcgccttggattctattctcttaggtcgtgaggaaggtttaggatttctccgggtggaagctctacgcagtgaggactcgggggtgttatttgtcaaatacctcgatacgctttcgtcctccagcttgttcgctttcttttccccgcctctggccctcttcgcccgactaggggtgcctcaaaacggcctttcaggagttcctccaatgccatttgcatgttcgggacgtctcttccagccgcaaattccgtatccttagttcattcatttcctcattgtgcagttgggttcgtgagctgaaactcacggagtaggctcgcttctcctttcccggctgatggtgagaggttcgtggatctttcggctccggtggcaacgaggaccttattagagactaagctttcgaccgtcgagccccgttgtcttcctcaggcgtgagggaggcgatcgccccatcttgtgggatattcaccaggttgtccttgggtcgcccattctcctcctccgttgagggtctttgaccattggtgccccccattctatggagttttatcaccagcacctcttcgttcggagactgacacaggcggggcagacagtgaagcgatcaactgatggtcatcgag

SEQ ID NO: 98724 - DNA, 563 bp, Cannabis sativa
tatatatattttattttcctaaaatacaattataactaaatatgaaaatcctaaaaacatatcattatctatcaatatcatcagaccaaaccccttgaccttgactccccctcttcctgttcaaccctaagcatatactagattggccctcccccgattgacgacgacaccattcttccacccagaccatattggccctccctcgatgaaggtgaccagaagcttcagccgtcggaggtctcctctcacagtcttgactcctttctcccccacttgccgtcaccgactcgccactgaagctgtcgatgtccaataacctttcctccccgtcgtcccctccacgacatccaacagtgacagtcccgactcccttgagtctttttttaaacaaaaaaagaaaagagttaactgagttgatcaggtcaacccatggctcgcgaacttaaaaaaaaaacaataaaaaaacaataaatatacggtttcacgaaattttaaatattttttcgatttttttgattttatttacataaaatacggtcttttatgtagaaattttgttcatt

SEQ ID NO: 98725 - DNA, 711 bp, Cannabis sativa
  modified_base (180)..(182): a, c, t, g, unknown or other
aaattaataatttaataattatatcaaatattatcatataaaaaaattattaattaaatctatctagatatcaaaaatatgaaatctatataccaattaagcaccctatttaatgggtggaccatataagacctttccattaatttgggttatagtgtctatttatatatatatatatannnatatagggcaagactatggtagaacttagcataaattctgtaccaataaagaagcttttttgactattaattttagatcatctgatcattaagatataaggtgtatactcttacgataggattgtttgtatacaattaaaactttatacatattataataatatttaattatatatttatttttaaaaaataaaataatattaataattgaaaaaattattaattattaatttttaatttaaattattatttttattttttcaaaattaatttaaattatttttatataggtatttatttttaaaaaataattttacttacgaattttgctattaatttttttgtaatcttattttcggcatgttatatttttctgaattttttaaaattttacaagatattttaaataactgtaatatacacgaccatgaaaaaaaaattaagctaaaaaagtcccttgaatatcagaacaaaaataagggtgcatcagttttttcaaaaaaaaaaaaaaaaaaaaaaaactgtatca

SEQ ID NO: 98726 - DNA, 526 bp, Cannabis sativa
tgaagaaattccttctcctgtcagaaaaccttgttttggttaggtgaagttgggtctagactttgtaccatatttgatgatttcataaatgatgacacatcttggattaattcaatacacacttcatttggaaggttaaatagtctcctataagatttatctttatgttgacacatacccaattgctcccttattacagtgtatatagacagtcttgagctgaggttttaatagctctcgatcagtgaatgtttcatggtctgtttggatagtttgatcactcttagtagtaatgttataatctcaaataagtggtcacctacagtaaagtgacttatttcttgtatttcagggtgttgcatttcatcctattagcaattaatattatggttataaagagccttttaacactctctgggggtggtcaatcagtttttgccaaggaagaaaattccattgcttttgtacttgttgcaagctaggtgtgcgatacatttatcgctgtcatcttaaatgtttaaggttc

SEQ ID NO: 98727 - DNA, 1549 bp, Cannabis sativa
  modified_base (1445)..(1445): a, c, t, g, unknown or other
ttttttttttttattgaagcttttatatattgtacaatttgggattctaactaggatcctccacacacacaccctcttatacctctttagggccacttgagctagcctcaagtggtttataaatcgattggttaagatcaagcactgttcttctcgaccctatatgctttccatgagttgttattttctgaatccacaacagagaatgctaagggataaatatgtccatttgcatcttgtgtctaggctgagagcaatgttccttcaaatgttgattttaggaaagttccatcaaccataattaggggtttgcacttgttccatccttttattgaagcatctagtgctacaaatgagtacatgaagcttttatcttcttcagtttgtatgtgtaccatggttcctagattagttttcggcagcatgtgcaaaaaacttggcaacaagctgtatgatttttttgcttttttgtgtaattcttcctgtgcgtgctctttacttctctatgatttcatgtagttcatttttatgccataattatcatttctcctctgatgtcttgatgtgtttgagttatttttatattagtgaaccttggcctgatgtagtttctagtcaactttgttgtagcctgtcgcttgtttgcaagtcttatgttgagatcacaagtgtgtatcacctttctggcatatttacggattatgaaagacttggttggtctgtttcttgatgcaattagtgcccatttgcattttgaatccaagcaacaaaatttgtatgttttgcgcaagactttttgaacttgtgttggaagttatttctaattgcatataaactaagcacactttataacacttcttcgtccttgtatatttgtgcttcttctatttcaggatgttgaggatctgtgattagtagtttgtcataatcagggatttctacctctctatccaggttgttttctagttgtgcaactatttccttggccccaaatttcgcagtcaatgaagttgcacattcactactataaattatactattcacgtcggtcaaggctactattcatttcgttgaccgacgtgaatagtaggccatttatttatgcgagtttttggaattgacactaaaaaaatattatttgtgactgttatatattagatgctaataacataaccgaagagaaaaaaaaattaaaaatttactgatgtttatttgcgtcgtttataaaactcgagtattactatacgcatcatttataaacactcacaatatacttctttcaacttttataaaccgacgctgaagaccttattttctctaaacccaaatcgcaaaataagcccaagcccatttacaccacaaaaaccctaccatatatattaaacttaaactttctaaacctaataaacagccacctattgttatctctctctctctctctctcnctctctctctctctctcactctgtgtgtgtgtgtgtgcgataccaccttcggctccacctcgaatccactccgaaaggccgaagcccaccccaactccacctcg

SEQ ID NO: 98728 - DNA, 657 bp, Cannabis sativa
tcattccttccttgagcttaaaaatccacttgcaatcaatcactttctatccttcaggtttgagaacaacaacctaggtcttgtttttctttaaagacaccatttctgaattcatagcaacattccatttcttggcttgtttgtttttgattgcttcaagaaaggtcgttggcactgtgtcttgtgattccattgccatagatagagcataggcaattatatcagcttcagcatacttagcagggggtcttatttctcttcaaaccctatctcgagccaactgatagtcatccaaaacatcactatcatcaggttgtgcatcaatgtcttcaacattatctagtgtaatttcctagtttgaaatgactcttcccagctcaagttgagtgctaagttgaacatcattttgttttacctgaaatgtgaaaaactacacctttctcattatttttaaatgggaaatcacatctctactagttacaatattattagtttcaacagagagaagtctataaccttctacacaagtaggatatcccaaaaatatgcattttattgatcttttctcaagtttgttctctacattgtgtgcatatgaaacacaaccaaagatttttaaatgagacagagatggaggtttacctatccacagctctt

SEQ ID NO: 98729 - DNA, 545 bp, Cannabis sativa
ggcccttcgatctggagaagtgtcattgttactttgactcatgctgcatcctctccacccgatggaccatcgggtacgcccctgaactatgaattgtttgttgctcagcggtctcaaattgttcagcagaccattggacaagctgttggtgatcttagaactatgagtccaagtttgatgaatcctatatcactggctgagaaccattcctcttgtagaaagaatagggatggtgagaaagtgctcccgaatggtcaagcttggcgatctcagctgttgctcttgagttattctatgaagatattatctgaggcaagcaacctctcaaaaccacaggagtcagtggatcacaagaagctctttggctttcgttctcgttcgcctccccttccatacttgttgtcgtggcttttgcagtcgcgtgctcatccaaaactttcaggtgatcaaggtggagagattggtgattctgatattgatttggatgacttgtctgattctgatggtgaagaagaagatgagtatgatcagcttccaccattcaa

SEQ ID NO: 98730 - DNA, 730 bp, Cannabis sativa
aagcccaagaaaccaagtcttgggtacctagggtgacataaacgtcaacccaggcacccaaaagtcaagcttatctcacagtcaattttctacagtacacactactcagtaaaacggctataaatttctcaattttcatcaaaatcacacgattaaagtggaaaattaaagctcattccaaggtgcatctaagtgtgtctcacacgtcggtcgcaattctaaagttttgggcctcaaaattagctcgcgagctagtgtaggatttcccaacaaaatttgtgcgaatttttatattattttattttaatttaattagatctcctttcctataaaaggagagctcccctaactcatttttcacactttacctcctctttacaaggttagagtttctctctgtcttcacactttctctctctagaaattgtgaagttaagctagagttagtcatttttttttcgagttctcttgtaaggtaattaagtttttatgataataaaagttctaagtagacgtagcttcattaccttcatagcaagcagagtcaactactataactaaggtgttctctttttacttatgttcatacattcgttggccgctccgcttatcagatggtacagagttgattgcttttcagcgtcaatattttggtgctttcattgagagcaccactcgagacccttggttgcctttgagtttttagagtttgattaggtgcttcattctg

SEQ ID NO: 98731 - DNA, 556 bp, Cannabis sativa
actttatactttcagttgtcatacaaaatacgtacataaaacaatacaattaattaagtcattttcatcatctctaatcactataaattatctgagatgaggcggtgatgagtcttgtgacgttggattagaatagatctagtcaattttgcccgcttataaaatatgtatccgtatccattatccatatatccaagctagccagtcaagcaaggtaacgttttagcttggtacacttgcaaaaggatatttggttggaatatttctaatgatggacacggtccaaatgcaaggcatcataaaaagcattataagctacgtacgtgaaaaatttctactctctcatggggcactatctagctttctactatggattcacctttagaccttatagttgaaaaaagtcatataaatatatgatcctatatatgcttatatataataaatgtaattatatatatccgtccaaacaaagcaggtaatcttctaaacaatatttctcccttaatttctaaaagcatatcctgttagactatatatatagtgtatgtaatat

SEQ ID NO: 98732 - DNA, 606 bp, Cannabis sativa
cgacgctcttccgatctaaatcgtgaataattaaaactttaattaactaattataaatactaaaataacatacttggattaaactaggattttgtttacaaaaatatttacaaaggttttactgtgcatattacaagggtttgtcgccaagcgactatacaaaataagcccagccatttcaacgaccgtatgctccaatactaactgccccaacatgtacgatcttcatctgctcgctctcacagctgctcaaccttaactttaccctaacctacacatgcaaacagtatttgtgagtcgacacactcattaagaaaagcataaatagtaacatagtaataacccggattacaataaggtgcccatacacctaaccataaccctatccccgtgtccgacacggcactgagtctagaacgttcgtacgataatactatcaaccataatatagcctatactactcattacgctagtcatactctagccgtactaatgagatagcgttgatcagtatctgagccaaacatacatctatcagtatcaaatataattctacgtatactgatatcgttatcaatgtaatctaataggattaataaacatgta

SEQ ID NO: 98733 - DNA, 600 bp, Cannabis sativa
atatatatagcttaatatactgttcctactagtgattgggcatggattgtgttatttattaatgtaaataatttcgatatataattgtcagcatgagctatatcgttcttgcttcgatctcgtccatcttcttctaatccaatgatgaagctagcaaacaaaatgtaaccatatatatatggtcgacataatacgtacgtacacatacgtatatatatacttgatcatcatcaaatatatgcatatatatatatatacttaatcgatcaatgtatattgaatttgtcacaattgatcaggaaaacacccaagaaaatggcggttctgagtttcttgcctataattttgagggaccaaaggaggcaaatcatcagagcccacaaaggatattattggatgatcagtactgagatgggatgaaagaaaactgtccatgtttttccagtcaatacattgactagtagtactggtactgctactccttatttcgttactactattttcatagttttcatgatgatgatgatgatgatcgttgttgagaatagtattagtagcagtacaacttgtgttttgttaaaagttgtttgctgaattttt

SEQ ID NO: 98734 - DNA, 2033 bp, Cannabis sativa
taattcaagggactgggttgctggagtaggatgtccatcgggatttgagcttgcaaaatcagtagacaagcctgttatgatgattgataaggacgagccaatggttcctgcagatgagagtcaatgtgtatgtgttctatgtggtgagatttttgaagatttctattgtgaagaaacagatgaatggatgttcaagggtgcattgcacatgatcattccttctgggactggtgagttagcaagtaacgacaagaatgtgagcaagggccccattgtacacaaaaattgtgtatcagagagttcactccctgatttgggtctggtcagcaatatcaaaatggtaatgtgctcttactcttgcaactaattcgaagaaccaaatgattttctacctctaaagaaatgttggttttacgtttgttttcaacaggaacaggatgtatagtgctctgagatggagagaacctttgttttgctagtctgacagaatcgggtgaattaatccaggttcagttctgtagtttaaatctgcatggtcattagatgctaattttttgtgcctcagatcagaatgacggtgagagctctttgtttattgtcatgctctcactaccttttctttttttggttcttttttttttgcccctttgttttaatccatagtttgagaaggaaaagttacacaatgaaggaagatgattggtatattgaaggtctctctattctctaacgtggttgatatgttgttgttcctgtctttcattttctcttttctgtttgccatttcttacacttttgaaactactactacacttgatagataccatacctaccaaccaggcatctgatgcaagcaaaaacaaggaaaatcggtttgtgaacatgttgtcttggcgatgcagtccctgacaattgcctctgtatcactaaaacaaccactagatttatcttctttatacttatatttcatttttggcttggtttaatcacattacatttacctctgttagtcgagcttcttgagtaatggctttcttgctgcaaggtttttgggatgttgagaaatatatgattgggacagtgatgaaatatgttttttttagtagaattgatattctctttactagcaattatttactcttttgtatgttcttatgttctgaactataataagaatggtatgtcttgttaaactcagtgagagagagagacttttattggtttattattgttatttaacatgacaaaggattcacaatcatttactacaaaattaacttatcatattgttctattatgttgtgtcaatcagaatcagcattgtaatatactgagattttctttttacatcaattagtaattttcttttgtaaggcattaattaataattgttgtaataataatttcgagtttcttttagttgtttatagaaaatttctatggtacacactcttttgtccttatactaaaggaacgtttttttgaccatccatatatattacttttgaaagtactataaatcttttaaaaaaaaaagtactataaattaactatcaaagtaaaatgcacattaattactataaagaaacttttaaattagtaaaagtcagaagaagaaaaaaacttccacaaccatatgcctaacgcctcatatgaatgcactatcacatagccaagaatcctttatttttggaaacaaggccaccatctatgtgatgttgaaggcgcccatcaaactacttgaccttaacccaaataatgtgtgacacaaacaaagaatgagtattactatgagttcaacaaacactacaagaaaattcaaaaactgcttacttggggaaaaagtttaagtttgttggcacaaaaaaaaaaaaaagaaaaaatccttgggaaggcagctagagtaccagtaccccttcacattgaagaagtgatgagtccaccattacttttgtgttgggtcaaatataagaatattttttatttaaggaaatatatttttatttaaaaaaataaatttctatttaaggaaa

SEQ ID NO: 98735 - DNA, 559 bp, Cannabis sativa
tatataattatatgtatatatcatgtattgtttcatattttgttgatatgataatgttgtatatatgtaataggttcctccaggtttgtatgatgagaagggaatgtctataaacaaaggaagcatttacatctgtgaaagtagcccaaaagggatttcagaagcctatttcaagcaatttaagaaggatttgtcattgttccttggatcaagatctgaagaagtgatccaaggtggaagaatggtgctaatatttttaggaagagaagaacatgatcatcatcttgatagaggcaactctttcttttggcaactcttatctcgctctttttccgttttagtatccaaggtacacgcgctaataagaatagaataaataagatttttgccctctcgaactattattattatcaaatcgtgcacttatattttgaaaaaaaaaaaaataagtagtaataattttgtgacaaatcctaattagttagtaattttagcttgtgaagtaagtaaacatttcaccaatttattatgtacatattttgtgatatagggtgtagtt

SEQ ID NO: 98736 - DNA, 2777 bp, Cannabis sativa
tcactcaaatacatcacactattattcatatgaatatcaataaataccagcatgtgtaaacagaagcttgattaattcttttcatagatatgtacctgtccttaaatactcgggaggagtaaatgccaagtttgtactgtaacttttcccatctctactgtttttcatcagaccaaagcatgaaagccttgggttgccatcctgagatttattgagagtaaaattagactctgactatccaaaatgggcaagagtaaaaaagccattgcatgtaacgagataaataaattacatcatcaaagatgactctataagcatttagatcatgataaagtgcacgccctttattggtacagtattcaagagcttgtgcaagatgtaaagctacacgtaatcgcattgcccacttcataggttgtgtttcccctacatagaaaaatgataaagtcttactagtaaaaactgtgtataggataatctacaaaattgccgagagaaggaggatgaacattttagtactagaaccctacattcaataagcaatcacaaacaattacacaatttccgaaagaatgaattttaaagtcataattaagaaatcaacagcagatatcaattgagggatacacaagggagggtaccagaataacacacttacaatggaataaatgctttgctaatgtatcattgggcaaatattcagcaacaagtaacctctcatcaccttcacagcaacacccaagtaaattagccaatcgttggttccgaagctgaccaacagctcttgcttcttcctgaaattacaaaatagaaagatcaaagaacttgaacatttaaactcaatgaagatgaaaataacacattaacaaatatttcaaaactaatgaaaataagttttggctattactcaccaaaaattgtcgggaatcaggccaagctgatctattgaatcttttgacagcaattcgtctctgattttcaagcttccctttataaaccacatttggggctttttcaccatgttcagaaactatattttccgcagcaaatcccgatgttgccaccctaagttgctcgaccgtgtattcatgaaatgcaggcaaatcaagttcattcctctcttcaggttctacacacgtatagaaacttttagacatttcaactttactctatgtaaagcagtaaagaaacactggcttgcttaccagcatttggggcctcagtagctggattattttgctcggaatcccaacaacaagtcgagagcttggaacacttgcagcccatcccaatctcaaaattttatatcagacactggcaagttctaagcttcaaatgttaaacttcaaagtctccattaacattcactgtaaaaaaacaaattttatcatttcattgaacaatcaatatatcactaaatatcacaaacaacaatcaaccaagtgacgaaatcttaaaatgcacgtacaaatccagttcaattatgcaacacttccattaaattcaaagacttcgcttctaaaagaaaaacaaaaccctccctaagctaaacaaaaacaacttcctttcaaatgctcctttcaacacgacggagatgcagttcttggtcaaaatattcacttttagaaattcccaaacattacataatagagtaactaataatttaaaagctaccactaaacatggatgtagtacaaagtataagcatcaaaaaatcaattccaacaactacacagcatcagaagactgaatattcagcatttcagcaaacgaaaatcacatttttgcatcgatttcaattctgggtcaactcagtatgccaccaagctagtcaaattgagtccacaaactacaaactcggccaaaccaaaccccagtactcattcaaactccaaaaacaccccagtacttccagcaaaaacacaccaacccactaatgaaaaccacgaaaaacaaagcccctttacctcagatcaaagatcacaacaagcaagcacagtgcccaaatcacttcaatataaacaagtagtattcccataacaaattagattcaacaggacactttcttaacctgagtgaatgagtcaaatgaatcgtcttcctcgattgagtcaaaagtcaagaaagcaaaaccttattttttttcgttctcctggttatatatctatttaaaagaacttaattgctgttatcgaatttccagtataaatatatatataaacaaacatgttgtagaaaagtgagagactttaaatcagagatcttagccttcgtcttggttttcgacttcttcggcttcctgtctcaaaagtgcttcgctatattttctgtgtgcgactgaaattttcgtaacagctctcctctctctctgagatttggatgagaattgcctatattgataattaaaataatattcaattttgtaactttattattattatttttaaagattaatataatatagtggggctttaaagtaatttaatttattttttcctatttccaccgacatgaaccaattttatttttctcaatattcacacctaagtcatcaatattcaataatggaataatatatttgcccttataaagcacaataaatgtccttacaaaaaaaacacgcacaattaatgtaaaatataaatgtctaatttttccttttattggaaacatatttttaaggacatgcataagttttcacttctagatattgaccggagtcttgttttagtcattaactaataaattttttatttgttttagttaagttttttttt

SEQ ID NO: 98737 - DNA, 508 bp, Cannabis sativa
aaataagctcatgttatattttatatcaaatttggccgaattttaaatatttattaaatttagaacatcttttgtaatatcattatagcctattttttaaaatatattaaaatgttacaatacacttcttttattacacttcatattaaagatgttgtaataggatatagttctaataagaattatattaatgatcatactcaggttagccttaagttgaaacggactataggtgaaaaaaaatttgggcttttcttataaaaataatagtatttttaaaaattaatcaaaaaatatgtatatttttataatttattttttttatttgaccccttaaaatgagtagaccctaggcatgggcttaacccgcttatacataagaccggacttaatcatactcaatataataatcattatattaattaaaaaaaaaaaaaacaatataataaatttattcattaccattacaatttataatattacaaaaaaaagtttaaatgaaaattcc

SEQ ID NO: 98738 - DNA, 1215 bp, Cannabis sativa
  modified_base (1169)..(1171): a, c, t, g, unknown or other
aaatgcagagtactttcgggtgaaccttggcattttttcaaccaactcatactctttcattccccagcatctctacaatctgtcaagaaggaggatctgttcaaggctcaattttggattcaaacacatagacttcctttcttaagtaagtccagggctttggctaggaaagttggtgaatgggtaggagagttcattgaagtttatgaagactctttacatgaaggatggggttcttttttgcgcatctgagtattaatagatgtcactcaacctttgatgcgaggcaagatggttactttgccaaaggtccaagatgaacattggcctgagtttcggtatgagaacctccctactttctgtttccattgtggtattttgggtcacccttttgataagtgtaaggcttttctggagttggttgatagtggtgttgatcctgatttgccttatggtcctcatatgattggggataagcttcctaaggtcggttatgataggtactgtaatgatttttctaaagttaatgcctatccgtttctcacccgtttggccaaaaaatctattgcctctacccttcctgaactttacactaaccccaatatagccataggtgctatgccacaaccaaagcccctcactatagtggaatcgaacacaccagaccaatcggctacacccaaaaacaatcaaagttctgaaatgccactaccttttccctcatatataccaactgccttccactctgctagcagctctgcaaaccacattcccaacccattacctcctacccaagtccatttgccacaaaacaactctctgaacattgataccattacatcctacccttccctccccatctcctctaagccatatgataacaaccctgtttcgaaaaataaaggcaaagcaattatgatgggtgatgagtctactgatctaggtgatattggcaagagttttaaaaggcaaattgatcctgaaaatttgcaaagtgtcctgaaaagatgtagaggtaacaagagggataaccttgatacggaggagatattcagcatgtttctcattcctcaaaggattcagctgaagataaccctacggtttcagcggaggttgcacatcagcagccccgcgctcagccatgaaaataataagttggaatgccaggnnnttgggaaacccttcggcattcaggcatctaaagctgctggttaa

SEQ ID NO: 98739 - DNA, 809 bp, Cannabis sativa
tatatataaacagcagtaactatataagcagctaaatcaattttctttttcttgaagccagccccaatattatttgatctctcagggtaaagatgttatacacttacaagttagtgatgctcttgctgtaagaatgccatggatagataacaagacaagtgaaaaggtgatcctttgatgccatccctagatcaagttctcctgatatggtatctcaacaatgctgcaaaatttaagtgataaaatgtttgtaaattaacattccaaaaccaagtgatgacaaaatgttgataaagctattcagtgctaatcataactggttagtttcatggtttcatccctatgtataatcagcagcctgaagttcactatatgcactgctcttgctctttataactctggctttattgtctcttatttctagaacctgtaaaacatagtcatattgtaaattaaacaaccttttatggtgtgaacaaggaccaaaacatagtcaaaagaagatcatatgcaaagttcttatctttccaaagttttccatttacctcaggcattgaattaagaaccccactggacatgcccacatcgatgcgccatatgttacaattgtatttactgcaaggaagaatccaaaatttaaggacctcacaaaattatagacatactttctaatatctgagagcagcaataaactatggtttcataccaatttactccctccatttgaggagtatgcccaaccaccattgccctggcatcaactgcttgtagtgtctcctcaagaatagaatttatctgaccattttttt

SEQ ID NO: 98740 - DNA, 505 bp, Cannabis sativa
tataaagttaattaaagttatcttttgagtttagaaatatttaaatatgggtgttacagttttggatttgttacccaagttttgtaactataaatatttgagtgtgtgagagaaacagtgagttgtgaaaaggagagtggggaagaagtaaatagtgtattggaaatttaggtaaaaagatttaaatagagagtatgtaattttgaagggatgtggccatggaggattttaggacagtgattgatgagtgtagattaattgatttctactcttcaaaaactgacctcacttggtgtaatggacatgagttaaatccggttatggaaagattagataggggttatgtaatgaggaatggctacagaactttgatggagctgacattatggttctagattggtgggggtcagatcatagaccattgttagtagtgttaggttttatgccctaaataaaactccgtttcaatgtaatctattttattcaacatcaataaagaaacaga

SEQ ID NO: 98741 - DNA, 975 bp, Cannabis sativa
tgtatcacactatataatagcatatacattatatatgtgcccacatagaattttaatcctacaacctgatccaataaacaattgaactgaatcgaactgataaaattatcacccagttgtcatgtaataatatttatatgtttttaaaaaaaatatgtattaattttatatatttatttactttattaaaattaaatatattaattaattttattatgaatatgcacctaaatatataagattacataaaaaaaaaatctaaatttataatatcacaaatgacctttataacactaataaatatattttttgtttctaaaatatatttattaattttatatatttgtgtttattactatgagactagattttaaattatgtttatatatataatgaaattcagcctattctaataaaaaattagttaattagttaatgtatttaatggttagaactgtttgaaaataatgtagttattggattggattggattcgttgactcaattcgttcgattggatttgatcggttgacaaaatttaacatttaataaataattggactggatcagttgaatcgaaaatttattaaatatgattcaattgaaaagaaacaattttcattacattcatttgtttggttgcatttaaaaatattggaatgacatttcaatggaatgttctttccactattttagtggaatgactattctattttaaaaagaaaggaaagactattccaatgtaacaagagaaaattttaaagcattataaattttattccattcctattctcattcttattactacaatttcattcctcccaactaaacacaaaaattttgatatactttaacaaggtacaaccttaaatttaaatgtctaccagcagggccggccctgaaaatatatgggcccaagacaaattaaattttggggccctcaaaaatatattaaaaaaaaattaaaagaagagtg

SEQ ID NO: 98742 - DNA, 778 bp, Cannabis sativa
aatgacattgcgagcctttgaaaggcttgtcaccataatgggcctaaaattatatcggtcggcccctaagttataaggagctgaggcaagcctggcccatggacctgggcagctcacatattttgggatagatcctatacccattttttggtgtttaatgaagaatgctaaatgttagaaataataataaaaaataaaaaataaaaaaaaagtgaaaattattttatagaactttttttttttagaaaaagttaaaaaatacatgaaagtaatataaggtacctggttttttttttccataaaataagtttttgaaaaatgtcaaaaatgaacagattatataaactcataaaatttgtaatttcttaaaaaaaatataaaaaaaaataccatctttttaggttattattattattattttcaattaatctttctagcttaaaaattcatactccctcaatatgattcataatttttttaaaaagtaaaattttccaattaatgtttcgaattcattttgtttcactcgctaaatgttaaaaaataattatcttgctagtgaattgtgatgaatctaaagtaaaggtgttttggtaaatttatttgtttcaacttcgcgagtcgtattaaaaagctcaatgccatgtagtagcaaatattaaatgtatgaaacatgaaaattaacaaaagaaaatgaaaaagaagcttttcaaggttaattgtttatgtcttataagagaagaacaaaaagattgttgatagtgaaggcagcctatat

SEQ ID NO: 98743 - DNA, 538 bp, Cannabis sativa
aatcaaatgtgagccatactcagaacaatagaaggggtaaaggcaacaaccgtaatgattcttcaaaaaagccaaggaaagaatatgaacccaaatatactgagtatactggtttggtagacgcacgagaaaatgtctacagagcaacctacgatatggtccactgtagaaagccttcgtaaatgttgcacagaggaaggaataggcgtggccagaacaaggaatgtgagtattgtggagaaaaaggccacaccactaatgagtgtgattctctgaaataagagatcgagactttggtcagagtggtacatccaggacaatgggtctagactccaatcatttatcccatacagagggtggtccacaggcatatgatcgttctggacaacaaaatgccataaatcctttggagggagtgggtcgacctctagctcctaaatcacaaaaatgtgtgcgttggtgcagtctctagcacaacatcctaggatgatgaatcttcccatcaccttcacccaagatctgttgggttttgtgccct

SEQ ID NO: 98744 - DNA, 879 bp, Cannabis sativa
gagattcaactctaatgacatttttattatatgtgtttatgggttgttagtgaatagaattttgagaagtacaggtggaactaatcaacagtgactcaatagccatggttgaagtaaaacacattgtgacacttaaaaaggatgaattaagttcagaagttgtgatatcaaactctagttctggtgtgttctgagccatctgagggtgagctctcctgatgcaacttatgcaattggattagaaggatcggatttttttttctaggcctccattttcatcaaactttggtattgttcctccagactttggccaaaagatgggatttggttttggccaaatgttgagtcaaatggccttttggcgtccaaataatccaaataacagcaatggtaatcaaacaaagagcgaccaaggtgattcgggacaagaattggagggtgaagaaactgataattacaaacatttaagagaagagataagtcaaatctacactagtgcaccacggaacatgacaattatcgatcgggtacttatattaactccatattctcataacaatctgcttaattgttgtttaattctcattccaatttaacagggtagaagaaattcagtggtagttggaagaaaaggatttgaagaactatacatgttaagtccaggctctactcatgaattgtatggcaagtattcttatatatgtgtaggccaatcagccatgcttaagccaatagttgtggaagctgaaacagtgttacggcttggacaggatttgcataatccaaatctctaagccatgcctccaacatcattttacatacatacatgtatcaatgtaatgtagatgtaatatttggttgagcaaaccagccaaacaa

SEQ ID NO: 98745 - DNA, 2105 bp, Cannabis sativa
tacaattaagacagaaaggagacataaattagggctacgaggatgctgatttgattaaaaatagtaaattcaaaaataaatcttcaaatcacgctgcgctaatttgattgtcattaacgataaaacttaaaagggttttgtttctaatttttttttttttatttttttagaaagggcttttgtttttaattcaagctcacatcttcagttgtctccactctcctgccgacaatatgatttttatcgcacgagctatatagctattagctacaaggatgtgcatccaagcatattccttccttttttttttattttttcttttttgaacaatatatatgcaagcatattctttgatcccacacaccctcaaatttacaataactcttacaaaaaaaataatacctcgtttcaaaccaaacgtatatatcccattaatttacacaacaatcgtggtataaacaaataaacttacatacagaaaaagaacgacagtcgatccccaaaccaagattaacaacaattaacaaatggacattaaacgacaatttatatagaagagagtaggaatatgaattattagcctattattattaggctttgccttcgacccttgcatgggtcatcccaacgcaggaatcaacaaaatcctcttcgatgaagtccgtggagaaaatctgcaacttatcaccacaacctttggcaaaacactgggctatgaacagtctcgcgtacccatggatccgacccgttaccggtttaacgcacagaacagggttatctgctttgggagtgacagtgttctcaactctgtaaaagaattttcttgaggtgactggaggttgctcgctcaaatgcttcatgttactgtcaaacttggtcgacggcaaatccgtgtcgatccagttgtccttcaaatgacccgcgtgccaaaacgggctacccgcttttggtcggggtgattttctcggcttccaaacgcagatgatccttttaggcaaaagctcagctacagtcttaccgaagacgtgttcgtcttggtggattagatactcacccaattgctcctctaagtacttctcgaactccggtggatcttcgtgcccgaactctgtgcggatctcgagaatgatgatctcagattgggtctctgacaagaatttcttgacgtcttggataacgacgtcgatgctgtacgtggcgagaatcccatggcagactcggcgatcttcttggactcggatatcaagaactcgtgtacctaaaaggagttgtttgtatatggataaggattggcattgagcaaagggtcgagagatgagtgggattccaatcttgttggtggcggaatcgtgtgttcctggccacacaatctgattgatgtgaagcttttctgggtttagttctcccatccagtttttccgatccgatggctggtaatcactgccgggataaacttctccggtgttctgatgaagatcaactagaaccttcttctccgttttgatcgcttttcgtctttcaacttgtttagaaacttgagtacccatattgttcagtatcagagaagaacaaggaagaagaagacaataatggtcttcaagttgttctttcttccttctcctctttctatctttttgcagagaaaaatattaggttggtggggtttctatataatgcatagtaacatttgtggtttttcaatattgggtaatcttcaattattattttgaatattgaaaaattatataaagaatattgtaattttattttgttgataatgattggatttttgggaagaagacgatctagctgtattgtttttataattatttatttttgtttgttagttttcaaggagagctttcataattgttggagagttataatccaagggtttatattggtacacgtgtatggctgtacaatatattatcttgtattcttgttagtttgttttattatgagtaattagatattaaattatagatttttaagcgtagaatgatcacggttaccacgtggcagaattagccaatgtggatgttttgtacccatctggcgttttcccaaaggtggtttaaccactcttaaattcttcaaaaaaa

SEQ ID NO: 98746 - DNA, 514 bp, Cannabis sativa
tagtataaaccgactaaaccgaccgatgtacagccctagcacaaatatctattgagttagataacacttagttttggaagagaagtgacccatttccttatttgttgtaattcaacgagtcactctcctctaaaaaaataaataaattaagacccagctttgggtttttgaatcgtactttcctgtacaacttgttttgccaccttagtgattattacaaatacaaaaagaaagtcttacatattataatcacgttccaaaaaattatttttgtgaacagaatatatattaaataattatttaaatagtacattacagatttttttttttttttaaaaaataatcaatttgtctttgatttatttaagaggaaataagggaaaaaaaaaaccttccaaagctaaaatgagaatatatatatatatatatactagcaaaaggctacgtgcgagacatgtatactaaattttatgctagttttttcttatgctatttgaaagtgatacaattaaaa

SEQ ID NO: 98747 - DNA, 1438 bp, Cannabis sativa
tgttcatcaattgattaatcatctttattaatttgggaaatttttacatatttaataagtatatttctataccattgttatggcttatgtggtatgataaggtgtccattaggtaaacaccacttgtgacatataattattatactattattagtataatttttttttttaataaaagacatttatagattaaaattaaatagaattaaacttcacggtcattacatatgatgttgtctggtatagaagaaagttcaaccatatcagtgacatttttggaaaaagctcacttagccacattacagaccgcaaaattacaatatcttgaaataaacgaaaaattacgatttaacagaaaattatagatatgtttacattgaatcacataattactaatacctcaactggaataaatttccttaggcgtcttgccgtctcaaaatcactttcaataaacacaaaaaggtgtttcaaatctcattattagtataatttaatattaagcattatacctttagcgtacctagttggtcaaccttttatattttgcattaaaaaaattctaactctaacctaatttgtcagagctttattatttacttgattcttgatcaacatgataagtaatatatgtttactttattcaatatttttaattgtatctctttaacttatttgactaatgcatagagatccaattttttttttcctaagaattaaataatttattacaaaatatctacctaataaataaattctttaatatcaagtgtgaataatttaagaaaaatctattatacacccagtgttttagtatacttttatctatttcatcatttacgagagcgttttacgaggtacaaaattccccaaaaaagagaaagttacaaattttatgtacttttatacttttggtataaaaatatggtatttttttttacaaaaaaattattttatgagaaaattgattttttttttaaaaaaaaaaaataataggaaaatcagataagggtaactagggacccttatggtaaatagatgagtaaccagttacaacaagaggtaaccaagtaccttatgttattttttctatatttttaaattttttttaaaaatttccccatgaaataacttgtatttttgagaataaaaaaaactatattttatactttaaaagtcacaaaaataaaaattttcaaaaattataatggtgtatgttgtacttgtaaatttttagaaaatataatttaaaatagcaaaagagatttacgtgtaaatttgactaatcctccttattaggcttttttttttttacttaaatctcattagttggggtttgacaataacatcatacccacaaatagtgatgtggtaagttgagaaatacctcttttattaatccattaattaaatttgcctctaattttatatttatttg

SEQ ID NO: 98748 - DNA, 614 bp, Cannabis sativa
aatgttacctgtggaagtaaacatctcgactcatagatgagagttttataatcaagaagaaaaccaagaacttttaaaactgtccttagatatagttgatgaaaaatgtattgggtcgcaagttactaatgtagcgtttcaacaccgagtaacaagatacctcaacaaaagggtcaaaaagaggctattcaatgttggaaacttggtgctaagacgagtatttgcaaaagtgagagatgcatctgcaggagtattcaacccaaactgggagggtccttatgtgattgaagcgatagtaggaactagggcttacaaattggctcagctgaatggctcgctgataaagaactactggaacgtggaacatttacgaccctactgctagtaaattaatgattgtaactgaaacaccctaaataattaggcacgcttcacaataaacttatgaaaccctaatcccctaattgggattactagaaaaataagcacggaaattaaactttattaataaacagaatgaaaataacttgtaataattgaaaccttataatttcaaagttacaaaagttgggatcccaaaagtatttacaaaacactattacaagttcttttcc

SEQ ID NO: 98749 - DNA, 1766 bp, Cannabis sativa
  modified_base (191)..(192): a, c, t, g, unknown or other
ttttttttttttttttttttttttttttttttttatcttcattaaatttgctcattattgctcaaaaatgcaaaacaccaaaattatcaaaactgaggacctccaaataattttccttaacataatttaaaacaaaaactaagcataattatgtacaataaaataataaaaatactaaaacacaccctaanntagactataaaaattacataaaaaataaccctaacaccacacctgctcgctagattggtgagaatgaaatagttgttaactaattataagagagacacagtaaatttatagtagttcactccttgtatcgcgatagtaatacaactacgtctacttcaattttttatttctcacgagatggtattacaaaataggctaagtgtcagaagcttaaatttttagagaaagaagctctggcctagtaggaagtttttgaaggtgaaaaatgagctaagggagttctctttttatagtttaatgaggcccacaaaattaggagaaaatataaattagatgttatttaccgtaaatgatgatctaacggtaaaaattagcttctgatggtgatagctattttttggagcctggcgggacccgttgcgggtaacccaaaacttattttcgtaacacccatggggtgaaatttaaggtcgatagcttaacaatttcaattgaaatgtgacaaattaactaatagagcattgaattagcacgcaagttgaatctcaaaaattagatgaatattgagtgagttatgattgtattactcaacacaattcatgacccagcgcccacgttgacatatgatgtcaggctggacgctgagtaagtgaaaaaaaggtccaagggatgtactttaaaatgcttaagtgatattttgacatacttagtctgtttttgtgttctgacaatgttggtcaccagttctcagagatgttgttgctctgcgcaatgagagactcaaaactcttcatttttgagtgagttttccatgttggaaatgagaaatgtgaagctgtgaatttgacttctctgacttcatggatcttagttattgtgaaaaactagacgaacggtcgtaactgaatcagaatcggataagcagaacccagtgtaatagaccatttatcaacttgggcgctgggtaccttgttcctgagttcccatgttgttattttaatacttccaaggtttttgaacttgaggacgaggtctcccaccctatatttgaccattcgagattcattggtcaaatcaaatttggcatttgagtgttcgaaactagcgcaccaggttaattgtcaacctgggctctaggccttgtttccaagggcttaagtttgtagttttctccccgagttttcttgaatctttaatattttttatgacaaaaaaaattctcgtaacactttttttagaacttgattggaaacagcctaggttgacaagatatcaacctgggcgctatgtccctgttatggcccttcagaagtttcatttggtccacgaaaatagttgaatcttaatcttttctgtaaatggagaagatgcttagaagagttctccaaaaacatcatttgaattggcccaggtgtacaaaataggggtgttcataaaaattgaaactaaccatcaaaccgaccagaccgtaaatgaattttcagttccacatcatcaccgaatttggcggttgattttggttacagttatttgacatggggatcggttttggtttttgaaataaaaaaatagtt

SEQ ID NO: 98750 - DNA, 1039 bp, Cannabis sativa
gcacactgggcgcttaggttgacattggcatggggctcaatgttctgtccttcaagcaatagttttgctctaagtattagtcttattttgccccccaaaataagattttaatgcttctgcaagtcaatatctcatgtatatgtgtcacgcgtaagtccatcgacacctatgtgcactagtgatcatatgggtatcacctagtcatcattagtgattcacctagcacatcacccacccgtgcatatcaagtaaaattgccaagagaattttcctaagatcaaagaatgaactaaggatagttatcacatcatttaagcatctcaaaatatgcctaaagcccaagacaccaagttttggcgcccaagttgacgtttatgtcaatcttggtgctcaaaagtcagcctaacctcctagtcactttttcaacagtgcacactgcttagtaaaatggccataactctctcattttgatccaaatgacacgattcaagtgaaaaatttaagctattttcaaggcagatataagtatgtctcatgcccctaccgcaattttgaagtttcgagcttcaaaattagctcgcaaattattgtaagatttctcaacgaattttgtgggaattttctattattttattgtaatttaattggacttccttccctataaaaggtgagctcccttagttcattatttacactttctattattctctctcttcacacattctctctcaagaaattgtgaagtaaaactagacttagttatttttttttttgagttcccttgtaagacaattagatttttgtgataataaaagctttgagtagatgtagctccattaccatcgcgatatagtgagtgaaatactaaaaattatagtgttctttctttagttattattattttttttttttgcctttattgcttatcagacgatatgaagttgaccattttttagcgtcaacaaaagtattttaaaaataataaatgtatgtaaattcttacaggatccaattaaaaaaaaattcaaatactaattta

SEQ ID NO: 98751 - DNA, 618 bp, Cannabis sativa
aaaaaaaaccatgaaaaatagcaacttcgttaactaatgacatcaaattaacgcaatctgaatactgaaaatagaaggaaaacaaaacaacaaaagaagtcaaaagaatcaaaaattaaacagaggaaaactttctggtggcatttggttggaggtaatgaaatggaatggaatgcaagtgaaacaacttttattccattcatttgtttagttttattttaaagtattggaatatcattcttattctagctatgttttcattccttccaacctctaaaaagggacattatggataagatcatggcaaacgccacttaataaggtgctttttatgtaagtttgagttggagggagtagacttagaggtaatatgaaactcatgcgttggaggggattaacattaccactattttaatttaaaaagtgagacctacttggtaacacaaactctttgattatttaaatttaatttaatttaactttaacattctcattcccatcaagtctaaacttcatatcaaacgccccatctaatcacaacaaaattatcagttctctcatacagcatgctacttaaacagaaattctgagcttacatttgatctaaatcgttattaa

SEQ ID NO: 98752 - DNA, 702 bp, Cannabis sativa
atcctgacagatcataatattgtgtgctataaacctgcctgtaataaatcctccctgattctgagcaactaaatcaggtaagataactttaagcctcgaaagcacacaaatatagttttaataacatcatacacaaaaagtgtgcacacttagagttatttaagatatttacttctaaatttaaagtataaaaatattgttcaaacaatcaatattacaaacttattaaacaaactaagtacacacgtataacagatagttggaactttattttccacacttcaaactactagttccaaactttaaaaattataactatttggatgcgaaaaacataaaagaagcatcaatactcatacttttagagttgcatgcatcctagaattttccaatactgcaatattctcacttagtatgagcagacaaaagagagaggaactctttatcaacttcaaatttggacatatcttcaggacttaagcaagcataaacctctatttcatcacccttttggttgtccataaacacaaatatgttaccaaaacacctgtcagcagagctcacccaaataggctttccatatccaaagtcagcatcataaacaggaaacctacacaaactgctgaacataactgcacacctctctcctctcaccaatccctcatcgcccatcctcagagattcaatgtattcatctgattt

SEQ ID NO: 98753 - DNA, 569 bp, Cannabis sativa
  modified_base (468)..(469): a, c, t, g, unknown or other
cccagcgcctaggttgacttggtgttgggcctagcgccaaggttgacattcaacctggtgcattggtttccgtcactcaaatgtgaattctgctctgagcattctctccgacatggtcaaaaatgaggtaagatacattgtcctcaattttgaataccttagaagcattaaaatgacacccaaaagctccgaaaagggcacccagcgcctaagttgatgtacgacctgatgcgctgggttcttcttatcttgcttttgtctcaagcgttcgtctaggttttcacagtaaatgagagctatgaacttagacaaatcagattcacaacttcatatttttctttttgtggcaaagttcactagttgcaaatcgggtaattttgagtctcctgatttcgtgaaacatcttcgagaactagtgaacggcttcaccagagcaaagaaattgattaagtgatgtcaaaatatcanntaggcatcaaaaaatacattcccaacacgtttttccactgatcaagcatccacgttgacgtcatatatcaacctagacactgaatgtcaacctgggtgcc

SEQ ID NO: 98754 - DNA, 565 bp, Cannabis sativa
ttgtttaggaggcatgcctagttcaatttttcactttgctagccttcagctatctctataaagattttttcttttaggttcccatgtaggaagccagttgtaacatccatttgatccacctcatgatcaaattttgcagccatggacataatgactctgatagtagtttgtttaaccactagagaaaatatgtcattgtaatcaatatcttcttgttgagtaaatcccttggaaacaagtcttgctttataccttggacccattccttctatctatttgaataaccatttgcatttgattactttttggttttttggcttatcaacaactgtccaggtcttattctttttcagtgacatattttcctcttcaatagcctgcaaccaaactgtgctatccttcacagtaatggcttctgtgtaactagatggttcaacgctgtcaatgtcttttactacagtaagagcataggtagtgaacttagcataaccatattttgttaggttttgtaccctaaataaaactcatttcaatataatcagtaatgtataaattctattaagtc

SEQ ID NO: 98755 - DNA, 562 bp, Cannabis sativa
agtttatcacacatgaactattatggcaacaattgtccaattcagtctaatctactaactacatttgttaaaaatttggaatccaaagcagtataagtgacacagttcgtgggctaagtaatattattctccatctaagaaatttagatgttctcaactaatcatttctgacaagttgttttgatccatcttatcgtttgttgatactgtcgtttcttatgtaagttataacatggtgttgtcttttaattctcattagtggggtatcagaattgtcattttatcagtgtttatgtttgttctttgcgaaaaattatggaatttagaatcattatattgtaatattttgtggctaatcctaatgaatgtacattttaggtgtaaattttgaatcttagatggtatttgtagtaaactttgatattgttggaatggtagctctttcactaaaaatatatcatactaaaaggtataatggtcaggttagggcctaatgtggtttgaaaactataattcaatgccaaagtggtattaatatttgtttttatctgtttatgctaaa

SEQ ID NO: 98756 - DNA, 837 bp, Cannabis sativa
tacaatccattgctaatcaacgggttcattgaaaatcataatttattaaaacttttatttaattactctttattctttaaatgaaactaaacatcttttacataactgggatcccgtatctaaaatatttactatcgtaatataaaacattcgatacaaaagttgtcgcctagcgaccattcaaaatacagcctattgtctcaatgatcatacgctctaggctgaaccgtcccgacatgtacaatcttcatccactcgcactcactgctattaagcctagcttttcccttacttacacatacatataataattgtgagtcgacacactcagtaagaaaagcgtaatcataacatagatataaactgaattacaattaggcgcccatacacccaaccataaccatttcccgcattctacacggtactaaatcaagaacgttcatacgacagtactatcgaccataatattagcctatactcagtactctagtcatactctagccgtaccgatatgatagcgtcaatcagtacttatgccaaacatacattcattggtatccaatacaattctaaatatactaatactgctattctaatgtaatttaacacgcaatcataaacatgtacgctaaacatgtaattacatatgcatatcattatactaatcttacctcgtttctgaattcatgtgtgtcggccaacctgagtggaacagctgctccacagtttacaggcccccaggtcacaatattcgcaaaactgatgagtgatacgctaaattactttttggggacttaaaatcaaaactaaaagtttccctatcgagggataacttgg

SEQ ID NO: 98757 - DNA, 618 bp, Cannabis sativa
taataataataataataaatcttcttctttttcattggaatctcaattatgttcccatcatataataatgtccacgtatctcaattatagggaatcatattccttgctctattgctctataagcttttgcggaaaaaaaaaacttttgctaaagtgaaaaagaaatagaataaaaataaaatagaataaaaagtgaaaaatataatagttttttgtaaacgtgaaaatggatgtaatcttaagtaagcttttttttttttacaaatctaagcataagctttatatgcaattccactttcatctcacacacacaaaagtaaataaaaaacgatttagaaacattatttggttatttcacattaaaataaaatactttaggaatattctaggaagtaccctaaaaataataagtatatcaatacactcattaaggtaactatagggaaatttgattttttatgcttattacatttcgttaaaaaaaactttcctaaataaatacccggacgttttcgagatgcccctaataaccaacgaatggcaagtgcttttccttgtgtggatcctatttcataatatttgtaggatatgacaatttttatgatatccctgaaatac

SEQ ID NO: 98758 - DNA, 1161 bp, Cannabis sativa
ctctctctctctctctcattttccaagcattcgtggtttctcaaccaccctcacaaatccaatccattctaaggatggtctcacctcctttcaccattgatacattgaagcaccatggctttttttttaaaaaaaaaagagaaatggtaacttcatatattaataataactcctgctaaattttatttttagctgattctcttactaaatttattttacaaaatacttctagtattgtggtatagttacttcaaataaaaaagtctctgcaaatttcatttctagaaagttgttcactcgcagttgtcagttctggaaggagttctatggaatgatagtcgagtctgaaagggagtttcggatgactatcatgtccactccgggtccagttctcaggataggtaacctaactctgggatagagttctagttggctagtcctcctcccttgaatagcagttctggatagtcgactccagtagacttacacataatatatatgtgatgttaaaagcactattgatgtaattaagtattggatcttatataattaaatgtaataacttttatgaagtattgctatgagaaatgctaaaagtcactactagcacctttttaggtgtcatatcgttattggtcccatataattaagcattgctattgggcatcgagtttgacaaagaagaagaatatagagatttctattcgggtatagtttgattttgtttctgatgtgtgggttaagatctgggtttgggttcattggaaatgagagtgattttccataccaatctgacatacctcgtgaattaaattctattgaatcaatgattgaaatatgaatttgttggatatactgatacaagtttgatttcaaaaaaaattaatttatggcatctacattgttaggatttttttttcattttatgcaatttaagaattttttaacggttggaggtcggggtgtggctagatgaagaagacggtgaccgtgagtagtggctctctagagagctcatggattgggatgtgactgggatgagggtcgaggtgggtgattcggtgaagaaaacgaagaagaaaaataataataataataataataattgttgctcctaaattcgcccaatatacgtggaccagtcaagaggggacacgtgga

SEQ ID NO: 98759 - DNA, 701 bp, Cannabis sativa
attatttataatatatatacttatgagtagtatatatcaaataaacacaatagaataagtaagcacgtacaggcggtgacttaatttaattgtcaaattgaagtaacaattttttaaaatatatattataaatgtatatatagaattgtttagtagatgaattaaattggatgtttagtagatgaattaaattggattagattatattaatagaatactatgtttggagtaggacaatacgcagttgattactaaaaattttattttaataatttttttttttaagtttttgttaataaagaattaataatattaaataaatatttaacaaaactaaaaaattttaaaaattcaataaaatttaataactttataaattaaataatattttacaaaactataatatatatgatttattattctaaatataaaattcatattataaaaataaaaactattttaataaaattttaaaattgtgctttattactattaaaattaaaaattccataattttttaaatgttaattactaaaataaatatgatgtatatattataaatctaattaaagaaaaaaagaaaagaaaacaatccacttagactattttatttttaacccaatcaagaaagataaattaaaatgtatgattattttatccaatccctaaaagaaaatctaaacatggggtataaattacac

SEQ ID NO: 98760 - DNA, 1161 bp, Cannabis sativa
aaaaaatatatatattattatattgttttgcttagaataatgaaagcaagagtgtcacacacacatgacactcaataaatgggaggtgaagtacaagatgacaaaatgttatttactgcccatatttaataggaaaaatgttctccaaaaacatttaaatccaaacttgaaaaatgctaaagggcaccaatggtacctagcaccctcctatgtgtcagtatcgatattggttcaattaagtatcaggtcccatataatttaatataatagcttttaccgaatatcgctaaccaatcacaacatgacacatgttgagaatgtcctctaatagcaatgctcatccacactcatataaaatattttaaaatatattttttttgttcttataaactaatatattatgtttttctcccaagaccattaattgggaaaatggaccaaagttgaaatgaggataataattgcaaaaaaaaaaataaatgtcaataattagtataggaaagcaggacgttatccaaggaatgaacaaaaaggtaatttcataggaaagaaaacccagcgaacgtaccaccgggttcttctaagccaccttaatccttcaaaaaactgtcatttcccaaaatacccttacgattccagatatatcccttttctgtttttttatttttatctttacacaaacaccaataaaccacaatcaatcttcaactttttcttctcatttttctctctgatcttctattctgttaaaacttggaataggtgaaccggccgagtcggtcgctatgactcggcgctgctcgcactgcagcaataatggccacaactcccgcacctgcccatcacgtggcggtggcgctggcggcgccggcggcggtttgaagcttttcggcgtcagacttaccgatgggtcgatcataaagaagagcgctagcatgggaaatctttcggcgcactaccattcgtcttcgtctgcagccggatcgcccaacccggaatcgccttcgtctgacccgcacaacgacgaacgcgacggttacttgtccgacgatccgactcacgcctcttgctccaccaatcgccgcgctgaccgtaaaaaaggtatttccctgctaatactctattaagctggaattttttttattctatttatatatatat

SEQ ID NO: 98761 - DNA, 899 bp, Cannabis sativa
  modified_base (377)..(384): a, c, t, g, unknown or other
aaattcagtgttcttaaagttgttattaatgtagttatagatatattagtactaggcacatcacttattctctaacaaaaattataaggtccaaattcacatttcctatcttttctaatgtaaaaagaatagttattattaagattccttttaattgcattggttaactctaaattagctcgatacatttttttcaagcaagcaatcattttattttagagtaatgatacgttcatatataaattaggctaattagaatttttgttcttgaattttgacatgtaccaaattgtgcccttgtacttttaaagtcgttaaaaatgctctctaaactattgagattgttagattcaaagacttttgtctaatttcattcnnnnnnnntattttagtgattgtttatgtacttaaccatgcttcccagattttgatatctatcaaattatgtccattgaactttgacatgtactaaattatggccactgaactttcgttcatgttagactttttttactaaaattaaaaaaaaaaagtccttaagtccaacaatctcaataattcagggacatgaattgatacatgtcaaagttcaacgacaaattcctaattagcttataaattacattaagatttaacacataacttgtgagaaaatccagccaatcaccttcattaaaatacaggtcatttatatttaaaataaaaaaaaagaaaaaagaaaaaaagatgggtcacagtttttattaaaagagatcgacttgctatatataataagtgtacgtgtgaagtatgatttttttttttgaaggagaatggtaaactttattagaatgaactttcaaccattacaatagataaaagattaacaggagcattactctcactgaaaatacgatctg

SEQ ID NO: 98762 - DNA, 822 bp, Cannabis sativa
tgcggacaatggcactaaggaaatttgtggaaactagagtaacttaagcttctttcaatggcacccactaatattattttataactcttttttctagtgtgggaaactccctttcccaggactgctgccacaaaaaacacagactcttgtgaatcttgatgtcatgggaagttgatgacattgttggaagaggtctcctttattttccatgttgaaaattatatgaaattcatttcttatgcaaactttatcttctttcatttatggtagttagaggtttaactacatagcaaactttaaagatctgaatatgaaaaatcaagatcttcacaggtaaccaaaagcaaaatctaaagaaagaaatttaaatatctactcagaaagttttccacgacaaacctgccaaaacttcaagataaatccccattccatctcagctacaacaatcaaagcagcaatcaaaacagcgtaacaccgaaatattccatcgaaaatctgtgattcacctcatcacaagaagcaacaatcagaaatatcaacaattgaacatacagatacacaaaactgctatatcagacggactggtaagaatcatttgtagagtgttataatcaaaacaggggtgagaacgagataacatctgcacagaaaacagagttgggtgggtgagagagtatataatcagtcattgaatttagattacaaactgaagcatattcctgaaacattattatatatctcaaaaaactattttaacttctctcctagatgtttgggagaagcatatttcttaagcaccgtaataggaaacagttacttgtt

SEQ ID NO: 98763 - DNA, 1182 bp, Cannabis sativa
ctctctctctctctacactttctccgtctgcgacgcctctgctgcgctgactcgtgactctataaatattatatgagttggctcttaagggctacttcgcagttcgcaccgtcggattcttgcgtgcgtgtgaatctcatggcccaaattggatgcggggtgggcttacaacaatttgttttaagggaaaatatggtatttttaagaaaaactttgataaatatgttattttcttaatgtttttgtattgactaaatatggtacttttaagaaaagctttgataaatatagcattctgtggtatagttcctgttgttgaaggaattttaacaacaccaaattaaataatataagaagaatatatgcgaggactcaacctagagtggcgagtattcaaactaaggacacaaaatactgaatagaaactggaaatataaggaatgcaaaagagtatagtggttcagtcagatcacggtctgcttagtccattgttgcaaggatttctgtcttgtttcatttcacgttggatcactcatatacaaagcaagtgtcctttgatttacacacggattgaattcattatcaatccgtttatacattgaattacaataattaaactaaaatacgtaaacataataaatgaaggacagtttcagcttaatttattaaatacaacaacgtatacgacttctatagtgcgagttggttgttcatattcttgcataagctcgcaggcttaagatgcattcgagactagttcagtctaagatgtctgcgtcctgttcaagtcgcttatacgaacatcttgaagcaagtcggtaacatgaggcgtgcgagtccttatcgggttatcgaggttattgggtcatctggaccagcttgtagagtaaagaatcgatctctacaattcgcaggaggatctcgggaatacttgcatatatctcagtatatgcgagtcttagactattccttggtcttaccctatgcgagcagtacgaatgcgactagactttgtcatggctgcatcatctcgttgaatctagtccaggcgaggttcatactccaggagtcactcaatgacatctcatctttccgcgaggagagcgagtacacgtgtcattttcataggagtccagtctcgagtttctaggtgagaaaatctcactataacacatgccccta

SEQ ID NO: 98764 - DNA, 582 bp, Cannabis sativa
aatatataagataattatcctcacacaattaatatcccaaggagagaaaaaaaaattaaatactattttaatatggatattacaactgatcattaagttcggcaaaacgatttggatacgataaaattcgaaatctagacgaatattaatggatttagatttgctttaaatgagttcaggtagtgtttggattgacatgactaacaactgacatgttaaaattattttagtactttaacagatcataagtagatagggaaatttgcagcataaataccatatattttcgattttatacacttaaatatcatatattgtttttaccgattagataccatacattagtttccattcatttccattactcactacaaaattttttacttttagtcacaataaaagttgtgtatgcagtttagttagttacggcatatatttttaataaaaaataatatttatagacataatattaactttagtgtaatagttaagttagattgcatatagagtagaggttaatggttcaattgttagataaattaacaattaacccaagatctatttgtatataacatagaacac

SEQ ID NO: 98765 - DNA, 654 bp, Cannabis sativa
tgtgatgtgatgaaataagcatcatatgatctgatatccgtaacagtggtagagaaaaggacagttgatattggatctgaatgttttccccaatgttgcaattacatgtacatcaaaaaatgatatgctatcctttgtcctgaatttccaactggaagaaaaagtgtggaatagattgtctataccaaagcatcattttatcttatggcttgtggcattagataggttgagattcaagtcaagattgtttaaatacaatatatgtccaattgaggtgttgaatggaattaaacaatattgcaatggctttctaaagctaaaaccaataggtttaggcgccaagttttctcagcaacacttgtggcaacaatatattacatatatggtggtgtaagaattaagttctttggaatatgaaaatttattaattgatgtaattgtaaaaataatcaaatatgatgtaaagagtagaattaaaaaataaaaatattgtaccaaagaaagtggcaaaattggatttagtataatttgagcaattgtaaaagtagcagacctataataattggtgctgtcagatttaaagtttcgttagtagaataggagggtgctagcagacaccactgatatctttagcatttttcacatatatatata

SEQ ID NO: 98766 - DNA, 1226 bp, Cannabis sativa
aagagttaggaccaaaaataaccacacaagacaaggtattagtaatttgtgaaacagatataagattatagttcaaagaaggaactaccaacacagaatcaagatgtaaagtgttagtaagatgacatgacccttccccacaaacaagggtggtattaccatttgcagtagagacacaatttctagaggaggattttaatttagagacttggttcacatcaaatgtcatatgatcagtagcaccagaatcaattatccatgcattattcaaaacaggtgtaaaaacttttttaccttcttatgtggtggtggtggttagtgctgatgacgtagatggaccaacatcttcttttgttttggcaattgctgttgtagatggtctcttagcatttcgatgtcgagtgggatcccaccagtccggatatccaattaactcaaagcaacgattttttgtatggcctgtttgattgcagtgagtacatttcaatgagactttatcaacagtggtcttttttaagttggtgggctgccgataagagagcatagcggaagcgtcagttttggtattctcttcattgaaagttatgaaccgtaagtcttcgcggcggaccatggcataacactcttctaaacttggtcgaggtgtttgtcgcagaatctcacgtcgaagatggtcaaaacttttatcaagccctgcgagaaatatgtgaactcgaattcgctcaatggacttctggtatgccgtaacatcatcaggatccttcatggccactgtatctcgatgatcaagttcttgaaatatttctgttagctccccataataaacaaataatgttttggtaccttgcttggctgagaaagctttcaaattcaaagtatagacctgcatctcatcattgctatcatagaaagttttagaaagactactccaaatttcacgagcagttggtaaacgaagatatcgcttcatgatatcaggagacatagacattaaaagccaacgtttcactttctgattttcagcttgccatttttcatagcctttgtctgatgtagcgggaggttccactttgcccataatgtatgtgagtttctctctttcggcaatgtgcatctccataagttgagaccatacatcataatttgtctcggtaagaagaatgccaatattaaatggactttcgggaataagaatagacatggggctgatttagtatcactttgtt

SEQ ID NO: 98767 - DNA, 570 bp, Cannabis sativa
aagacctcttattcctggcaaagggcggtaaaatctagctcccttttcgatataatcacctcccatatatatatatatgtgtttttgatgcgataaagtgggttgcgaaagtaaaaattgtaatgacccagaggaattatatcaagacacagctaggaatatggaaaaagcttatgggacttggctggctattgattctgcaccaaaattttagcttctctgagagccaaccactgttaatggggttcttccctgagccccttcaaaacctcttcagggtacccctccaagttatcgacactacaacaaagggatctcagtcttctattcatgcggatcaccttaaggttgttgtggtttcgggaggttcttaggaatttactcaagaagaatacttggattttaaggatggggatcaatctcctgactattgtcattttatgtccttaataaaatccaatttcaatgtaatcttatttattttcaataaggatcagaaatcataccgtgacctagtcatatgctttgttcacatgttttatacatgattataggtttaatatataagtt

SEQ ID NO: 98768 - DNA, 919 bp, Cannabis sativa
tcacttccaaggaacaagccatgtctactaattggaataaggcatggtaaaagtgttccactgttaatgaatggataatttgtgttacaattcgtgttacaattattttgtaacagactataccactcgaggctagctcaagtggccataggagggtacgtgtatgttggaagtcttgagtttgagtcccagattatacattgtaatatataaacgcttaattaaagaaaaaaaaggaatatacatcatattatattattcttattttcgttaatggttagtatatatactcataatgcttattacttgaatccctggaattctggaaatatctatgaagtattaatacttcaccccttggaccctagttatattatgattgttttgaatggtttttgtttcattgctggacagggcatggttgaccacgtggctccatcgtcaatggccgactatatagcccgagtattaccagaagccattgtgcacaagctccctaatgaaggccacttctcctactattttttctgtgatgaatgccatcggaagatactttccacgctctttggacctccacaaggcccaatcttcaataatgaggaaatggagcaaacaccattagaagaaaccgaacaagagaagtcgtgaactgccttctcaagtctcacactctgcaacaggaataactataacacgagaaatggacgtcataggttcacttgtaaatacgacacaggaagctccgatcccttagtggagcctgaaagaataaagatagagtttatgctcaatatttatgtttcaaaagttttgaatgataagctcccaactagaaaagagaccttaaattttgctgtacgagaataattgagctctagtgctgacactgatattttatgctattattattattattatt

SEQ ID NO: 98769 - DNA, 1127 bp, Cannabis sativa
tttcaaatgtgtacatttttaaaattgtgtttttttgcacattttttgtaatataattgtttttgttgtacactaatgaaaaaacccctattgtaaatagggatgggagtgtagtgtatgggaacaacaacgagtgcatgacaagagtaaggagtttcaaagatggaaaattgaagatctcgaaagacatgcttcttgagcatgatgagaaaggcattccgatatctggcgatgttcggaattgctgggcaggtttttctctcctacaagctttatttgtcaaagaacacaatgttgtttgtgatatgttgaaagtaagacaatcttttaaattttcataattattgcttgatttgttgattttccttttcttatttacattagtttagctaataatttactcttatttttaggaacattatccaaaattagatgatgagaatctctatagacatgcaagactagtggtttcagcagtcattgctaaagttcatacaatagattggactattgaactattgaagaccgatactcttctcgctggcatgagaattaactggtaaaacctttattattattagagtaatttacagcgtaaatacttaagtttaactttaggttgtaatttaatttttgacggtattaataattaagttatatttctagaattttcacaggtacctgactattaaatgtcaagttattatccacatatgtattgttttctaattgatatatttaaattaatttatcaataaaaaaaaaatgtaatggcatggacttattagggagggactgtcacgtgaccattgacttaacacttaacgatcaagtacttacgaaagttttaaaaatgtaacttatgtatttatcagtaagcgggagttaaatttaagtatttatatcgtaaattattcttattattattatgaatcatgatatgacagttgtttaatttgtgttcaaaccatcatatccgttaaaaattgtcattttgtgttaattttgtattagtaattttatttatgtcatcttgtgatatactaatattgtttcttattttttcacttgtgttttgtaggtatggattattagggaagaggattaaagacatgtttgggcatatt

SEQ ID NO: 98770 - DNA, 753 bp, Cannabis sativa
aaaattcaagaatttttattttcttgtttaattgaaggaaaacattggtacaataaataactcgatttgggtgtgtgccatcccagttgaatttcaataaaacctaagaattttgtaatgattacctgagagggaacatctagggtttcagagagagtcgtagcttgttgaagttcacgatctggtggatgatgcggaggatgagggtgatgatgcggaggatgatgcggagggtgagggtgatgatgcggaggatgatggtgatgatgaggtggatggtgatgatgaggatggtggtggtggtggtgaggaggaggtggtggatgtggagcgaagaggctaactatgtcgtagaagaagagaaaaagtggtattccgatcaaaagaatctgagcgcgatccattgccatacacagacagaacactccacactacacagaaacgcagtgcagcggaaaagacaaaaagtgaagaagagacttcaagtctcaactctaagggtatgtttggtactctaaggatatgtttggtaggaaggaaggagaataggatgaacaggatggagagtaagatcaatgaagagtttagaaaggatggagagtagaaatgggaaggatagttgctctccattgtgctgtttggtatgagagtaaagttagaagaatggggagaatgaagagtttagaaaaaatagagagtgggatgagtaaagaatctagaaagtaggggtgggcatccgatccaatccaacct

SEQ ID NO: 98771 - DNA, 936 bp, Cannabis sativa
tttgtgaatgaaggaaatcttttttttttcttccaaaaatctacattaaatcttgtaattgtgcggttaaaaattaggctaaaaattaataccatttttatatttagatctttaaaatgttcgaaaaaaaaaaaaaaactggagccataaagaaatcagaaaatgccaacaatgtcccacactctctcacccgaaaatggcctctgttgaagtggatgtgatttcttatcttcaatctcctctttcccagatacccaacaaaaatgaaagctccactacttccttagttcaaactcataaacccaccaaaccacattcatcaccttcgaatttcccccatccatggaagctcttttcatgaatcaatctctctctcgccttaaaatactctccccaagcttcaccacttcctctttcgctacccaatctattcgtctcagaccgcctcaaaggcccaacctcacgaaggtctccgtcatccaaaacgaagagaaacagttacaagaagcaacggaaacggttcccaaacaagaattcaacgatgacgagtactacggcgaagtcagtaaaatcatcggcagtagagctttggagggtggaactggaatggaataccttatagagtggaaagacggtcataccccttcgtgggttccctccgattacatagctaaggacgttttagcggaatacgagaccccgtggtggactgccgcgagaaaagccgacgaaaatgccttgaagcaactcatcgaagctgaagatggccgtgacatagatgccgtcgactccgacggccgcacggctctactctttgtgtcggggctcggctcggagccttgcgtgaagcttttggctgaagccggagccgaccttgactaccgagataacagcggcggcttgacggcgttgcacatggctgctgggtacgccagg

SEQ ID NO: 98772 - DNA, 610 bp, Cannabis sativa
tcatgaaaaacatgaaatgtactaatgtttgttaagatacaaagtgatcatttgaataatgctatctttgaaactaccttggtactcaggttgtttaattttctttttctttttttaaaaagaaaatttagctttattacgctactaaaaatagtagtaaattagtaggaaaagattcctaactaaaacgacaattaaagtataatatagcagccctaacaaggttacgagtcattctattagttgctcgctttacaaaaataatagaaatatttcttaaaagatttaacaaacacttacaatcattaatagcaagcccaaataaagaaatcatatcaaaaattatttcgcaaggtttgcacaaccaagagacaatcagtttcaagagaaacctgccattgatgatctttgataaagaaagtgcttcttgattccccattattttagctaactccaacttcatttgaccttgaaagaatgaagtatgaccttcaatccaaaaaatcatttgaaaccaccatgccaaagccaaaaccattattccttttaaactgtttgaatgtacatttttcaataaattttgtaaaataaataaataaagagtaaatac

SEQ ID NO: 98773 - DNA, 613 bp, Cannabis sativa
tgacacctggtggtcacccatctcccagattgccattttgtcaacctggggaaatttcaaggagttttttttctttcaaaaattcttccaagtatattctttattttcatcaaaaattaagattcaactctttctggggaccaaacaggacttcaagatggcctgaaacttgacccaacggccaagttgacacctaacattgggcccagcgcccacggttacatattgtcaacctgggttatttcacatatgttttctaaaaaatatttttttggtattttttccatcattagaaataatgaagatacaagtaaaatcggggagaaaacaacaatttcaagggcttcaaaactgagcccaattcctaggttgacaatgaatctggtgcgctagttttgatcagttaaattcaatactgctccaagcattctctcgaaaatggtcaaaaatagggtagaataactcatcgtcaagctccaaaattaccttgaagtatcaaaatgacatcttagtagcttcaaaatagcgcccaggttgacgtatggtcgagtgtgttgggtttttcttatcaaattttgattccgtctggaccattcctctagtttttcacaat

SEQ ID NO: 98774 - DNA, 629 bp, Cannabis sativa
gtagtatgtatgtatactaagtacaaattcttataaatttaatgttggattttgaaacggcccggcaaaattaaggatgtatttgagataatgaaaactagctagctataggggcatagagtatcacgatgcgtttgaatctgattgaactatcgatcaggcttccacatgaatatagaccacaattattaagtgcaccatttaagagatagtagagcatgcgcatttatcatcaattcgcaattgcaccatttacaaaaattattatgtatatcctacaaaaattattagtacatttctttgaataacaaacaacaaatcgtttcatctttggacactatatttataaataacacttttttattataaatatgaattataattaactaaaatatataacatattttttgtgatttttttagaatttacaaaaatatgaaaaaaaaaaaaataaataatttacatttttatggacataaaatttattatacaaaatatagtaattttaaaaaaaatatatatatataatttaaaaaatagaaaccccaataaaacaacataaataaagttaacaagatttataagaacaaatatcgatgaaaaagtcgtcagagcagctatcgtctcta

SEQ ID NO: 98775 - DNA, 1246 bp, Cannabis sativa
  modified_base (425)..(432): a, c, t, g, unknown or other
tcttctatttaataattgattatattatttattaaattaaaatgtaaaagatttaatattaaaatatatcaataataatgatatatcacatcttataatacttgccaccttaaaatgtgtttagcctttctcaattatacaatgtcttatcatattataaaaacaatgctcttatgtaattggtgtgacaccacaatcatcaaacaaccaatgatttaaaatcaaaaataggaagtacttgaaaagttagaaaagttaatgaaatttagagtccgtttggctgtgttttcagtttttaaaattgtacttttaaaagtgagaatagaaaacagtttttgtcattttaaaaatttaatggtgtttggtacaaattttttaaaattatttttaaatttttttgactaaaaaaaatcaatattttaacnnnnnnnnatgacatgaacccatccgggttcgggttcgggtatgattccgagtctagatctgagtacgtgaacaaaaatataaatataatatgttagacaaaaaaaattatttttaaaaattgaaaacaacattttaatgtttttgttttctagtttttcaaaactccattttaaaaaaactgttttaaattttttttgccaaatattagtttttaaaaattattttcagttttaaataacagaaaacagtttttaagtcatgaagccaaacaacctcttagtttccttaaaaatgaaactaatttgatttttcaacttaaacctaatagaaatggaatttatggtgtttaattaacacctcttaagtcttaagcaatgctaatgggaatgctataaagaatacttggtaacatagatatatttttgacatttttactagacacttgcaatttgagtaaaaaataatgtctaagtattgatgttgtttttgtgttacttttatttagttattgttgttgtttttatagagtattggaaaatgtaaaaaaaaaaaaaatctttctatgtaaaaatataaaatttttacaaaaaataataatttatgtaattattcttataataaatatatgtttaatttagttttactattgatgtaaatacttattgttttattagtataattaaatattaagtctcatttattttactttgagtgaatgaagatcatagaaaaactcttataaattgtatatgatatcttttgaccaggaccggtcctgaaaatatatgggcccaagacaaattaaattttggggccctca

SEQ ID NO: 98776 - DNA, 973 bp, Cannabis sativa
aaaaaaaaaaaaaaaaaccaatctgaaaaatagtatgcctttgctcttcaaaaacccccaatttgaaagttgaaaaatccaattcaaacccgttaaggttccaccattattaaatatagaaggaaaatcttgcgagaagtttccaaaggctaagatctaagaaatcaaaggaaaatcattgaggtgcccactattgctatcgacctggtggagatcgaggtcaactcttctgatcgttgatcgttttttatgcccactaattcttcttctcttctctattttgagaaagcttattaaaataagggttaaataaatccccaaagtttttatctttaagcttttttttcgttttctcttctcattcccaatataaaattctcttatttatttgtttagagaaataatgtgctgttgtcaaagcaaaaagagaactccaaaatcaggtgctactactgctacatccgcctcctgtggatttgcacctggctcagtgggttgtaccattgctcatcaaacttatcaacaccatcaccaacaaacctcacttatcgttcaaacccaaaaaatttaagctaaccctaaaactcatttaccaccagtacccaaactccagcaagaaccaatgccacaacccaagcagcctctccctcttccacatccaagcccaatttcttctaacctaattccaccaaatgctatccaaggtacttgggtcttgcaaaaagtttcaaaatagcatattataaatgaagaagatcgcctggatctaggtctcgcagaagaaaggaggaagaagttacagggttggggaggttatgatcgttctagaagaaaaagaaaaagaaaaagaaagataaagaagaaaaaataatatcctctatttttttaaaaaaattaaaattatgtaagtcacttacaatttaccacgtatacacttacttacacgtaagtaagtagtctaactgagactttg

SEQ ID NO: 98777 - DNA, 941 bp, Cannabis sativa
tataagtattaaggttatatcttctaaaggagaatagaaagacttattttaatagaattcttgaccccttgatttaataaattttagattttgtaaagggataataaacaaacataaagaaatcatgtgacaaaataaagttttattgtctaagaatttatgctatactttggtggatctttcctcgtggtttcatggaataatcaataataatatattgtcttctgactaatgaaacttattttttttttcataagggcattaatcttcagacgttgtttcttttcaatttttaaaaccatagttgacaaatcaactaggcaagaaaattaaagcgttgaaactaactatggtggataacactaccatggaaagtatgcagaatcaagtgagtaacgtctaaaattattttgcacaactactaaaaaaatataatttcatcttccaatacaaaatgttaggcaaacctaacatgaagggtatttaagagatgtaattaatatttatctaaggacatggctagaagtgtgattagtcattcttcttcataaaactcattttggagagacacatttaagactgcaacataaatcctgaacggggtatcaagtaacgtataagttaaaattctttataaactaaggttatggttagactaattgtctaacaaaaggatatattttatttgtggatgttcgactaagatgaggtcttataagtctcataaaaggaatatggactccaaaatagtaaggaactatactttactgtatactctagtaattaaagagctacaaattttgtaatcccacactataaggttcaagtttgaaacgagaaaaatttatgattactttcaggatgttgagtttggggtgaaataagattattatagatattgttctagaggaggaattgacgttaaactcaattccaactat

SEQ ID NO: 98778 - DNA, 558 bp, Cannabis sativa
  modified_base (518)..(524): a, c, t, g, unknown or other
agacttctaaaatattcaagattaaaatatttagaaataaaaaatttaagttacgattaaaaagttatcattaaaagctgattttttgtagagtcatattatcatgttatttttttttttttttttgagtgtagcgtaatgatatttttacaatgaattaataatttgtagcttaaaagtcatgagtcatatattatcatgtcacataattctaaaacttgctatatccctatacgttttaatttttcttcccccatttgatgaaaaagtagtgctagaaaaaatcaattttattcatgtagagtttagtttattatttattatatttgtttaggttgtgttacataatcttcaaactgcatactactagtatttatcggattttcaagttaaactatacgaactcattaaacttatagagaaacttcaaaagaaaaatatcgaaaatcaaaactgtgatgcatgtgatgatgtctaacatttactacaaaattttttatttaattttagtcacaatnnnnnnngtgactaaagataaaaaagttgtggctaattata
